United States Patent Application Publication US 2015/0376612 A1 - sequence listing, part 44

SEQ ID NO: 104623 - DNA, 2410 bp, Homo sapiens
aaatggtgtcaccaaccaaatatttagaagaaaccattccctgaaccacagccacaggaaggttgcatagaaaaccccgtaaaatcctttactccctcctcctctccatccttgggttgtcttaactttctccttgccccacgcacgatttgtcagagcacatcacccacacctgccccctccttgcctccaggcgaggtgagtgggtgccggagcctgggctggcgccagccctcccatccagggtgctgttcggaagcactccaccccacagtccaggccctggaagcccctgagtaaaacatggttttctgcagagcaacatcttcagtctgggcctgccgtttatttctgggtgtctttgtctctgggcactgtattttctgtcccctttgagtcgcctggaggctctggcaccctctctcctctgcccaggctccttccgtccctattctgttgtagcaaagttacttcttctagatatttttctcttaatgggtaaagacctcacagagcccagggcagagctcaactcctgtggtactggttttatagttctggggagcttgtagttgggaccctgttcactgccacctctccctgccctccctctcccctgaccccaccctcctcgctgccacagaagcataaaactgcagaggtaccgacccggacttccagttcatcctctgccccttctgcttgacctccatcttccgggcggagccagcctgctagagctcggggctgcagcttggctggtggcttcttcgactcctttctctgctggaagggggaaacagtctgtttaggactctaagcccccatgtccttccagaaacagtgaggtcagacccagagtcctttgtgctctgggagaagactgaagcccagagatggcgctgctgctccaggtcacagagctggttgctaagtggcagggctggaacaacatgtggggctttgtggggaggtctcacctggactctctggtgttcagggctcaggaagctggagcctgccatggccaagtccagccagagcatgccgaggagcaggaggctgcagacggtccctggggagggcatggcctcagctgggttgcagacaggtgggcctgggggagagagggtctccaggcagctgcctccccttctcatgtgcctctgagcttgctcaggtaggagcccagcagatggcgtgaagggctttaccatctggggtcctgactgctgtgtagagaggacccccgcttccacctcccaaggtagaagatgatggatgtgtgttctcttctccaaggccgttcagggcagaacacctggcagcaggacttgataggggctgggggtcctccccggtgccttttgtcccaggctctgagagctcatggcgagtcttttcatgaggagggaggaagctgaaccagcaagggccccagggcactcagcagggagggggttagaggtagctcctaaatgaagctctgtcttccagccagacagtccgacatcccccgtgtttagaggggactcctgaggcccagagaggttaaacggacgggcagcagtcacggacaataaacctgtcagcaaacgcacacggagagtagagagagcttacctgcagttcctggcggaggtggtgcctggtggctgtcaggtccttatataggatgactggcgtttgttctaaaccagcaaccccatcccagaggtggcctagcttccgtggggctgatgtacattccttgggaactaaaaatgttcttgtcctctgggtagaagtcaacagtggaggtcagatgccctgcggaattgctgggttggcgagggaagaagcatgtgctccagctgtccctggaacacggtggcggggtgccccaagtgggcatggccctggtggaggagggagggaggagagtggctctggggtctgggtgcagctttgttgctgtgtgaccttagcttactcgccctttctccctgggtaaaatgaggctgtcatcactaggagagctctgagacctccccagtccagcgccccgttgtttcccatgtgctgttgctgctctggcctctgtgagccccgggagtccgcagggagccaggctggtgattctacaccttcccgaggaggagtcccacctcccggttgagcagactgctcctgatcatcctctccagagagtgggtgtggggataacttcagccagtggctatgcttcagtcatttctgccaggtgtgacatgactgcctggcctggcgttttttcacatagcagcttgccttgcctccctccagcagctttggtccctattttagcggatgcctcttctgagagggaagtgcattggacctggaggtggaagatctacgcttagcacgggcctggctcctctctcattga

SEQ ID NO: 104624 - DNA, 1112 bp, Homo sapiens
cttcagtgtagaaacaacatattgaactgttaccttcctctaccacagtagttttcaaactgcagtgttgttaaacctgttaaaacagattgccagccccacccccagagcttcctaatcagttgttccaggccccaagaatctgcagttgtagcaagctcccaggtgaccgatgctctgctctggtctggggaccacactttgcgaaccctgctccccgccaccccatatcctctcgctgtagctctgtcacagtttgctgaaaacagtatcctgtgttgacatcatcatccacagctgctgttattgttactcctttttttctgtgagtttttattcctggactctcattttggtgagatttcagtggaggagggacatgctctgttcacccacaagcctctgggcagtggttcttgatgaggatgaggctcatatttaggggacagcagagggaagggcacagacccgtgataatctgcttgtgcactgactcgcaggtgaccctgtggaaggagtcagttgatgggcagtgggtgtgcatcagtgatgtcaacaagggccagggctccgtatcagcatcagtgacagagggccagcagaacgagcagtgacaagacaggtggggcctggctccccacccgccagctccaggactgccccttcctgggccaactaaccagacaactgggaagagcccccaactccaacaggattattttcccaggaggagttacagatgcagccacagattgatcatctgccttaacgtgatcggagatgctttgtaatctactgtccagctgaaagcactcatgttacgaggaagaaactacaagtgatgttcaaatctattttgggtcatttttatgtacctttgggttcaggcattatttggggggttttgtttccaaaggaactaaataaagtcatattgcttataattcctgctgcgttatcctaaccaccccaccccaccagctcagtttgactcttgtcggtccacgcactagaacaaactattcacaaaggccacggctgtgatggcctggcttaaccccacgcacaaaggtggcttgtcactgcatgagcatctctgattcagtttatac

SEQ ID NO: 104625 - DNA, 1056 bp, Homo sapiens
aacctgtttggtttggttctaaacttgggatttttgtgcttttttacttgtgccttctcattcttggagcttggtttttggagagctctgcccattcagttgagaaggtatagacggccagtggaagtgacttggcaggcatgaggaaaaccccagagaaaatctgagttagcaatgcagacagagtccacctccgaaacccggatgagaaaaggaatccgggagactcttaaccagtgtgaagagacagaaacaaagctgtggacgccccagaggtcctcggctcccctttgaatcccccaccctgttcctgcagagaggtgccgggtggctctagactgggaggacatcacatcacaaacgcaggagtcttgactccacctcctgactctatcctgtttcttcctaggatggtcgtgtgttcatttggacctgtgatgatgcctcaagcaatacgtggtcccctaaattgttgcacaagttcaacgatgtggtgtggcatgtgagctggtccatcacagccaacatcctggctgtctctggtggagacaataaggtacatacccattccccgtggcatggtggacacagcctgttggtcttcaccccgcccactagagagggcacttgacattcccatctgactgcaggctgggcaggagccttagccaggactgcgttttgagtgtgcctcttagttacatcattaatgtcacagcccctgaggtagtattaacacgtccccctttcacagatgaggaaagaagctgacagaggcgatttgacttgcatgggggtcccaaaactatgaggtggcagagccagtcaggcccatcaccctactaagcatttggtcacctcatggtgatgttcagttagctgtgccaaaaaggcaagtgtataagaacccataaacagaagaagattggggatattttttgtccataacactgaaaaggctttttaaaaacctttagagtttatgaatacttgttatgctggtaagaggcaggtacacagtgggtgcactggaagagtttgcattttgcagctgaa

SEQ ID NO: 104626 - DNA, 1033 bp, Homo sapiens
gtggaagagggagctgtgattaggaagggcataatgacagggcttttcaggcaggtggcagaattcttgtttcttgatctattactttataataaaagatttttcttaaaaaaaagctccaatgtaccattctttcatgtgtttagaaaatgtcctgtttcttaaacttgtgggagttcttaatttctacttttagcgcacactgcagaaaaatgcacacactgttgggatccttgagggagaattctgagcagtggaccccatgatgagtgcttcatgtcagccttcacacacactccagtcctgagaagcggaggggagagggacagcaggcttgggtctgcagaagcagtgttctcttgcaaggcagagtcaccatgtgtcccatctttacagattggctgcaatgccgtcagctgggcccctgctgttgtacctggaagcctcatagaccacccatcggggcagaaacccaattacatcaagaggtttgcatcaggtggctgtgacaacctcatcaagctgtggaagtaagtagggatgtgtggccttctctttgaggggacacttctaccctttaccctactcaccatgactcagccacactcacaagaaacaaggtcacctttctttctccctcctgccagtaaaatactgttttcaatctgttggaggacatccttgaaaaacaacacaacacctgttcacctaattcccaactgttggagctgactctttggctgtggaagcagagcattttctggagggttttttttacagctggggtgaagggaataaaatgccacaaactccatgaatgaaagaagaaagatggaatcgcttctccaccccaggcagagcctgttgggttggggaggagttgaggtgtgggaacggccccctgctgattctctttctgtccccactgttagggaggaggaggacggccagtggaaggaggagcagaagctagaagcgcacagtgactgggttcgagatgtggcctgggccccctccatcggcctgcccacca

SEQ ID NO: 104627 - DNA, 1530 bp, Homo sapiens
aatatttcctgaacacttctggctggaaaccttggaccaattaatgactatgctgtagacagcacatacagacagtgctggctgcagtctgggcaagtgaggctcctgcctggccaggacaggaaggctgacccagaggctcaactctctctcaaaggctctgtgaccttaggttgcttaacctcttaggacctcaggctcctcactgtccactgagcaccccttttgcaatggcattgtatagttctccctttgaagttcttaagcaattctgccctgatatatcgtctcagggagccatttagttctgtccaaagtagtgcctgcagaggcactgtgggttcctctggcctatctctccctttgtagtcatgagggtcctgtgtggcaagtggcctgggctcaccccatgtacggcaacatcctggcatcgtgctcctatgaccggaaagtcattatctggagagaggaaaacggcacctgggagaagagccacgagcatgcgggacacgactcctcaggtatgctgagcttggcagcagagcgggcaaggggaccactgggtaaaaaaggactctgtcccggctggagccctggctccctgcccctcgtggtgcctcttgtctgtctcttgagctttggttggcttttctgctactctgtcctcagctgagtaaggccctaagacctaaagccagtccaaagcaaataagaaaagacaggtgagtttctcttcaggattattcattgcaaggactacccttcattctcagattgttttcctacccacttttttgttagatagactgtaggttatgaaatcgtggtattagtaggtgatggggtttttttgtgtcctcagttgaccaagttacagcttcccccggtgactcctacagttgtttgttgtagacatttagtaaaacagtaaatctgtggaaggcgggacctggggccgcggtctccctgctttgctcactgcactctccctcttcccgcagtgaactcggtgtgctgggccccccatgactacggcctgatcctggcctgtgggagctcggatggggccatctccctgctgacttacaccggggaaggccaatgggaagtaaagaagatcaacaacgctcacaccgtgagtccatcccctgcctttcgtgcagtgagagcgcctgccttgccccgtgtctgctgcagcctccctagagggtggcacgggagggtccccgctggacagtgggccggggagtggtcagctgaccagacatgattgctctagagcagctttgagcctctctgccctgaagccagaccaggcagggcttggcactgcttccttgttgtgtgctcccaagcaggggagggctggtgcagcagcagcctgctcactgccaccttagctatggttgcctccaggtgacatgccctgcagtagtcattgggaccctgtagaatggagtggtgttattaaaacttttaaaaagtatgtgagctatgcatacatttaagaaagattaatataaacaaggt

SEQ ID NO: 104628 - DNA, 1659 bp, Homo sapiens
tacttaaccgcagctttacagaactcagtgtaacaactgctttacattctagacaggcagcctggtggagtgaagttttgtggactcagcattagaaggttaggggatggggctcttttcccaggtctgccttgaactagctctgtgactttggcaagtgctttctcttctctgggcttcttcatttccttagtctgtcgcaggtctctgattgactgtgcccttggtaccctgccctccccgccttcctgtgcactttgtaacctatacagctcggcacatggaggaaactccttattgtccttacttgcctttgcagacttcggggacctggtttttagagagtctagaatctgatgagagaacctgtgcttacttggtgtgtacctcttgaactgctttgcagccatcctcttccactgtctgcctttctgaaatcacaagtcaaactttatacctacagggcttgtgctggaaaagatgaaatggggaaaatggtaagaaatgtctgttccacactgaaacttcttttaagtcctcttttctatcccaagaatttaagagaagagtggttgagcaaagaaaaaaaataacagcttttgttcatttacttattcattcagcaaatagtcgctgagttccttctatttgcaaagcactgtgctggatgatttgaggggatttgaaactgcagatggctcagaccatggctccaaggagctcaccttctagtggggagaagaaacagcataaagtgttgtatgtgttccttgctgaagatatgcaagagagtccagccatttgagggtctgagaatcttcaagaaaggtgatggatggccctttttgagctggacctcaaagaatagataggagggagatgaccatgacaccatgttccagccctacaaactgttcaactctggatcccactacgtgacggaccagggagcagcctcaggaaacactcgaatcaagtctcccagtctgaagtaataaccccgttatgcataaactgcctggaacatcagaggctctgtcatccaggaaaggaacaccagctgtagctcccttggggtctctcctcaaccttaagggtagccaggactgcttgccgtttccccacacacatcaggctctctcagacctctttgtctctactcgtgtattccctctgcttggctgcttggactggtattttcccctgtgccacctgcaaattcctacccatcatctagggctcaattcgtgtctaccaccccagcccctcaggctcctacaggacacacaaaccaccattaaataatttatcttgcgacactagcattattcgcgagcttctcaagggcaaaaagttcctcttatttgtgtctgtatatccagttcctagcacagtgcttggcagaaagaaggtacttagaatgaatgcttactgaatgaatgaatgaatgagtgagtgaacaaacaaatgcagtcaagaacttgagatggttgtattctaactgccatgagttaatttaccagtgatatctttggttctaggtgtcagtaattaacactgtggatacctcccatgaggacatgattgtaagtattaatatcaccctccctggaggggtgtggacatgggcatttttgtgggagggaagcaatttggggt

SEQ ID NO: 104629 - DNA, 1043 bp, Homo sapiens
ttctgccaagcactgtgctaggaactggatatacagacacaaataagaggaactttttgcccttgagaagctcgcgaataatgctagtgtcgcaagataaattatttaatggtggtttgtgtgtcctgtaggagcctgaggggctggggtggtagacacgaattgagccctagatgatgggtaggaatttgcaggtggcacaggggaaaataccagtccaagcagccaagcagagggaatacacgagtagagacaaagaggtctgagagagcctgatgtgtgtggggaaacggcaagcagtcctggctacccttaaggttgaggagagaccccaagggagctacagctggtgttcctttcctggatgacagagcctctgatgttccaggcagtttatgcataacggggttattacttcagactgggagacttgattcgagtgtttcctgaggctgctccctggtccgtcacgtagtgggatccagagttgaacagtttgtagggctggaacatggtgtcatggtcatctccctcctatctattctttgaggtccagctcaaaaagggccatccatcacctttcttgaagattctcagaccctcaaatggctggactctcttgcatatcttcagcaaggaacacatacaacactttatgctgtttcttctccccactagaaggtgagctccttggagccatggtctgagccatctgcagtttcaaatcccctcaaatcatccagcacagtgctttgcaaatagaaggaactcagcgactatttgctgaatgaataagtaaatgaacaaaagctgttattttttttctttgctcaaccactcttctcttaaattcttgggatagaaaagaggacttaaaagaagtttcagtgtggaacagacatttcttaccattttccccatttcatcttttccagcacaagccctgtaggtataaagtttgacttgtgatttcagaaaggcagacagtggaagaggatggctgcaaagcagttcaagaggtacacaccaagtaagcacaggtt

SEQ ID NO: 104630 - DNA, 1131 bp, Homo sapiens
ttgaacctctgctttaaagtgaacaaggctcagtctctcactaggtgtgggtgcccgcaggagtcgactgtgcttcctttaaccactgttccccatcatctctttgatggtgcttggtgattcctcctgtcctaacactagtttctaccaaaaccaaagagatttttaaaaaccagctcaaggatgcctataacctgagccccctttttcactctcccccatcctgtcaatgctaataacacccagcgactatggattccagccacctgctttgccctaacccttctcccacccgcccctcctgtgagccccccgagcctggctgtggtccctgggcagtgctcctgacccctgtgcttcccttgcagatccgcgtcgtgaaggcgttccgtagctctctctatgaaggtttagaaaagcctgaatctcgaacctccatccataacttcatggctcatcctgaattccggatcgaagattcccagccccacatccccctcattgatgacaccgacctggaagaagatgccgcgctcaagcagaactcgagcccgccgtcatccctcaacaagaacaacagcgccatcgacagtgggatcaacctgacgaccgacacaagcaaatcagctacctcttcaagtccagggagccccatccacagcctggagacgtcgctttagctgaggaccctctcgcctgcccgcccgccctcatggaccccgctgccacccgctttccgggcacccatccatccaggcacccaactcacccaagcagcaacgagcaacaatcggaaaccaaatactggagagaaaaccaacgtttccacccacagaccctttctctggctgcgatgctgtttgaactctttttcacttcaaggcaaggggcgggatctccactgggggcttacgggagtgagcggttttcccaaaacaagcccttcctggctcccacccagacatggaccagccatgcacccgcccagccaccacgtcccccgcatgaatgtactgtacactttcaatcctccccttgtttggtttttgggggttggggaggggtttttgtttgtttgtttgttttcttaggcgggaactgcaaacagactcttttctgagactatttatc

SEQ ID NO: 104631 - DNA, 1039 bp, Homo sapiens
tgtccaaatgtgtgtactgaaaccacagaggctgtgatcctgtctgggaaccagtgccctcaggcaggggtttggtcaggctctttttaagactataggctcaggaagggtctcaggaggcacccagaattacaggctggattctgtcacagagggggaatgcgagattctccaggaggcatgaagagggagaggcaagatggtgagcagggtggggaggccctggccaaccctgccgggtcccctgagagaatgaggggtcagggcaaggactgtcaagttggctttggctgagcctctgcctgggcttcttttccaagactgttccaaagttggggtaaccacgggctacaggggactgatctggcctcgaaggaggtcagtgtagacacattcctgtctaagcatttctgcagaaatgaagaaaagggcatttctgcaaagaagtgttgttcccggacgggccctattgaatggctttgcaaatgaggcagaagaaaagctgagaaagaagtggctgaggtttgagcggacagctctagcttccaggctgtgaaagctaagatgaggggctgactcggggacgacttccaaaggcagtgggcctgcccagcgatgtcaggtgtgctccgtcgtggccagggtgaagtgctgcccttcaagaaagaggctcaactgggatggacaaagaactgggccttcacccagaagccagactgctagcaggcagccccagccggagggccgcaggagtcatcgggaggggtggcagaacagaagtggattcttccccatgtagctctccctgccgggacacttggttaccgcacctcaggataggtgggggtgctgagcaaggccagagctgagttggtgcagaaaggagctgggaggtcagctggctaggctgctgctaaggtgagagctctctggtctaaaggggaggaggatgggaccggtgttgccttccccgagaaatcctggcagtgactgcctagtgacggtatctcatggaaatgtgactcagccaccatctgct

SEQ ID NO: 104632 - DNA, 1038 bp, Homo sapiens
gcagaatgggaaagagctatgccttcattcctaatcttccccaaaaggcttgtccatggggctgaggacccagacgcaggccctacaggaaagctgcggtggcagatatcagaggccccttccatttcctgtaggagcagtcaggcgctggcatgaatgcagcctcagggggctccctgggagtgtaaagtcagcactgcccgctggcattaacctttgtcctctgaatccttccctcagttactgggcccagcccccaagagcctcctgtagggggtgggccccagtgggataaagatggcctggcccccagggtgcccaggggtttatcactctccaaagcagccccaaaggttacaggaagtccttttggatgaaactaaactttcttatttatcttttagttaatttttgcccccgtagcttctcactctagcctgcagacagcttgaaggcaagaaaaatgcctcccacccatggggtcccactgcctggatgtgtgagcaccttgggaatcaggccccttaggccctgagttggttctgggccctcctcccaagccctgtgtcctgggtcaggagcctttgggctgcatgctctcagagctgtgacagggtctggaacttgggcaaacgtagaaaaacgaattggtgggagaatattctgggacaaagctggaagggcccctaaagagcatccagcccaaggagccccagagctggggcaggcacagcactgaggccacagatggccacaggcacagcactgagtaacaccgcaatgtggcagagtgtgtcctgcttgcgttccctctgagtgctctaaaggatcctgattgacgccagccggccaccagcgcccgcagaccactgattcatctcccttcctaacaagctgctccagccttgaatccctggcaggccatggcttctagctggagtttaataatgtcattctcattacattaatgtttttgttagcttccatttatgacaagtgatactgatttttcagttgtcttagtaacaggacgttgcc

SEQ ID NO: 104633 - DNA, 1825 bp, Homo sapiens
aatatttttccactcctggcccccaatgggcagccagatctcctcatttcatggagccctctcttccaggggactctcttgactggttggaccagcagggtccagacctcagcacagaccagcaccatcccagctaaccaccctggtcatccaccatgctttatttgaaagaccctccatgtctgagtttctcccctcaacctctgcggcatctctatggaacatttcacccccaccccaaatttgagtttcttggtttccaaaggataatttttttttttaagaatagagtcatgttatctccccacaagttggttcatgtctttgtcgttgttgcttttctccattgtgacactgcattttccatccctcccacccccctgcagcagcagacggtgcggcagcttcaaatgctgcagatagtgcgaatgccagcctagtcaatggtatgtctcccacggcgagctcctggtcatggttggatgggcgtctctcacccccaccccaactttgggctttctttccttgttctggactgcacagatctcggatgtgcatgggccgctgggacagtcaccttctcacatggggcaggcgcttaagacaggagccacagccgggggagtcagctctgcaacctgtcagcctcacagctgccaaaaaggtgctggctcctgtcgagcccttgactccccatggagcccagataagagacgagactttggcttcagattggctcccaagaaggagcgtcccacctggcatggccctctcctaagtgtattcctggccctggctttgggaagaaggcctgggatcagggcttgggctgaagctggcatctgggtccccagcaaaggctctagtcctcgactctaaaatttcctcgaggcaaggggacccaggccgggattcagctccttggccctgtcctgtagcatggctgagccagcagtaaacagtttttcctcttctctttcacggagccaacgggcagggggttcgcttgggctcgggcctggttctgtccttcggatgtggactggtgtttcttgctgttgcctgtgctggagcgtttgtcctgggtcacaggggtggagggtgggggagaggggctggcactgtgtactggtgtctgcatcttaatctccttacacgcaagcaagaaggagttccattcacttgcccccaaagcctttagaagatttcggatttctatccccttctggcttcagagcaacagacaaggcttttgtttactcagataccacccctatccccaaataaagtgacataatagtcccccaggctactcctgaactgttgagagccattagggctccatcatgaaaacattgccccagaggagctgagggcaggggaaaatctttttcccaccgtctctgcataccaggcactgggctgtgggtttctcatccattatatcatatcattcacttctcaccactcctgcaaaatatggagacttgttccccgcagcctcccatcccctgccctagacctctccccaagccacctgcattcaaagtgcccaaagatggaagcacctagtaggtgtcggggctgagtaaggcacttctgcgagcagtgccttgccaagaaggactaattctggtatggctctatttcaggcacaggaggaggaaggatgacagcttggggagtgggaggtgtcatgcctcagggaggggtggctgagggtgacaaggagaacccatgtgggcaaacccatggctgagagagaaggaacctagagggggcacccacttcaccccggcagtgagcctgctgagctttgtgaaca

SEQ ID NO: 104634 - DNA, 1774 bp, Homo sapiens
gaactctcagactggcatcatctttaccctcctgggggctggtggtgaagaggaagagaagaaagacaaaaaaggtaagcctaatccccttgcagaccaggagaggagctcttaaggccacattttttttttgtttatttgttcactcaacaaaatagttattgagtgccttctacgtccgcaccctgtgctgacagccacctcctgcatccttaaggcctgcatgggccaggtaggctctgtctgttccatctccaggtcttgtcccagtctctgtcttgtccaatcatgtcatggaggcccctccttcccctccgggccaggccaaggatgctgaccatgttgttgagtctccagcctcaagtggtggaaacagccagcatcaattggtcccatcatcactccagtattgagtagaaatccccacccattggaagcatattccttccaatattgtcaactccactgagcagaaatgaaaatccacccagcatagattcatccaagacatgggcagaggagattctgggaaaggtagccagatgcatggctccaaatcaaccattatgagtttactctccagtgctcccagacctaccatcttgtctgagttctgattcttcctcctccttgaaaataagattccttattcactgggctctcctcaatgcagcgagctgaccacccaggctaaaactgtctctcagaacagagggaaagatgctcaaacaaaaagctcaagtctcttcaggccaggcccaaatccaaaggcccaggcttctggtcccagcacagctgactccttacctgtccccacacttgatctcaaagatagcccccctttcacattttcagtcttttgtctccttcctcaagcacaaagggaggatctgtgacattcagaacttctagaaccccagaagggagatgagaggacagatgcctcccccactgagttttaggggcagccctgctccctccagctctcagaggctaatcaggcacagagcttaggtcgagactgaagattacttgttcctgaaggcaaaatccattttctagggggtcccctaagattatggtggcccctccagcaggacaatggggctgagctgtgttctgggaaattagaaggctggagagagtaaaggggtgctgaggctgaaactgaggaaagagtcgtgactaagagtcccagaggacataaggagagtgtgcacatgctgggtttgaatctgtggtaggatggctgagccctattccacaatgatagcagttaggcagatctaagcaggtaggcaggatgcagcagcctgtactcattgtcttcacctcactgaggcttgagtgaggggaagacgcccccagactcttctatgggccagatctgtggtttttaaaatgctagcagggccagatctgtggtttttaaatgccagtaggaagacaagtgtcaactgccccagaagcacagttcagggtccttcgctgagcatgcacctgcactcctgtgagatggagatgtcagaaaaatagcctcatgtagaaggaagatggggaatgtggaagggatgtggcagaggaagcctgggggagcagtccagcatctcaggccaccatgagcagcatggcctcagctgggccccctctgccctcccatcccatcacctccactaggaacattgcttagagcccgccacatgtccccatttcaggatgaccctaggtgtatggccatgtgtgtatgcacatgtgtgtttgtgtgtgtgcgcgt

SEQ ID NO: 104635 - DNA, 1011 bp, Homo sapiens
tgctgtactgatgtgtctgtcccccaagcccgatgctcagtgggcgttaagaagtgggcgttaggaagtggcagtgtggtgagagagttaagaggcagacatcctgggtctgaaccccagctttgccacccactagctatgttgtgctgaggaaatgacatcacctctcagaatctgtttactcagtctgtgaaatcattcttattcctgggctgtgagaagtaataaatgagctgatgtgagtcaacacacttagcactgcccaggaaacccctggaagtggagaccatcatcattattattattactattactattatcattatcatcatcatcattatataggttaagaagctgaggcccagagagggaggcatcttgcgcagcctcacacagccatctggcacaaaactaaatgagaactcaggtctcccaatccacagtcccagatttttcaaccacgtctctatgtgacactaaaggggaaaagaagacaagtaattcctaagtgccccacattaggaaagtaactaagtaccttttagcttctccacgtgcctttgggacattatggaaaaagattgttacagagaatgcaaagccacgtggatgaggctcaagaaataatgtgatgttgaaaaagtgggtttagcatcgtatgtcctgacaatggcaacacctccacgaagacagatgcaaggggaaaggggctggcaggaaacatctagaatgtaccccatgttgtggctgaagggtgagactggggtgatggttctttcctcagcctgtttctgcctgtgtgccgatgtcgctccactaaggcacgtcggtcgtaaacaacagaagctgactgggcagcatagtggaggcaagagggcagcttaggagtgggctctccaagttggagcaaaggctggaaaacccagctcaattttccagaaggaaacggggacatgcagggatcagtggcacgactcactaagtaaatgtccctttggggaactgcaggtt

SEQ ID NO: 104636 - DNA, 1069 bp, Homo sapiens
tcagctcaccatggaaaggaagcattccctacgttaaccctacaggcatgtgtgtgaggctctgcagtgacactcccaatcctgaacatttgtgcaaagctgcaccgagcctcagttttcttctcctggaaaatgggccaatgcctacctgacaatgcctagtgcgtggctgggcatacagtaggtgctcaaagtggcagccatgattattctaaggagaagtggatgtcaagtccttccccagatatctaccaccacctgggaggcaggcagcatctgaactgttatccttcatgacagaaaaggagcctgtctcctctgtccagtcctctgagccctgggccctgctggactctagccctggcagcatttcctgcagggcttgcctggcagtccactggtcacatgtgcctacactccactacacccagcagctcccagctgtctgtgtccctctttgtctgctctcctggttcagaaagaaaagctaaaactggttcttcttcccacattgactgttctcactgacattttgcccatcgcctgagcccaggcagaagtttagaaacaccttttctcactgggtgctatttttttgttttggcagggagggtgggaatagagaaagtaacctttcctcatagtgtgattctggcacgaggcttaaaaacagctgcttgtggccgtaaaatgggcatcggctttgcttggagacttctgggtcccagcttcttgtgctcacttatccctggcagaatggtccgtgctcccctccaccatcaggttggcacatgaggacgctggcaggcagggttgttcaagtggcctttgcctgttgattggggactgggagattgcctcaaatcaggaattcttaaatgtctctcagccccagtccctggggagaagctgatgggcactgtggcccctctctcagaaaatcagccaaccacacgcaacaggtgtggctcacactatttgtgggtttctagaccccctcaaagcagggttgtggaccctagttaagaaaaccacctaccactcccaccagaaaggctccccagagctg

SEQ ID NO: 104637 - DNA, 1026 bp, Homo sapiens
ctgtgcgtgtgcctggggccttcctgagcacctgtcccatgtggcctccagtgcctggcctttgtcactcactctgtgcttgtcccacaggagccaccacccctgaccatgtagatgccagttccagggagcagcatgggccccactgaatggagactcctgggtctacagccctgagcccctccggcccctggacctcgtcccacaccggaggacacctcttggagctcaccaccactgtcaccagcccgcctcggccacccccaccccccgggacccggagtcggccgcctggtgccacagctgaccagtgagggtgtgctgaggacagccacaagcagccatcacccggcagcctcttgtccagcgctgacccttgggcccagcccgagcaaggaccgcagcaaacatgggtgacatgaccaacagcgacttttactccaaaaaccaaagaaatgagtcgagccatgggggcgagttcgggtgcacaatggaggagctccgctccctcatggagctgcggggcactgaggctgtggtcaagatcaaggagacttatggggacaccgaagccatctgccggcgcctcaaaacctcacctgttgaaggtaagtgttcaagacttgaacccagggctgcagcctaggtggccaccatctgaattggccacagggaccatattcataatatgtaacagcagggatgtgtcagagaaaggctgaaatgccagaatggccattgtagtgcattctagctgagtatcagcccctctggataggctggggagcagggcttcatcaggggttgggcatgacccaagccacctgcagagagaatggcaggaagaaagctgggtcaagactgtgttctggagacaaggagccccacagccgcagagtggcgagttcaacattctgttactatgggaggcactagtttctgaggcagaggcagaagggccactgggtagaacaaacatggaacctgcacccaggcccaggaggggcttttgctttccccgcttag

SEQ ID NO: 104638 - DNA, 1017 bp, Homo sapiens
ttattcacattcttggtccctgcctcacctgcttctccgaggaatacattgttggggtcaaaactcatggattctgtggatggtgtgtgttccatccatggccaaggaacatggcctcttttgagtattgtaggtgggagcaccaagcgtgcagtttctttggtgtctcatgtctctgtgcctcttcttgaggtatcacatccattttatgttctattccataagagatctgttagtcccagtgtaaaaataatcttcctactgcatccctgagtaaaagcgtcccttgtgtaagacatttaaggtttctcctgtggctccagcacccagtgacccaagactgggaagccccaaatccagaaacacactggatttgaatacagtttataattagttctcagtaaactgggaagtagtcaggggtaggggtaaggaagagagactgttttgcccccaatttgcagatgagtgaaccagggctccaaaaactgaaggaacttgcccagggtcccacagccaggatttgaacgcaaatcgctccaatgccagatactgtgttcttagcggctgcctggcacagtccacccacccaccagggctcttcggagacaaacgcgggagcaccccctaggggaaggggaggagcccagggctatgagccaggagaccatctccttctgcactcctcagcactctcactccgtgcggctctggaagagtgctttttccctctctgagcttcaagttcccggctgggaaagtgacttagccctagaatgcctccagctctaaaatgtgtgaaagacgaaaaggttatgaaggtgataaggcaggggaggagttggagctgaggagggggtcagtcctgccttccttctctcagcccttcccctcaccgtcctgggcccaggatggccagctgtccatgactgcggggcagggccactccctgtgccagacccaaccgagctcagctggggccctttgtcacccaacgcttgctggggcctcggcctc

SEQ ID NO: 104639 - DNA, 1030 bp, Homo sapiens
cttcactggccagcactttagaaaagcatttgcctttgcccatgggagggcatttatggcaggggaactgcctgggcaaaagcctggaagtgtggaaccttacaaggtgcttattatggcaggagggaaggttacaaggaacgggtggaaggatatgagcctgaagaagcaggcaggcgtgtgtgtcaggctaaggattttgaaccttgttctgagggcagtgggagccaagcaaggcacctagtcaggtctgccagggtggctgcgtggctccggtctcctcctctacctgacctctaatggctggggctgggctctgagtcttttcccttctctggctgagctatgtccctcgatgatctcatcccatcccatggctttaaataccatctttaagctgctgatttccatatttatatctgtagtcagggcctctcttctgagctcccaactcatgcatccaactgcccacttggcatctctacttggacgtctcacaagcatctcaaagttaacaagtccaaaacaggattcttcatcatgcctacccaaccttctccacccacccccaaaagcctgctcccttccccgacccactgcagtaaatggtgccaccatccactcgccctcttcctaatggcatagctcaggttatcagcctactggttccacttcctaacccacccacccacacctctccaacaccactgctgcccctgcaggcaagacctgtccctacccacctggatgacacagtagccacctcacttcctccctgctctcaatctcaccctgccagtccattctccaatgcatgacagatccgtgaaaaagggaaaagtacgttaatctatcacctaaaattctttagaggcatctctcactacctggaataaaatccaagttcccagcggcttcaaagcctggtgtgatctggcccttatgcttctctgaactcactttgcctgattctctctcatcacaagccccagccacgtggccttctttgagttactaaaagcatgtcttg

SEQ ID NO: 104640 - DNA, 1216 bp, Homo sapiens
acgtcattgtgctcttccggagaataggggcagcagcactgactttatggggtaattgccaagtaccgaaatgttcatcataatagtactaatcgctaaaatgtgtccgcaagcactttacaaatgctttttgttttcccatgtaatgcgtgggaggggaattgcttattcagtcatgtgcgttcggttgtgtgtggttgaaccagtgacttcgcctcagtttgctcctccgtaaaccaagggttagctgagcacccatcttcccggttgtcacgtgaggcaaacaggatccaagtacagggcttggcccgggtgtggtccaggtagaggctcagcggatgttttcttgcctgtaagatgggatagtggtagtattatgatgatgctattatttgttgtatgaggatttggtgaagtaatgcaaaggaagcacttggctcagggcctcgccagaaattgatggaaagtggcctcctttgtggcatcagaaagatttgagtataaatcctaatgccagtgtttactactgtgtgaccttgggcaggtagctttgcttctctgagcttgacatcctgatatgcaaagtggagtgggaaaaacctgcctcacaagattgtgccacgagatgatgggtaggtaatgtctcaaatggaaccctcatcatgccaggcattcgaaatatgttgagcttctgccctgcttgtgggcatcttaaagatgtccccagaaggggcacatcctagtccaaggagggtggatttgatttgggaaaattgggagcagtcgtgccatagtggagcatatgggattggtggagcctatgggagaagcagtgaatggatgacaccgtttggggtccaagcaccatgtagctttgaaggaagaaagcaggtctctgcaagcttctgtgctgcctctgaaggcagtttcctataaagtggtgcctttcctgtgccggctgggctactctaccgggccatgtctggctgccccgggaccattttgtgggagccatgggggcgtcatctggatgaactcattctagcccagctctgtcaaacacctgccttgcaggcccaagggagctgtggaggcagtgggcggggaatgctgtggcagccatttggggtgcctcctgcatgcctgaggcatccacgctgagtgaggcccccaggctcatccggagcagagggtgctggcctccagctcactgatc

SEQ ID NO: 104641 - DNA, 1030 bp, Homo sapiens
ccccatgtactgttgggtctgacggttttcacacatcttcttggccaggcgctggaacagcaaggagcctaggagggatgaagtgttggttcttcccatccatctctgttggacccaagctggtagccctaagaggcatgtgtatctgctttagtgatgggcagttcagcatttggtgcttctcagaaatctgatttagttcacctgatgggaagggaagctgggatgttggaaatgacgtgggtgcttgtttgcatagtatagttgagaatcgtcagccaccaaaagaaaccagattaaagggatggtaccaggtactccactacacactttacattcattatgtctttctttcacaggcaaggaagttgaggttcaaagaggtgaagtaatttgcccagggttgcatagcagtaagcgaaagagcagagctccaagctgggtctgctgaccccaaagtttttgcccttttcattaagctcctgcaaggctcaaagcatggagcctggctagagctatcttgtttaacttaggccccttttgcttggtgtttcagtgccttcttccaagtgggccagattcctggggcaattaggagattcatttgttcgtaagcccaaagtgactcctcacgctggccagtgtgtacatttctctaaagtaaatggacaagtgacttcctctccctgggtgttagtttattcatctataaaagggagataataaataacaatggcacccaccttaaccgtgtggacgaggtgagtttaatacctgtaaagcactttccatctggtatgtcataggtactaataaaagttagttggtgtcattgtgatcatcagcatgactatcatcatacaccctcttactggtgctttcgtggcaggatgggttaatgctgcatttgtcaaagacctaaggcattaccacagcaaacacaagccaattcgaggacatagagatggatttaattggtcggtcagctgatgctggctttggtgacaagcagaggcatgcccttctgttc

SEQ ID NO: 104642 - DNA, 1028 bp, Homo sapiens
ctgtgtctactaagagggatgcccagtgccccactgggcaggacgggaagcctagcctgggccccctctgtgcacacagttcaggcctgcccagcttcttatgggcaagccaccatcccactctcgtctccctgagctgtctggttctgcggacccaggaagggccaggctggggccctgcttgtgtttatcctcggctgctgtcttcccagcaggccccaggcaaggaggcttcccattgctgctgctaccggttctccacagatccctgtggtccgccatcgccgacacacacacacgtcgtaatgtggctaacgcttgactcacttaacactactcatggggcagggcggagggtggattgttgctttttgttttttgtaatttcctactagtatttgggtaactttgggggtggggagggcaatgtgggggcaggggaacatgtcattgtgatgacttttttgatattcattagaaacaatacatcctttctgagatatttacagtattattaaaaaatgaaaaaggttgtactgttttgcataatgaacatttttattgggcattcaaagggtgcaagattgtctgcttactcatttttaaaaattaaagaaatgaacaatcagtgtggctattcctagcaaggtggtattcgttgggttttttgtcctggttttattccctccatgatatgcctgcaaaaccatcttgggtccctgtgtggaagctgcagtctcaactcagcactacaaattagaaacaaaagcagtggtgttttaggagcccagacttctttaggttcatgtatttaccatttgcctagtatgtgctagatgctttacagaagttgtctttttaatccttacaacaactctgtaaagtaggtacttctccactttatttatgtattgctttatttctttattacttcccctgttttacagatagccatctattcttgcagccaccccagccaggatctatgttctaagaccttcctccagcctcccatgagaaggagccac

SEQ ID NO: 104643 - DNA, 1027 bp, Homo sapiens
tttgcacatctgcaaaatggggaggataagggccatgatggctgcaggcaaaacaactgtctcctaaccaatcctggccctgaatctggaggatcacagagacctcatgaatgtttgaagagtgacattctggaggaaattcagcagagagagagagtgtagtcaccaaaggcagcatctggttcttcctgtgggtctcactcaaatctcactccaacccccaattcatctccagcagctcaggtcacttgttcccagcttcctggacctggaaagctgtttctcaggtctttgtaggctagagaacatcacaaaacccacccatttcagacacacctgtgttatagatgggtaaactgaggcctagagaggaagagtcctaggtcttgcagaggctaggacccagagcttctaacccctaacccagtgctctttcccttccaccaagccagcccagctcctccgttaagaaattattaaatagagttggtggaaggactctggttgccgtgacaacggagcctgtgtcctcgggagataatggcgttgcacaaggcagagcgatgtgtgttgaatgctgattcaggacctgctagagtgagagtgagtacaagaggagagtggaggggaccgtgtctagaactcgagcttccccaagaaggaggtgcgggactggtaggggtggggcaaattgccttctctacttccatccttcctacagccttgtcagaatgggatacttccctgcacttcgtggaggtgcagagtcaggtgaggagaggtgaagtgactcatcccaggtcacacaaccaggaaagagccagagctgggattatacctccaaccaacacgggggcctaggctatagggagggcctggaaggaggctcacctgcaggggcaggggatggttgatggagacctctctaaagtcttaagtgcttgtggaggtcctgatggtccaggaatgacaattccagcccaagaggaagagaaaacagaatgtcagcatagctaaaagcatcagc

SEQ ID NO: 104644 - DNA, 1069 bp, Homo sapiens
ggggccaggtggcagatgacagtgctggtcagaagctagggaggtggaggtggagaggcccaatccagagtcccccgcacatcagcctgctctgtcctgttagcccatctatttcctctgcaagggctgggtgtgactttctttgcctcgtgctcagtgcctgacaggcacccaggtagatacatggtgagtcatgctcactgaccgagggcctgggcctcacctcgtccggcaagctgagaccccagccctgcctgccaccagtctgcactgggccccagacatgagtcctggccccctggcttgtcagatgtacatgaccttcagcaagtcactgcctctctcttagcctcagtgtcctcagtaatgcctgtctccgagatcaataagattgtagaggtcatggaacatgccacgacagttcatgttaattccgtattaaatggacgcgtgtctgtgttccgctcccaggcgtgggccttgcggctgctgtgctatcattctggctgaacatctactacatcgtcatcatctcctgggccatttactacctgtacaactccttcaccacggtgagtggtccctttgaccaccccatccagcagaagccacacccagagcccacccttggcccaccacggccaccactctgctgacaaggccattcctccaggagtggggaacttggtttgtcttttgtgggccttggtctccccacaacagccatagcctcacaaatttagcatctcctgtgagacaggcactccttgcaggctcacatccaatcctcatgacacccctctaaagtgcgtattgttagcacattttatatggacacagacagcctgggttcaaatcctgactctactatataccagctgtgcaacttcagaaaagagacttaacctctctgagtctcagtgccctcatttataaaatggaaataaaattagaacctgccccagttcctcaaaaaattaaacatagaattaccatatgatccagcaattctgcttctgagtagatacctgaagaattacaagcagctctcaaagagatatttgtacac

SEQ ID NO: 104645 - DNA, 1009 bp, Homo sapiens
tacgaacctagagtcactcggaataaacatgcacacacactctggccatagtgaaggccgtgctgattgtatcttcaggggagtaccttgtagagatgtgtgtcgggggtcactgatgtgacacaatgaggtgctggggcccaaatctctctggcatgaaggaagcatccatgctggacagctcagaaggatccgggagcagtctagaaggtctcagagcaccttggataagctcccaggaggagctgttctcaggcactgtcagaatcagagttgcctgatctcttcatggccaatgtccatggttacactgtttctttacaaataaaaatcaaattctgctctggtgggttctgctttctggcatctcccgcatgctgctctcaggcacgttcggacttttcattcaaccatttattcagtaaacacttcttgatctcctactatgtgccaactgatgacaggcacggacatgcagacaggcaatggcaccaccaggcggccaatgcggagaggagggaagcccaggcagctgggctgcggggacctcagggagtcccctggaccaccccaggtcgggagtggcatctagaagagaaaactgcagggcaggcaggtgctggagagaaacagtgtgaaggctgggaggcagatgaggtcaggccaggcaccggcaaacagctgcagtgagtgctgagaggagagagagatgcaagggccttgaaaggctggccagggagtttgggcttcattctgagaacaagcgggtgctattcatcgcagtaagcagaggagtgacatgatcagacttgcaatttagaaggctctctggggctggagaggggatagagcaaaactgaaggcagggtcccactaggaggccactgggccatccagatgagcagtagtggtggctgactaaggccctggcaggtcctgttctctttgatctcttgaccaaacagcactttctactgattagtataatgggcctcacagtccccagcta

SEQ ID NO: 104646 - DNA, 1050 bp, Homo sapiens
acccagctgcctatctccccactctgggccatcctcttcttctccatgctgttgatgctgggcattgacagccaggtgagggcgccccccccgcaccccaggagctctccatccccagactcctcagtccccgagtaaacagggagaggaggcaactcttaggctgccaagaagatgaccaaaaattccaggtccctagaatgttccactgcatgaaatttcaggaaacagctcagccaccttctccattttccagaaggggaaactgatgcccagaggggagggactctcctgaggtcacaaagtgagtcacaggcagaatcaggctggaccctgggctctcctggctcggtgctgctgggcctcccgtccttccttagagggccaggctttgggtgggttggggctggggctgctgcaggtggctgacctctgttcccacctgaagttctgcactgtggagggcttcatcacagccctggtggatgagtaccccaggctcctccgcaaccgcagagagctcttcattgctgctgtctgcatcatctcctacctgatcggtctctctaacatcactcaggtaagctcagtaagcacctggcactcccccagcactgcccagggccatgcccagggcctcctctcccctcctctgttgtatcccacctttcctgccttcattgagcatcatctctgtgccaagctctgggcacataacagtgagtcagatggggtccctgccctccagaggctcccaggctggtggagacacaaacattgagctaagacatataggacagagctagagaatgcagcacctaactggactcggagcaccagggactgcttcttggaggaggggatgtagaaattgagctttgaaaggcccacagaaggcctggcatggtggctcatgtctataatcccagcactttgggaggcagaggccggcggatcacctgaagtcaggagtttgagaccagcttggccaatgtggtgaaaacccgtctctacttaaaaaaataaaataaagtaaataaataatacaaa

SEQ ID NO: 104647 - DNA, 1410 bp, Homo sapiens
gagccttcattgggtcctgaagagtacaggggcatgatctgagtctggttttcatacaactctcctgctgctgtgttgacgacagaatgaaggggtgagaggacagcatgaaagtgggagtggaagctgagggctgattgggagttgttgcaataacccaagtgagaggggctgtggcgtggcccatgtggggcagtggcaggggtgcaggaggtggggatgtggctggagtctgggtgtagtttggaggcagagcagacaggatgcacttgaatagagagcaggagagggaagcggccagttcctcaccatcccaggctgggattttccccagagagcctcacaccttcctccccggtacccacagcgcatccaagtcatggtccagcccagcgaagacatcgttcgcccagagaatggtcctgagcagccccaggcgggcagctccaccagcaaggaggcctacatctagggtgggggccactcaccgacccgacactctcaccccccgacctggctgagtgcgaccaccacttgatgtctgaggataccttccatctcaacctacctcgagtggcgagtccagacaccatcaccacgcagagaggggaggtgggaggacagttagacccctgggtgggccctgccgtgggcaaggatacccggtggcttctggcacctggcgggctggtgacctttttaatccaggccccatcagcatcccacgatcggccttggtaaccgccgcggtagatcatttttatcccgccagggagtgtgatgcaggaagaccacatgcgctcctggcttttaaacctgttcctgactgttctcttactgccgaaacccttgactgttatctcggactttgcaggagttcctttccctccgaacgctgctccatgcacaggaaaagggcattttgtacaatggggacttcccgggaacgcttgctcttaagtaccagaagccggcggagctctggctttcgtgtttttggttttctccttcccaaggcagctggattgaaaaaacaaaacaaaacaaaaaaacccaggggcgtcagtcgatattcccagggccgcttctcctgcagtctgtggagcgtccttgtccccgccgccggaatgaatgagcattctgcagcccgatgtccctgtcccctcctcgccgggccattctgattggacctggcccagtgcaatctgtccagacaagccctgcttgctggaaaactgccacaagcacaattgatctctttttatcgccattccaggggcctcaggtcctactggggaaacttcctataccggagctccagtttctcttaagctgcccaatttcacagagtacaaaatagttgtaggggaaatcaaggtgaaggatctgtccgacagtcaagacggatcc

SEQ ID NO: 104648 - DNA, 1123 bp, Homo sapiens
taatccttaataactatggtaaataactgtgactgtggggtttttaatctcttgtcattctcatccaaaagtgaccagcataccagttcttgcaataagatattaccctcagaatattaagcacattattgtagagaaaaaaaaatatgtgtacacatatgaacgcacaacatgcacattcatcctcacatgtggcacgtaaggtctcatttgatattgtgtaggaaatctgaagccttttcctgaggtcatctgtaaaatagtctcattgccaaggcatccccagtgccagctggtgaatccatgatcaaaatgcatacgtattgttaaatgataaggtttagaatgacaggaacccatcactgtgtctcatggtcccacttccccatctgtgtgtgaattcctttagactaagggcaggaagacttccagctttctctttgttcttcaatgtgaaactgagaccaagtctctctaagacaaatgcagtgtatttaatgtttgtaagcaattctaagtgagatgtttggcaagaaatcccctaactgatttccatccaaacctaccttatagagcacaatattaagtgttgtacaattactgtgagaactgtgaatatgtgtaacttttttttagtatttgcccggggggaaaaagatattgtattatcatatatgcttttttgcaataaggatttattctcagaacaccaagtaaatctatctctatataaaaaatatatgtaatatatacatattcaaagtatatacagagcctgttttaaaaaatacagtattatttagtaaaattatctgttctatggaccaaatgtaaaatatttataaatgaagatgcattttaaatgtctataaatggtgtcataactagagcacgggcgttatgtaagtttctaagaatttagaggataaataataaaggttctatgatatacaacatcagaccttcaattctttggggtgggggcacaatatcctctttcatcacaacaacaacacatacacacagaactatttttccccagcagacagagattggggctcaaaacccaacaaaacggagctggacttccccagagtcttaaagtcatagaaaatgattgtgt

SEQ ID NO: 104649 - DNA, 1057 bp, Homo sapiens
tgtaccaaggtctgacatgccagaaaacacaatatagggttaagtatttctcaggtagccttgcaaagatgctagaagtctaccagccccaagatatcattccaggagtgatttcctttatttctatctttttactgcaatagaaaagctgcagaaattcaaacggatctgggttcaaatcttggctcagaccttttgtagctgtgtcaccttggacaagtgaccacgtctctgagcctcagtttccccctctgtaaactgaagatgataatagcgtctgtcttacaatggtgttggggaacacatttcctggcatgcagtggatacttaatacatcattcttggttataaatttggatttacagcctagagtggcttgaagacgggggcagctctggcagaagcaaaggtagggaagtgagagtcggggttggggtgtgtgggaggccattttcttcctatgaagtttgaaattttccttggcaagagcctcatgcctttcaggtctctggcatctggccttgtctgtctgcatagatttccctgggctcctatctcagaaacagaggccaggaaaagggcaaggcttatgtggtgcagaggtcatggagctgggccttggtggtcacacggccttggagtggagccccagcctggtgctgagcctgcggaaggctgagcgacaagaacaagagaaaggccctaagtaggtaactgccatgttttcatggacttttcaagacctcgggagacccgctagaatggggcctcaagatttggggtgtctggagcagaggatggagtgggctcactgggcaagcatgggttgagatccctgcttcctcatcaactacctgtgtggccttgagtgagtcgttttcacccactgagcctcagtttcttcctctgcaaaatgcagagtcatttctattgggagatttcaaggatccaacgggacaacaatgggaggatggcgaaaagtcatttccctggtctggctgatggctgagaagtcaccagccacaactcattgacctgctaagttactgaagctccc

SEQ ID NO: 104650 - DNA, 1042 bp, Homo sapiens
ctacctccaggcagcccccttctatccccagaggtccctttccgagggacatatctgaccatttcactttcctgcttaaaatccagtgacatcctctgcagccattaaatagaaggaaacctgaattttaccatctggaaagatgtccctgataaatgcattggacaagagcaagtggcagaatgacctggccagcctcagaaggcagggaacagtggtcaaaacatgggcttggaggctgcaatgagtttgaacccgagctctaccacttagtcactgtatgaccaggagcaagttctgaatttctctgtgcctcagcttcctcatctgtgaaatgggaatgataatagtcctctcccctataaggttgtgaggcctcacccctataaggctaatatgtcaaatgtgctagtccagtgctgctcctagtagcatccaataaacactagttattacattagcatataagtacatgtgaacacatataatcataggtcacatcgatgcctaagattatatgtgttctcatgtatttatatacacctctctctctcttttcacctcattcttcaggactcagaggtattctcttccaggaagtcttccctgaataccccccacccctaaggctggattaggatccttctctggccttacaacacccccagactcacatcttccatacatgtccttattgtcaccatcggtccccccatggctgtgagcagcttgaggacataggctgtaactgatttccctccatatccctggtacccatcgacgtgcaaggaacatagtgcactctctggagatacttgttgaatgaatgaatgaatgaatgaatgagtgagcaggactttgaaacataagggatcaatgggtaaagacatggagggagaacagccaggtataggggatggcctgagccaaggcatagaggtagaaagggatgctccagaaagagcacacggcctgggctggccatgccttagagagcgacagggaggttaacaggaagtaattaagatgctcaaggtgggta

SEQ ID NO: 104651 - DNA, 1106 bp, Homo sapiens
gctaaaatatgtgaattattaccccatgaagcgttgaaaaagaaagacaagaaggggagaaacgctcttcccaagttccccggtccatgcacataccaaataactctcctctattctccactccaccattcattcaacaacatctattgagcacttccggtgtatgaggtgctcctctaggcacacgggattcctgcagaacagagcagacaagcattcctgccctggtgaggcctacattgtactttccggcttctccaggcccgtgacatctgctgtctcctgcattctccaggccctgacatctgctgtcccctagattctccaggcccatgacatctgctgtcccctggcttctccaggcccatgacatctgctgtcccctggcttctccaggctgtgacatctcctgtcccctggcttctccaggcccgtgacatctgctgtcccctagattctccaggcccgtgacatctgctgtcccctggcttctccaggcccatgacatctgctgtcccctggcttctccaggcccatgacatctcctgtcccctggcttctccaggcccatgacatctgctgtcccctggctcctccagacccacgacatttgctgtcccctggattctccaggctgtgacatctgctgtcccctggcttctccaggcccgcaacatctccttcccctggcttctccaggctagtgacatctgctgccccctggcttctccaggcgcatgacatctactgtcccttggcttctccaggcccatgacatctgctgacccctgcattctccagaccagtgacatctgctggtcccctgcattctccaggcctgtgacatctgctgttccctggattccccaggcccgtgacatctgctgtcccctgtattctccaggcccgtgacatctgctgtcccctggcctctccaggcccgtgacatctgctgtcccctggcttctccaggcccgtgacatctgctgtcccctgcattctccaggcccgtgacatctgctgtcccctgcattctccaggcccgtgacatctgctgtcccctggcctctccaggcccgtgacatctgctgtcccctggcctctcc

SEQ ID NO: 104652 - DNA, 1046 bp, Homo sapiens
ggaagatttcttcctaagatgaccttaaattgacaaatcctttaatgttagaccttgtcaaaatgctttaaggagctgtttagtttctttcttatttattttaattgtggtaacttaatgtgttgttttttttttttttttttttacaataaatttttctgaaaaaggaaggaagtattggctacaaacagagtagtcacgcagaccaaggttaaaatccagattctgccttttgttagctccgtgacttttggcaaattacttaagctctctaagactcaattagtaatctggaaaagtaattgtaatagtaattacctcctagcattgtggtgggactttaataaaacaatacctatcaatcccctaacaccacgcctggcctggggtaactgctatatatgttagttgtttcgttccaaaaagaattggacctgggtctaagaaaccccaagtgccactgtcagctccaaccctgacttgctgtatagtcttggtaaagccgcctgtctctgaggccggttacctcatcactgtcctgagaatccctgtcctctgtgagaacagtactgctgaggtgcagtgtcctgtttgttggtatgcaaggggcttaggaatgaggctgccggtgcttgggtttcctacaacccagtgcagagcctgcagccactccagcaggcaactagcaagaggcggtgtggagctgcagggctgcccatgcacaccggcaggtgaaaatgcaccttagacacacagctgagacggtaaattggtttccgtcatcctgtgcagggaagatcatgctggttttacccttcttgttgggctgcctcttgtaaaccttgtttgccctcctttatcgggctgcgctgaacttaaagaacagacaagttgaggttcattatagcaaccccagggaagggtggcctacctctcaaagattcactttttccccctgcatttctctgttttatataagtaaaataataatgtacacattattttgctgcatttcatgattttatgattgttctatgtcaataaca

SEQ ID NO: 104653 - DNA, 1049 bp, Homo sapiens
agacacatgaggatgcagcccaccttcccagaacatgtgcggaattagatttctacaaacacatttgtcttgcttctgcccaactctctcactagaatgcacattccataggggcaaacatttttgtctattttgttcacagctatattctcaacacctagaagagtgacagaaattcaataaatagttgttaagtgagcaaatgaatgcatgaataaggaaaagggtacatggctattgagtaggtaaccagcagtgttgatcacccccaacagcatacaactccagtctgatgaacatcatgctactaagtggccactcatcacccaagtctctgaccttactttttctctcttttctcccagggagtgagccataactggtggctgctcttgcgccaatgagcctccccaattcctcctgcctcttagaagacaagatgtgtgagggcaacaagaccactatggccagcccccagctgatgcccctggtggtggtcctgagcactatctgcttggtcacagtagggctcaacctgctggtgctgtatgccgtacggagtgagcggaagctccacactgtggggaacctgtacatcgtcagcctctcggtggcggacttgatcgtgggtgccgtcgtcatgcctatgaacatcctctacctgctcatgtccaagtggtcactgggccgtcctctctgcctcttttggctttccatggactatgtggccagcacagcgtccattttcagtgtcttcatcctgtgcattgatcgctaccgctctgtccagcagcccctcaggtaccttaagtatcgtaccaagacccgagcctcggccaccattctgggggcctggtttctctcttttctgtgggttattcccattctaggctggaatcacttcatgcagcagacctcggtgcgccgagaggacaagtgtgagacagacttctatgatgtcacctggttcaaggtcatgactgccatcatcaacttctacctgcccaccttgctcatgctctggttctatgccaagatctacaaggccg

SEQ ID NO: 104654 - DNA, 1030 bp, Homo sapiens
gccaggcaggcacctgggctttctggaatccaaaccacagtcttaggggcttggtagtttggaaagttcttaggcaccatagaagaacagcagatggcggtgatcagcagagagattgaactttgaggaggaagcagaatctttgcaagaaagtcagacctgtttcttgtaactgggttcaaaaagaaaaaaataataaaaataaaagagagagagaatcagacctgggtggaactctcctgctcctcaggaactatgggagcctcagactcattgtaattcaagctttccgagtcaagtgattgacaactgaagagacacgtggctagggttccactggagaattgaaaaggactcttgagccctcctggaatggagctgtataactgtgcagagactttatccatgccaatagttgctgtccccttccaggggtcaccttgagaggcatgacagctgttccacaggggctatcccttctcagaaaacttctcttctgagcctctttaacagctttctccagaaccagtgtctgaaccaccctggaaattctgccttattatttcttactcaaacatgtttagagtggatagaaaattatgcagcttgcacacccatcgtctttaaccccaaatttcctttggctattaaaaaagtggtggcaaaagacatcctcaaaagaaagagaaatgaaatatttttgaatggttgcacgttaaaaattaaaagaaggaatgggggcagaatgccatatttttgagggctgtactaggtttatctcatttaagccccacaacaccccacaggagggtaattttctaactctagtttgcagaggagcaaattgaggttcagcaaggtgagagaggtacccaaggtcacatagctagttatgtgagaaagttagagtacagatcctctggggtttcagcttattgtagcatattttctccgaaaggcaaaaatgtgcccttttggccgggcatggtagctcaagcctataatcccagcatgttgagaggctgaggtg

SEQ ID NO: 104655 - DNA, 1044 bp, Homo sapiens
tctcaggaaagcctggaattactcagcacacgtgatgaacacctccttatgggccagaaattttgagatacagttgtacttgttctcacaccacctaaggtcttctagaggagatcagacattgacctgtggaaaattaaggagaaattcaagtaatggaagataagttcagagaattgatacgggtgatactttggttggtcttctatgccttatcttattctaggaaagatcaccagaagccttagagcatgatggcctcataggagttttatagccttcatgctgcctttcctacctgtggccctgaatgttcctgtctcccctccacactgctgtccaagtgcattttctaacgtgtaaatttgatcatgtaactcttctacttaaaacccttctaaggttcctgttgacttcgggataacgttaaaactacttagcttggcgtttgaggtctcttcagttccagttcctgtccaccactagcctcatttaatatttcccaagatacatcctgtgctctggctacccctgtgccctccaaatgccgcagcttcccccatctctctgcctgcagacatctctctgtctcccttctgtcacctggctgctgcctcacctacctttctgattcattaccccaggaagcactggctgattgcttgcgccatttcatttctctcttctgtgttctggtagcagcctccttcctagcactgactagtctccaaagtaattgttgatttgcttttctgcctgccccatatccccagcctgtgagcaactttagcacagaatcttgtttgtccccactctgcgtcctcaacatttagtgcaatgctggacacttaagagacacatgatgtgagaatgctgagaggaaagagagagaattgtggactggtatgaaaattaaagaaggcttttgccgggggcagggccgaaccctagagaaataatttctagacatcattttcagtggttcttgcttttattgcattaaccttgttcactctctttagcatgattccagtttcccttcga

SEQ ID NO: 104656 - DNA, 1014 bp, Homo sapiens
ggacaagagcaatagccaaggagcaacaatttatatgctgttagttgggctctttcttcacttagtgatctctccgcatcttggcagctgtctgtgactttgaagtgcattaggtatttcagttttttcccccatactttaaaaacgtgtaatctcctttgtgcatttcctgttatatcaagtgtttgagttctaaagacagccatttgttagattagcatgttttatgggatcattgtggaaaatgttcttgctgaagacaagcaagttggcaattttgccctcttttctttctcacagtgtactttttcagcaaattgcttggcagactgatcatgactgaatcatttcaatgaattgtatgctctcagccaagtagaaaggaacatttatttcataaagcttctaaacaaagtttttcttcagttacgttgagcttctttctgctgatttgtattacaaaaggaagtgatttgcccaagttcgcacaattaatttgtggcaaagccagttctaaaaccagaactcctagtcagtgattatttatgaaaaatattttttaaaaaattctgtttaaccgtagtataagctggcttacctagcattgtgccaactaatcattcctccaatgattaagatagattctgagttgattcctaaagcacttaaagattttggggtcacttttgaatcatcaaagaaagattaaatgatgttcagcttagtgttaaatggattttgtcattttcctattcgacgcctgccttctgcacttatgcctcatatgggtaggaaagttaccttaaaccattttcaagctgacctgcttttatgggtaagtggtagattttcctccttagcagatcattcctgctctctatagcccatgttaggtcaggttgctctaagaaacttattcctagtcttttctgctcaaaaaaagatttttttttcactattctaccccattgcctttgtccttagggtaagaaatatgcttattctttgaaatta

SEQ ID NO: 104657 - DNA, 1044 bp, Homo sapiens
tcaagtgaatctcctgcctcagcctcctgagtagctgggattacaggcgcctgccaccacacctagctaatttttgtaattttagtagagagagggttttaccatgttggctaggctggtctcgaactcctgacctcaggtgatccgcccgctttggcctcccaaagcgctaggattacaggcgtgagccgctgtgcctggcctgagcgcaggagatatgggaggccttattaaggagatatgggagaaatttctgttttcagtactaggaaaaactttcctcttaatcagatggtgtgtttttattcatggacaccatgattcctatcactggtcatgctcttcccttttcaccttggctgctggaactcagtatcaaatctgtggccccctcgttgcagaggactccaacagcatgctgctgggtgggaagctttctcctccctgcttaccctccagtttaattttctttttcctttgatcccaatttccttattatttcttattttcttgcatagccacttgaaatctttcagaacaagattattgcataaaggagtgactgaataagtaaatctctccttttctaggttagctgagtcatcagtggatctaaatctcaaactgatgtgttggagattggttcctactttagacttggacaaggttgtgtctgtcaaatgtctgctgcttggagccggcaccttgggttgcaatgtagctaggacgttgatggtaagtcggaggtggggggtgcaaatggcacctttgaagttgtagcttctcttcttgttttactctcatgattgccttccatctcccagctccccatcccctccatctctccctcccttcctttttccttttcttatctttttaagtgtaaaagaaatacaaccttttatcatcagatagaaacagaaagtcctccacacccatcgcaagtcccatttcctattaagcagactttgtagattagtatgcagcctttttcccagatgttattgtagacatatctaaatatagagaaatcagtatctttgc

SEQ ID NO: 104658 - DNA, 1024 bp, Homo sapiens
atagtaaattgttgctcccatctcacggtcactttgaggtgttagctcagttaaaatggcagggcagaatcatttgcacttttcaaatcattgttcctttctgtgtctctgtcacttaactaccaagcacagtagaactgaattgagtcacttaaaggaacacatgatgcagttccattatatgaggcagctaagccctcatttttggttaatatcccccaatctgtttaggctactgatcctttttagcatatcacctcatttagttacctaaattgtatattttgtttatcttgataatctcaagaaatgatgtacttgaggctggatgttctttgccaacaatgagcatctggttataatttaaagctttgtcacagaggatttcatacttgagacagctagagttgaatggagtagaacgttctgcacacaccaatgattgtttctttgcagtcaaccagagaccggaccttggaccagcagtgcactgtgagtcgtccaggactggccgtgattgcaggagccctggccgtggaattgatggtatctgttttgcagcatccagaagggtgagtttgctagtaggagatgagtatttaaacaaagcttttgtaggcagttgttcatcagtgtctcccatggccttttctcagtctgactttacagagaatttcactatttcaccctcaaaaaaacaagactagaaaaagcaggtctggttctttgggctgagataacttggcatgtttcctttgtggccacatttctgcatctttccggacaaagtcactatggtttattttatttttccaacgcttatatagggcttactttgtgctaggcactgttctaagcaccttagaaattttgcctccttcaatctttttttttttttttaacgagacggaatttcgctcttgttgcccaggctggagtgtaatggcacgattttggctcactgcaacctctgccttctaggttcaagtgattctcctgcctcagcctcccaagtagctggaat

SEQ ID NO: 104659 - DNA, 1071 bp, Homo sapiens
cccaacaggtgttcctgcctgagagcctttggaagctaattagacacgcacaggtgtgcctaatgaattcctgccggaccacacgctgtccagctgggaacagcccgggagcgaggccaaacaaccatataaagcgaggccaaacgacctattctgatgctttttgcatgctgtctgccgtgttttcattccccacggtgaggacggtgtgtcctgtctcctaaggccctgtgagccaagctcagctacaacctggtgccccacatctgacaacagggatttccactcaaagtgcttggcccttttgggcctgggggtgatgagtgggactggagccaagaaaccacaggtaattgggattcttctaggctctgtgattcccaggtgggttttttaatattcagggagtagcaaagatacaaatattgtagagctagtttaggcgtacaattttttttttctagacgtttctatggaacactaatgttggtgattattttgcagggagagggaatggaggtaacagggacttagggttttcatttcgtacttttctgcagtgttttgaaaaattaagattataagccttttttaaaatcacctttttcaagacataactgatatatagtaaaatgaacccattttagtatgatttgacaagtgtatacactcacataactatcacttccacaaatgagatacagaatttttctgtcaccccaaaaagctcctttgtgccttctcccagttcatctccccaccctcagccccaggcaaccaccaacccaatttctatatggaccatttttattttttctgtatattttactgtactaagggaaaaaaaatgtaatggaaatcttaaaatgttcagagggaggcaaggtttggtcactctgaggaatccctcttactagctacaaagttggtaggtaagggctgggtgtgtgtgtgtgtgcgcgcgtgtgcgtgtgtgtgcgtgcgtgcgtgtgcgtgtgtgtgtgtgaaatcggccatgttttccccttgtggggagaggggagaatgagaaaacaatattcaggtgaggct

SEQ ID NO: 104660 - DNA, 1043 bp, Homo sapiens
aaaattattgtgtttttccaaatgctcgctgttcttagaaaagggaatgctgtgtatggtggtagagctatttggatcacttggcaaaatgtgcaattcctcagaattgatgagtgagattaaatcaatcttttccccttagttacctggataaagaagccatgaggagaaatgtagcttatgttgtgtttccacaaactatataaggaaaaccttgacttcctgtgtcctgcaggggtagtgcacttgccattagtccttttaagttgcaattcttcccaccagctaaagagaaatatataaattatttctagctaggtggcaaaactcccccagccatcttgtcaaatgattgcatgggtgcaaagatctataaattcctccataggttgcatatcctcaccattcagggaggccccaagttgtcaatgaatagatggccaggcccaatactggaccagccagtggtgaaagggctgctgtttggagaggtggagctagtgctgagtataggaagaccatgtagaaataccaaagtcagacccattggaggtttgagcagattgtgagatttttcaggtacaccagggaggcaagatagtacatctctagtgctggacttaaactgaaggcagtccttctttaaattgttttggtgccctctgggcattaaacagatgcagtcttccacttatggccaatagttagagccacaaagagtctatttcaagtttcaggagatgaatggcatctctgctgctctttgagagactttaaggtatttttcccctgaattgtgattgggttcccaggcagggttcagaacattgtgtttattgtctgccgtattatcttttaagcaatgctgtactgcctgatggtatggaagaggtaacatagatgtttgtaaacatacagtcatttgatggctaaggaagttttgccacccagctagaagtaacttatgtattgttagctagaagaatttcaacctgaaattgacccaatttttcactctttaaaacagagcagttgctagaata

SEQ ID NO: 104661 - DNA, 1035 bp, Homo sapiens
gtcaggaattcgagaccagcctggccaacatggtgaaaccccatctctactaaaaatatagaaaaaattagcctggtgtggtggcaggcatctgtaatcccaactactcaggaggctgcaacaggagaatcacttgaacctgggaggtggaggttgcagtgagccgagatcacaccattgcactccagcccgggcaacagtgcaagactccgtctcagggaaaaaaaaaaaaaaagtaatttattgcttaatgaaaccaggtcatgaaatctgggcttcaaggactctagatgggggcatttagtgtcaagaccatcttagtgttcatcagctctgttctttgttggctttattctctctcactaccaacaagttcttttcttccccatatagcaagaaacatggactcgggcagttccaaaatctcattcttacattaagaaatctttcctagtggctccaaaaagaaaatcccagataaggactgtgattggccaggcctgggtcacatgccatctctggacagctggcagtagaaagggaagggctgccatgattggccagcctgggccaggggcaggtcatactgattggcagcctccctcagaactacacggttggagtgatgggggatggtcctcctcaacaaactgatgcagatggatgggtgttgggcatatatgatagaagtccattgtaagttcagtctcctcttagttctattcctgtgtctgttcctgtcccttccaaacaatgctgcttttctatcagcaattcattattaaggagttgagtgaaagtcatgaaattccagtccccagatttgtccccaagcttgactcactctgctttctggatttacccccatcttctcacctaaccacagataccagaaaagaagtctttattcactgaggctttgaaaaaattagctgcacagtcttccttaccaccacctccaaacaaagaactttctctgagattggagcacagtgcctcctcctttctccttgctacacagaagcctcattctag

SEQ ID NO: 104662 - DNA, 1131 bp, Homo sapiens
gtcttttcttctgtctggctagcaggtctgaccagcattttaattaaggcttccctagagagacactgagctctttaagatagaaactagactgggtatctgctggtttttctgcctaggaaaatgtactctaatgggtaccttgatttttacccagagaagcccagggtctcactctcatcccatgtttttctggtggagttgactccgcccttggcccatggttggggcaaggtagttgggaccccaggcaatcagcacatcgtgtttccctggccaaaatgcttgggtcagaaatgggcacatgacccaatcttaaccaatgaggtatgatgaaactttggctaagaggctgcgattagaatttggaatttgacggcatgagtctgggctggggcagccttctagtgattgtgagtggagagccagtttgagtatggagaccacacatggaagagagctgagcctggctgggctgagagagcaagaggatggtcatggtattgttctctaagcccagaaccaggcttccctgaaggtaccattatcccggtctttctgggcatatgaggccacatttcccttttagcttgagtaaataaaggttgagatttctgtcccttgcaaccacaagttctgacttgttcaggggcagcgtttcaatctacctaacatctagcagaatgcctggcaggtagaaggaagctcagtgtgtgtttactgaatagattctcattgagttaaacagatgttcatcaaatgctaatgaggttaatggctaccatattggatgatacagatatagaacacttccatcattacagaaaggtctataggatagcactactatagagaggacaaactcaaaccctgcctcccagaagctctatttttgagggtttttaaaatattatcaaaactagatagcataacatatggaaagatagcctgacttactgatttataaaagttcagctttatttctctcgagtacagttatttacatataaattctaatgaaggagtttaacaacaattactatacagatagagtcacacattatacaaagtaaggtatgcctaaatattcttttacatatgaggaactggaatttactgggcctagaaact

SEQ ID NO: 104663 - DNA, 1052 bp, Homo sapiens
ttaatattcagagttgtgtaaccgtcattgtctgtttagaatatttcatcacccccaaaggaaaccctgctaaagagcagtcatctctcagttcccctcacaccaccctctggccccctaaccctgagcgatgactaatctttcgtctcttcggatttgcgtgttctgaacatctcatataaatggaatcctgtaatatatgggctcttgtgactggcatcttccacttaacatgctttcatggttcatgcatgttgtagcattatcagaacttcattcctttttaaggccaagtcatattccattgtaggatctgccacatattgtttatggattcatcagttggtaggcatctggattgtttccacttttttgctgttatgaattatgctgctgtgaacattcgtgtacaagttgttgtatgaagtacacgtttttgttgttttgggtatatgcctaggagtggaattgctgtattgtgtcgtaacttttttgttctattcttttggcaatatgatatattctgatacttaaacccatggtgtttcgcttaacactaatacaccttgcctcccctaggaaatataaacccttgagagctgaaaagaagccttatttctttctactccccccactaccgaccactgtgtctaacaaaagccacaattactgtttggactcaaaaatgtgacggaaagaagtagacacttgtgaagtttttttcctctctttctactttaaccctaaactgtgtcacattttttcgcgttcacactgtatgtgtacccttttctgaaagtgcttgtcctctctgaggccccagtattggaggctactggatgtgtaagtagttggtatacagcacctctcaggtgtgaccattccaagggaggagatcagcttccagcatgtctcctccagacaacaatacacactgtcctcctgctgaacagtcagttgtggagtaataatgcacctctgcaaggctttgcagggtttttactcatgtatcaccaaggatgaaaatggggcaggacacagtagaagccgtt

SEQ ID NO: 104664 - DNA, 1426 bp, Homo sapiens
tcaccctatgcaaaccattggaggatgaactccagaaaagtaagagtaaccaagaaagggaaagagatggaatatagggaatgggagatcccacaaaggagagattgaaaggcatcctcaaaacagtagcgaagggaagcctggggtggcagctgggcctgaagcactgaggatgactagaacagactggatccaggccagagggctctaggacagattgtgttaagatgaaatggcttgaatacctaatgtgtctgaacatatatttaggaggtttagacagttggcagagagtttgcgattaaattattgataagtacatagagacaaagtagaacaacagaaaagacagttgttaattccagggaaaacaatgttgtacaagaaagaataagtaatcctagtatattacatggcttacctagatacagcaattaaacagtcaaaataatgtcaacactggatgtagatctaaccaaaattatagtataattatgttgaaatggtggaaagatagggaggcaagagtttgccatgacaggggtaagggggctcacagcagtgaaagagccaaatcctcatttaccgagcaaaatgggaaatatatataatgcctaaacctgaaaagatcgagaagtcaagaggtgacaatatgagcacgttattttaacatacagaggtaactaaaagtatcaggtaagtctctacggagtatagtatggaagctgggagcctgttaattttcataacaagccttggaattatttggctctttaaactatgttcatacataattttactcaagtgaaaacgttttaaaaagaacaaaagtgctatgagaatgggcagactgggtttttaaaggacgagtaggagttctataggcctagggaatggaggagtgttcgcgcaggtagagaaaagaagactagcggtaagccaggtgtatcctggctctaaggaagcttgggatgtaggatatagtcacacttaagtatatgggcttttctcccttggtgtctgtgttgtttagaattgaagacatggaccttttgttactgataaaattataacctattactatttttggttattgttttaacataacattattctttgaattgatctcaaagagaggaaaatgagaggtcactgaaatgaccctggcagtaaaatttgctgaaaagcagcgtcctttacaagtccttacctccgaccgcaaaagagtcttctaaagaccactctcagccctcaagggtccttgcaagtcagtgacaccacaggaaatgggaaccttgccaagaattagggaaattcaggtgtctgcaagtccctaaaccctagggccaaaaaaaggatttggcagatgtttgtgtgtcctggaggcagatggatgaaagtatcagtaggctccgtggcttaagtg

SEQ ID NO: 104665 - DNA, 1046 bp, Homo sapiens
ataaaacaaacacagtgcttactccttgccatacttatacataagtatgcctataaagtgaagagctagttttttctctgtcattctgaagccagttccacaagtggagtttgcaagtgtcttttaatcagtggcaattttatttggaatagggtcaagtcattctagtatgactacatttaagtgataacactcgtttgcatgtttgccaaaaaataatccagtttcactgccccccacccccacccccagccaccctatctaaaatatgaattccttgagggcaagacatctaccatctcttgtgcatcccttccaccattagcacttctctgtattgtgcacatgatttgagatcctagagctctttagagggctgagacacttttggttatcatgctaggaagactggctttgccttcctagtgcttgtcttcctttgttgagctttgcaaacccatttatatcacatggagtaacgggctgtttgggaagtttcagccaactgttctttacttcattttatggatgatgtgatacccattttgtctgtaagtggctttctgtagaatgaatgccccattctcattgaagaggtgggataaccatagctcttagccaccacaatgtgtttagagcactgttcagggaatagtcatggtaccttcaaatattactgcctttcaaggtaatgaaatctccagctctgccagatcttttgtgtcatgagaaaaaaccaaaacaacttagttcctgcccatccagggcttatctttgaagtaataagaggagaatgaaagacttgaagaaaagagtggcacttggatacatttccacccacacaggtacttgttttgttttgactttgtgtggtctgtttgtgtgcttgcagtgtatttttttggaaaggttgtgtctttgagttcaaaagaatttcctttccgtatttgattcagcttccgtatttggttaccactgcagttgtgacagttgcttgactaatttttgcaatgcccagggctcattgagattcttggaaaggtgaa

SEQ ID NO: 104666 - DNA, 1056 bp, Homo sapiens
tgaagtagcccctgcagggaggcttatctctaaggaattaatttattaaacactagcagaaatgactcattttaaagatcactgttgctactaataatgtacaaattccaaggaatactatttctatttgataatactttgtagtttacaaaacattttcatttactttttttttttttgagacagggtcttgctctgttgcccagactggagtatagtggcacaatcttggctcactgcaagctccgccccctggggctcaagtgatcctcccacctcagcctctcgagtagctgggaccacaggtacacaccaccacacccagctaattttttgtatttttggtagagacagggtgtcaccacgtcacccaggttggtcttgaactcctgtgctcaagcaactccgctgtctcagcctcccaaagtgctgggattacaggcatgagaccctgcgcctggcctattttcattacttcttatagcaagagcctttgcagtagactgggtgggggaggtatcagagaaaaaattaagagaataaaaattaggagaagttggatgcctaattcaagattaaagtaaaataaacatccccccaccccccctcaaaaaaaccaacccaaacaaacctctgtcttccttcctcctttggtgctggcgcactgaattgtgcgttgctgctgggatcatcagaacagtagttcccaggtgagtgtcggcagctgtggacagtcgagtgcttcaggcaccacaggggagcgctcctcctctgactggaccatgttcctaagctcccattaggtttaaaataagcactgatgtttctgttctttctaaaagtcggcgctttcagttgcttcccttttgtgaacaatgacatcaaaaaataccatctcccagtagtctattctaattcaaaaggcttcataaaacatcaggtggattaggtgcttatttaagccattctctaagtgggggcatccagggctagacatctggcctttaatcagaagggctgccctccagagacagctactaccagtgtctctgctat

SEQ ID NO: 104667 - DNA, 1005 bp, Homo sapiens
tctgcctgcctcagcctctcaaagtgctggaattatatgcatgagccacggtgcccagccacatctctaaattcttgatggccaagaagtacaccccatgccatggtgtgatagttcatacttttgggtttgtcctaccattgtatattattagctgaaaccaaattggttttagctcagggagtggtcctggggaggccagagtttggactcatgaaggaacagggccaacaggaattagggtattttattgtgtgcatctggaagttggagaggccatcaggtgtttaaggatagtgatgtctgtctgtttctgacttttggccctgttactgtgtgtggcaggaacacctggcagtttgaatgtgattcctccgatgctcacccccctggcctccacatctagacaaggtagttgctccatgttctcgtactcttacctaaagtatatcatatctagccactgccatgggacagacatggagtgaacatgcctggtgctgtagcttttattgtgcaaatcttcttggaaaacttccataacatattttggagttgtgttccattgcttgaaaaacaatataatctaatataccccacagtgctgttcccaagtgatttggtttggatgtttgtcccctccaaatgttatgtggaaatgtgatcctcaatgttggaggtgggtcctggtgggagaggttggatcatgggagcgatccctcatgaatggtttagtgccatccccttggtgatgcgtgagttctctggtagttcatgggagatctggttgttgaaaagaatgtggcaccttcttgcctcttttgctcctgcccttgccatgtcatgtgctggcttctgctttgccttccattatgattggaagcttcctgaggtctcaccagaagctgagcagatgctggcaccatgcttatacagtctactgtgagccagttaaacctcttttcttataaattacgcagcctcaggtattactttatagtgaca

SEQ ID NO: 104668 - DNA, 1036 bp, Homo sapiens
tttttcttttttttttttttgagacggaatttcgctcttgttgcccaggctggagtgcagtggcgcaatctcagctcaccgcaacctctgcctcccaggttcaagcaattcccctgcctcagcctcccaagtaactgggattacaggcatgtgccaccacgcccagctaattttgtatgtttagtagagacggggtttctccatgttggtcaggctggtctcgaactccctacctcatgtgatctgcccgcctcggcctcccaaagtgctgagattacaggcatgagccaccacacctggccccagaagaccggatttctgtcttggctctatcagtcctggctgtttaatctcagcaaggttatttaacttcccagagtctcaatttgctcatatataagatagtgattaatacaacaaacctcaaagagtcattgtgaatattaactgagagactgtctggaaaacagctcgtgaaggtcaggcacagagtggaccctcagtaaatgacaggtcctgcctattcctctgcatggccagcacatcagttccaatgcatgagaaaagagaatcacactcaggataagtaagagtggtcatggaaaaggagaaaagacagtgccaccagacacttggtagcttccaacaaatggtagctgttcagtgactctagaattgaaaagcattaatcgagtgcctcaagggcagagaaggggcgctaacatttattgagcacctactatgtgcagagcactttataaaagtcatttgagccgcaaatagtcctggaataaactccatttcactcatggtaagatggacacagtgattgctaaggtcttaaagggagtgcagaggaaagctggaattctaatccagggagtgtagaggaaagctggaattctaatccaagactgtgtgatgtccaaacatgttttgccccccattatataatactcgtccatgctaacatcagtcaggggacgaacagacagcaggcaggagaaagctcagggaggaagtgcttcatggggtg

SEQ ID NO: 104669 - DNA, 1565 bp, Homo sapiens
aacacaaactgaatgatcccaccctcaacacaaaggaagttgagtccataatcgcatccacagataggatactcttagatctgacaaataacacccatttattttattccctttttcttctttcccctaagcccccggagagcctttctccagtttcatcacacactcctgactaagtagatgggggtgctagggggccagctctccgaatgaggcacatttgtcttgtcatttcaaaagctttcacagagcacctgctgtgttctgggtcctgtactaggtgacagggccacctaggtgaacagggcaaggtccctgtcctcaggaagctcccagtccaggcagaggcgtgggtgaatcggcccacacgtactgcacagtgtgttgagtgagcacagatgctgtggggccaccctgtgggtccagggaagcacttcctagagaagaaatccaaacagggattccaagtcaacgaggcagaaagtgatgggaacagcatttgtcatagtcagacaggtgcctttcacagtgacatagagacagtgaggtggggttggaatttaggcctgagagaacggggacccagtggcatacagagtcttatccttgtcctacctttttgaaagagctaaattcagaggctgccaatatgttcataactcaaaaggatcacttatcccaataacttaggaaccgttggcatccatagccctaaatcggaaaatgccgaaatcagaatcatttccccctacattgatcacagtgacctttaatcaccttcagctccctggtctcctagagccacgggtcagcccctcactgccctcctccaaagacaagtctgctcagaatgtcactgaaactctgagcatccactcaacaagcctccatcttcttactttctcatcttttctcttttaggcctgaagaagtcagtgatttatagttcactaaaactgcacaaaatgtggaaagggtggctgaggaaaacatcctgattttgcttgcttttatatatgttatgtgtagatgaataaagtgtttgatcctttttgacagaacagtgtttgttactttgacccattgcttgaattcaaagataccctggtttgcataatacttggttttttaaatgtatgcatcagacatttatccagttgggacccaaatatattagagggcttagcatcagaagaaaagaaccctctccatgtacaaagtcatgtgggtcctgcagaatagctttgcctgtcctgcattctgtaggtacgtgagagtcagacatgacaaatttcttgtatgctgtcaacacgtagcccaggaaacttacagggtgtggaagcttgactttctctgcctggcttgttatgtctctagtctccatcctgttcacttgttttttttccagcaggggctcgcaagtgtcacgtcaacatttccctggatctaggcttttcgtgtgtttctttgttctccactaaagtgtatggcagtgacttttgggttaggagcctggaacagacaccttgcagagcctgccttattgtaacagttaggacgtgttt

SEQ ID NO: 104670 - DNA, 1060 bp, Homo sapiens
gaattgagaaccagaaatctcaagcagatttaagtcataaaatgccctttgagggtcagctaacccatccccttgttttaaggggaagaggcacagagctgttcggtcatcggcttggactcacacagccgggtggcgccacggctggctgctctggtctcctggccctcaatcccactgcccttttcattgtcactgtgacagcaggacagagatagatttggtggtttgattggctgactagaaagaatatttagtttcaagttttaaaactgttaagatgactaacatctgttttgggtttttttggtctcctttttggtttttttctcgcagggctttcagcaatcgtgagaccgtctagtataagacagagcacgaaaggcatttttactgctggtaagagctttggaaatccgtgtgtaacatacctgctgactgagtggcttccacactcttggttacagtgtaaagctttgtatcttttaggtgcttgtgaaatgctgagctttgatggccataaactgggatattgcagtaaggtacaaacaggcataacagcagcagaacctggtggtcgaacaatgtcagaccattggcagtgctgttggaagctttactgcccttctgaattttctgagacacttcctgtgtgcagggtttttccctcatattgttttatttatcaaagttacagatgcataggattgcaaaaacagcagcatctgtgctccccctcctcttccccttctctgagacaactgcttccatctgtcttagtgggttatttttgttgttactgccatttctctaaatggtaagttttcgttgctccttctctacgtttcaactttaggtatcatctattgacttctctctatgggaggttagaagtcaactctggcacccaccctcatcaaatgtacgcaccctcccatccctctgtcctcctaatatagttgtctggtggttttggctaattagttttcagtttgatggtatggtgagccacagagtacacctttccttccctgcataatgttcttctctcatggagagt

SEQ ID NO: 104671 - DNA, 1406 bp, Homo sapiens
tacaggcaggagacacaattcagatcccacttactctcattggtgatgtgatcagggcacgccagtctccctgtgtttgaaatgggaggggtcatctcagtgcctggatttgacgcggcctccacgagtgtcaactgcagcaccacttcctttgactgctggatttaagacaaatataaattttaaaaccaaaagtcagaaattgatccttgagagtggcttctattcttttctcaggtagaaatggaatattataggacaagaattgtcctttttgaagggacttagactcctgaacacttacccattcagtttcagaaaaagagagtttccttagcttgctgcctcgccaggggtgtgggtgcatatatgtttgtgtgatttttaaagagaagccctgagttttggagtatttgtaggatttaaagcacttccatagacgtcgtcttttttttcctcccttcagatagataaaagcccagaaggacagttcactcagctgatgacattgcccaaaaccttacagcaacagataaatcatattatggaccctcctggaaaaaacagagatgtggaagaaactttattccaagtggctcatgatcccgactgtggagatgtggtgcgactaggtacgtttatgaatttgatgttgaggaaatgccagccatggggaaaagcagactttgtttgtgattggaatgtattatttcttcctttttgtttagcgagatagagagattgcctctcagaagaagaaagcactaaaaatttgagggttttctaaatctgcatttttatttgtttgaagtaagatggtgaaaatacttctgtttttaaattcctggatcctaaatcactgtcaaagggagaaacaatgtttcttttggttcctagagcacaacttctagaatttatttaaaagatgtgtctgtgttttgtggtggtctgagaaaagagattggtggcatttttttgtgcttttataacatcgagaacacagctttcctcaatcaactccatttgatgtgtctcatacattgttgagtacattccctcagacatggcccacgttccacagcattttccccagcactgccctgatgtttatccaaaactctgaacccaggccaggtgcagtggctcacgcctgtactcccaacactttaggaagtccaggagggagaatcacttgaggccaggagtttgagaccagcttgggcaacagagcaagaccctgtctctgcaaaaattacaaaagtagctgggcatggtggcacatgcctataatctcagctaacttgggagtctgaggtgggaggatcgcttgagcagttggaggctgcaatgagctaggatcgcaccactacactccaggcttggtgatagagcagcccgtatctctt

SEQ ID NO: 104672 - DNA, 1168 bp, Homo sapiens
tcccataggcaaatgtaacattcctcatttctcatcacttgcaatttaaaaagttatatctgttttcaatttcatcttaaatgcaaacctcctcttacagaacttttaagccttattttgcctttgtaaaatatgataagattatattcatcaagtgcctcaaaagccctcataaacagacaggtcaacgatgaggaagcaatggcaaggacaagtctacagtgatggtgcacagctcctatctccttcattggccacaggcagaatttggcccataagacaagactttgtaggtacagaagcttctgcattggaaaagctaaaacaagttagctactcgcttgtgattaccttgtgtaactaggtaactataatttaactggcataaagggctttgtgatttgagagaccctcttttcctccaaacaagtgctcacatttcttggggtaaagtgtccaggttttgaggaggaaaagcaagtgttctgatgagggatcctgccagagtgaacccgtgcggtatcagtgtggggagcgtcgttcataggtcgagagtgtggattcttaatggaagatgtgtttatctctttgttttaactaggtgactttcggatggtggttggagaagataaaacaaaagtgttgaatattgtgaagcccaatatagcccactttcgagagctctatggcagcatactacaggaaaatcctcaagtggtgtataaaagccagcaaggctggctggaggtaactgtatgtggaaaatagcttgtattgtttctaagacaaaggctatttgcaggaagaaagtcaggggtagaacagcatgactggtgtgagaacatttatagtttaaaaagtaagtactgtatgtaaacataggcttctgtgtatctggaataatgctaaaaggtaacagactagtaataagaggctgcctttggagaagggaactaggggcagaagtgggagagggacttgttttgaccatgtatatcttttttgccattggaaattattaccatgtctatcaattaccaatcaaaacaagtgaaaataaacttttagatcactctcattccatccccagacccatttagctccccagaggtaactgtactgacagtttggtgtctggttgttgttgtttttttttctttttttgggg

SEQ ID NO: 104673 - DNA, 1052 bp, Homo sapiens
ccagctttctaaaggtatcttgaacctttcttttttgttttatttgtttttcattattttatttcctgaaacacaagcttgaacctttctgagcccccagttttcttatttgtaaaacaaataactatctcacaaagaaattatcaatgagataatacgtataatagcttccaacatctttttttttttttttttttttttgagagacaaggtctcactctgtcgcccaagctagagtgcagtggtgagatcatagctcactgcagcctcgacctcccgggcccaagcaaccctcccacctcagactcccaagtagctgggaccacaggcacacgccaccacggctggctaatttcgtttgtgtagcgacaggggctcgctgtgtgcttctgctggtctcgaattcctgagctcaaacgatcctcccgcctcggcctccccgagtgctgggattataggtgtgggccactgcgcctggctgcctccagcatcttatctcattaatagtcagtgttcagaaaatgattgctgttattattatttttatgtattattgttggtcagatgggttttcctcaggttgagaaactgttatttgctcaatcatccagtgattgatggacacttatattagctccatttctcactgttttattagcaacactgctgtgaatcactttgtacagattactttcgttgggaaaggggcaaaggaggcactgacttccttggatgtgttctccaaagtggaattatgttgtcagctataaaaattataaaacttgttacatattgacaaacaatgcctgtcaaaatttgcagggtgctgtggctcacacctgtaatcccaacttccaggctgcagtgaactatgatcacaccactgcactccagcctgggcaacagagccagaccctgtttcttaaattaaaaaaaaaaaaaattagctgagtacttagatcagatggattgaaacatgacagccccatttcatctggccggttaaggtcctcatggaatgaaaaacactttcgggcactctcctatgagag

SEQ ID NO: 104674 - DNA, 1033 bp, Homo sapiens
caagtcttgtgacctctggacacatgtctcctgagcagtaagacatcatagaaactatcccaacattttagcagaattcaggcccttcccataaccctaatcttgtggactttcattagttttacaaaggggatttcagctctggactggggaggggaacagttttagggagggactattatcatccttgctttaaaattaaactataaactatattcctcctccttggttggcttgacctacgcccaggcatgagcttggatagccagcctgtgaggctggcagcaagatggagtcagccatgctagacttctctgttataatcttgtgaagacagttgcaacctccccttacataccctaggggctaaatcagtcttggacacttaacctctcaaaagttttggtggagatgtgtgttttcacaagtcaggtgttttgagtggctttggaatcaaggtactgctctggtcaagaattttatctgtttccttatattttatacttgtataagcaataacatggtattttactccgttttgtgccatttcttttttccttcagcttatcaaatatggagttattagcactaacgttctgattgaagatctcctcaactggaataacttatacattgctggacgactccaaaaaccggtgagtgttttataggctgcacagttaaggatgcctttcctctctgagcctaaccttactttgatcattgtgattgcaatgagatggaactctggaaatagaaatgagtttctgactcttcctattccctataaaatttattgccaaataatatccacatattctattgtgatataagaagaaatatgtatttggtttttttccttgggctcctggttcagaggtcctaaaatctttggaatatctgagtgttagggatgagagggtcttttattattcataacaagttcctttcagtcgtacctgagtttatactaataaagtgactcttgatgggcccctagatagattcaggatagggctggttgccagggagc

SEQ ID NO: 104675 - DNA, 1031 bp, Homo sapiens
gccaccatgccccaccaaggttctgctttttttttttttttttttgagatggagttttgttcttgttgcccaggctggagtgcaatggtgcgatctctgctcactgcaacctccgcctcccaggttcaagcgattctcctgcctcagcctcccgagtagctgggattacagagcccactactgtaatcatgtccagctaattttttgtgtttttagtagagtggggtttcaccatgttggccaggctggtcacgaactcctgacctcaggtgatccacccgtctcggcctcccaaagtgctaggattacaggcgtaattctgcatttgttataagctcccaagtgatgccaatgccattggtcaaaggcccacgctttaaagggcaggaggttggagtactgacttgagaaggatttgaaggtctgtctgaacttggctaaggagtgagtgttgtgattgactggtgacgtctgcataccccttgggccatatatttgcttttccggttgagatccaaccttgcttcacctgtattttgcagttgaggaaactgaagttcagagagaggaaatgacttccataaggttgtgcagctagtttgcaacaggtcccctgacttccaggcccgtggtgtttctgttacctcccagtggttacttgcctgcagctagaagggctttctgcagtgctgctgctggagttggggggaaaaggctgacactcagcacagccttctgcatccacttgagtcatgcaggacacttagctttgttctttctccacagttaatattatgccaaacctacctgtaattagtaattttcaaagaatattataagttccagtaaccaaatgtttgggcataattatatgccaaaagactactttttaattgataatttttaactgctttttatatatttgcagcctgagaaggctgtttggatactgaggttcagcaaagtgggtctgaagatacttgtttatgcaaatgggactttgtaacctgggaaatctacaggatttatac

SEQ ID NO: 104676 - DNA, 1077 bp, Homo sapiens
ctgtgccttggtttcttataaaattgagataatagcagtagctaccttgtagggttgtgctgaggataaatggagtgactgcgtatgttacccataaagtgtttaaagagtgctggcacaacaatacatgttaaagaagtgtttgctattattacattgatgaaaacaaagctcatatttgttccagagactcgctcacatttctgatgacagcaccaggccttctgactattgatcataattgcgtagtatgttagagcttttccatgctctcttgctgcctttctaggaattaatactgaaattattctcttttcttcactccacagaatgctatgctggactttgtgttcacagtagatgaccctgtcgcatggcattcaaagaacctgaagaaaaattggagtcactactctttcctaaaagttttagggcccaagattatcacgtccatccagaataactatggcgctggagtttactacaattcattgatcatgtgtaatggtagggtaagtgactgctggcctttgtcttaacttggctggttatttacctgggttattagagtgccagctaaatatgtatgttcttgtggtcaggaaacattcacactcctgctggacgttgttatagtcgggaaatatgtatgtttttatagtatgtatattcttatagtcaggaaacattcacactcctgccagacgtcttgaacttggggacagagcagggactggagtccttcctcatgtcccattaactgtcattgcagtgtgaggaggtggttgggtgtgactgacttattttattttttttatttttttgagacggagttttgctcttgttgcccaggctggagtgcagtggtgtgatcgcagctcactgcaacctccgcctcacgggttcaagtgattctcccgcctcagcctcccagttagctgggattacaggcgtgtgccaccttgtaggagagacagggtttcaccatgttggccaggctggtctcgaactcctgacctcaggtgatctgcccgcctcagcctcccaaagtgctgggattacaggcgtgagccactg

SEQ ID NO: 104677 - DNA, 1105 bp, Homo sapiens
ccaggatgtctgactctgtcgcctgagctctttcccactggatgcactgcctgtctcctactgctgcattttcctgggcattgggggccctccccacgtggctgggatctgcctttttggccagaagccacctgcagagtgcctgcctccagtcagtgttgtcatagctatttcctggcccacccatggctcttgtatcagcagaactggactagctcagggtctctaaagatgcgccttcctcacctttccttttgccacctcttctgcctggagcaccttcccctcctgaactctgctttcagaagccatgcttcctctggcattgcctctcaggtgtcccctcctccagggagccctccttggctgcccaaggtgggacttgttcttcccttcgatgtccctcagctttgcagtggcccctgccctagggtacaaggacattttctactgtggcttgtcaaggtcagcactaggaggacagaactaggatcagtaaattcttttggacccttctgtgtctcacactggattttgggcccagccggcattgggtaaatgtttgctaggttgaattacctaacattttccttcagctctcctgcaggacaggggaggtggatcctctggagactggacccctggctttcctggataatatctaaacttgactgtgaggctttaaggtctagggctctgtctgttgcacatactaggtactgatagcttcttctagggtggaaaaagcaaactttgggcagaggtttcctgagagctttacctgtccccttgtctctcttaggggcactcacctgcagcaggcctgggaaggcaaactccttgccttgatttccccagagcccacgcaggcaggtaacattaaggatggtaacattaagatcacgaactttggcttcggtaccacattccatgaggaacagctgatagccctttatggcacctaccactacatggccctgaactcttcctgggccagggctcccaatgccccgccatgaatgtttggagccttggaataacgttatatcacatggtgggcaaagttctgcccttctgctcaggcagcgttacggtcttcacggca

SEQ ID NO: 104678 - DNA, 1065 bp, Homo sapiens
atgtcctgaatggtattgcctaggttttcttctagggtttttatggctttaggggtttagacatttttatagcagtttgacacagtaattttatgtctattgaatctaataaaacatttcggctttgactttgtatgtcgttttttcttttttcaagtaattcatttttattgtatttttatagaagtatcaaaaaaaattgccctttactaaagactaaggaacactggctgaaaggttaggcaagaggggtaaaaggagttctttctgctccaatataaaccaccaagcttatttgaataggagatgacaaagtagtaaggggtaggcattgcctggatttctgcaaatctccctcaggaacctgcagcagtgaatggcgcggggagaggtcagcaatttgggatcctggctgcctttgcctcagaggatggcccataaaccaaatactcccacttgttttttgccatttgtcctctcaaaggttgagtgtttgggggaaaactgaggcagctcagcaaataagatgtaagttctcacaaaaaggttgcaaggtgcagctgttagaatgtgcacatggcctcccttggagaccctgcaaagagaatgcaccgacttgggtctatgtataagcctcctgagtagcagccctgagatccaccgccaaatgagtgacgtggatacaaacgtggcgggctgctttccttctcggttctggatgcttacaggtaagagtatttgtatttcctctattggattcagctgtagatttgagcaatcagatttctatagcaggccgaacaggtctagggaatgacgattcctggtaaattgtttatattgaaatcataaaatatgaagcccataacagggaaaggcagggcaaaaatgagtgcttagcagaataggggaatcttgcagacagatggctgggtgggtggatgacagcccttccctcacctgggagctctttccactccacccacaagcaggagcatcttctctgcagctgaggctttgcacagctggctccagaggcaccattctcaggaagtgtggggacta

SEQ ID NO: 104679 - DNA, 1119 bp, Homo sapiens
gatacatgaaacagttaaaaagaaatctagaattattggttgagactagtgtttcaggcagtcaacaaatggagtggttagtgagagccagagttattggagaaagcttcacaaaagatgaatcttgaagaaaggccaagaaaaggaagaggagaaatgagaatgacattcgtgctttatttttctgtgcaggaatttgacccttctgtaccttgtcctgatttcttatcctattaaatgcacttgttttgagtcttattgccagttaggtatctatagataggtactgatacttatttgtatgggtatgatgaagctgctgcagatttctgtttagttataaatgcttctgtagcttaagatttgaaactctctttggatagtattctctaggaagcctatttggcataaactagagaatttgccttgccctggagactagaagcctctgatggaagtcatagaagccactttcccgtgggctgactcccaactgttttcctattttctctgaagtaataacattgatttattaaaactcataagcccagttcaagtctagttcttgacaacagttttttgctcctgtgtttctgtgcttaatagcagttcccagaattgctcttctaatatgggcctaaatttgtcaaaaaatctcagttaaaaattgatgagtggttttattgaaaagtctctatgagttaaggagcaggtgcttgccgtgacaagcgcagtgacttacacaggtgatttttgcactgaagactgattttagtaaaattgtctcacagtttaagctacctagatagtattcaatgagtgatatcgtatatgccctatattatttttctggtgctggaataggaagtcagagtgtagactcattagaacttaagaatattggtcccctctgaattatataatgctaaaataaaaagagtctgaacaagcatttaaatagcaagagatgtaaaagaagggcttaaaataagcagcctctcagagcatccttaatacaacagcagtttcctttgaatttctgtcattgtaattgtgggcaattggagaccccaccactgaccaggttgatgggaaaattggaagatgtttttcttttgc

SEQ ID NO: 104680 - DNA, 1357 bp, Homo sapiens
tgtcctgcctttgttccggagattctgaccccagtgatcaagtgagcttttcatcctggcatgatgtttcagtgtttgattcagtatagcacaggtactcttgagtgtccagactgcagatataaggcaacagatatttatgaagcaccttctctgtataggggatatttactaagaaaaatgagacacagtatctgccatctaagagcttgctgtccagataggtagataagataaatacttttgaaaaaaaatttactaaaaagtagggcctttggatcaacagcattggcatcaaccaggagcattttgaactgcagaatctccagtcccacctcacacctactaagtcagaatttgcatttgaataagatccccaggtgattcataatcacattaaattttagatgcacttagctgaaggatatgccattagtgctaagggtatggcaataacaccaactactgtcatttattgaacaacatatgccagatttactaagctttgtaccaatctcatttactctttacatagcagtgtaatactgcagaagtttagaagagttaagagatggatctgggctagagtgggaatggaaggtttctcggaacaagtgaggttttaactgagctcgaagaattggaatcaaaagagataggtttgtctcagtccagacagtggatagcataaggaaagtacaactgcagaaaagagggggacaacgaagagactagattgatgcgttatctaggcggtacctgtctccattcttttctagccagcctttgagcatttcatcaagaatagaggaattcaaagtactgcagtctgcttgaaccagtgcttgtgagtggctctaaaaaatacttgaatttgaacttgaaagaacactcaaataaggtttggggcttctctttgtttaatactttaagcgtcttatttctaacataaatatactgattgcacagaatttgattgttcatagcagcagttgcctgtactttagaattctcagatattagagctgaaagatcatctgagttactttataaatggggaaatctcgatctcgagaggggatgtggcttgttcaaggttactcacttagctaatggcagaaccagaactagaatctagaactttaatctctctaccatgtttttttttttcccaactctaccacagtatccctccatttttactattttctacctttaacttttatatttttccatcccttactatctcaaggactggtggggacttttagtctcataatgatagcatttaaacctgagggaacctgaatcatcatctagcctagagaaatggaacattttgcccaaggtcaaatga

SEQ ID NO: 104681 - DNA, 1024 bp, Homo sapiens
tgagccgagatcgcaccactgcactgtagcctgggcgacagagcaagactccatctccaaaaaaataaataaaataaaatggttgaagaagactcttggagacctagtcgtcaaaatccagcaatctaataaagttagtaggactgtgccgtaatgctgaccttcccttcaggaacccatttttaagttagcgttcctatctacctaaggttgcttactgtctttctgtacccaagttcagatctgtaataaccttgttctttttaatatcttcctaaggaaaaaggaatggaggcctaaataggaagttttccagatgtgcatacctcctcaaatttacaagggatataaggattaaacacaggccatgtctattggaatcgtccagtccaatgggagaggacaggcatttaaagaggattttaatattgtatggtaattagtatgcataggatgctatgggaacacagagataagttatcctggggaatgaagatcttgtacttagaaatgttccattaaaatgtgccaccatgtattcttagataaaccacttcgcatctttggactttgattttctaaaatttgtcaaatgagaggattgaaatatattctccaagatcctttccagtactgtattatttccgtggttcagtttttgtgccattttcttttaaaagcattagctctaatttttttctatatggtaatgcctgtaaatctttggaagcagagacatacgtcaataaatgactaaacatttcccggaatgaaaagctcacctttgaatggtcttaattcagtacctccttgttacattattgctaccatatgttatcgtgaaaaaagaggctaatcctgtgatgcctgctgtgtatatttcctcatcaatgatgggaattgggacttgtggctaaatctatgtgggaatctaaaacaaaagatgacaatgccacctgataagcttgcagaagttcttacaagatttacaggtgtacacatagtgggagtgccactaaacaca

SEQ ID NO: 104682 - DNA, 1222 bp, Homo sapiens
gtgtgaactactggtgcccagctgcttttttttcctctcctaatttcacttttttaaagccaccaaattagtggtaatttgttatgacagccttaggatactaatctaaaagagaagaaaaataagcatttactgcagggtctcctatataacccggtatattttaggcactttaatgtgttattttatctcccaacaactttgtgtggtaggcattatttatccatattttacaaatcagaaaaataaggctcagaaagataagcttgtgttttaggaatattctgtcattttgttttcagctgtctactttcttctgttgattgcctgaggaatttattatgtggccctcagaatgactgggcataaaactgtgatgtccattctactgggttggttaaagaaatgcaccgtggattagtcaaaggagggccagacatatcatatgacctttcctatggaaaagtctcagcatctgtcttcccccacgtctgtacctatttctcacctactatatagtcaaatctccatcatgaaacttccctagatttctttacctaatattttatctgtttctctctctcaactgaacctccatagcagtttatctacttcaattttattgtacatactgcattctaccttgtattatatgatttctgccttgtgccatttgtccaggtatattgtaggtctcatgaggatggagatcttgtcttgttcatttttatatcttccatattacctaccagaaattcttacccataacatgttaattaattgttgaatttctgttttcctcttctccttcttccccactttccaggttctagtgtcaacctttagaaggcaaagttctctctctctctctctctctcacacacacacacacacacacacacacacacacacacacacaggtgtgaggaggattcaagtgaggagagggcagtaagacatgaacatgaatagcatgagcaaaagcaaaaaagaatgaaatgcttccatagtagtcaaactggtagaatatcatattcattttgtctttcccatttcatgagtaatcaggatattgaaagatttgaaatgagatccttctgaaaaagcaaagggttccagaaatatgactgaaaacttagtaactgtctaaaattattttgctctgtgatcaaaataattatgagcaaccattcttttagaggaaagaaccaggataatgggt

SEQ ID NO: 104683 - DNA, 1072 bp, Homo sapiens
tactaaattcaccgtgtatttcccatgtgggctgttgcctcttagttggctccctgctggttttctttttcattcagtttattttgtattttttaatgataataattattcacctttgacaaatgttttggttttagagcatttttgacacatctttctttagccctagcagcaatcatatgggatcgatattcacattttagtatttatattcaggaaacatttattgaatgctagctacatgctaggcgttgtgctagactgtatgctatatatcattttaaaagtctcacagtatctgtaaagtattattcagattttgcagaagagaaactagaattttaaagaggttaagtaagtaacctctgttctattcatttctttttttcttctttttttttttgcacctactgcctgataggagctgtgcttagcacttaggagagacatgtttgctgttctccagaattaatgcagtgcctgaggaactcaagatttataaagttacattagaatttaatcaactgttaagacttaattgttggctatactttcaagaaaaaaattaaattgactgttagaattgggcaagaagaatcaaaatttgtgtggaccagggaaataaatacaaatttatggagaaggaatagaacctaaattgaagaatgtggcaccattgtagatccctgatctctggataacatgataaagagttaggttaggagtgttaaggtatctggatggattggtaggaggagagactagaggcgagaaaacaagtcaggaggttgttgtaatcaagattacccataggagccagccttggtcatgtctcctttctttccagaaagagaaaaacagttttttttaggccaaagcatcataacattcttgaaactcttagcattgcccttgcagtttagctgtcagagaaatgctaagttaggagatttgaactcacatcctacttatcttcctttgacccaaacatgctactttgagcttgctgctggttcccatatctcttctgaagatgacctttttgttttttgacataatttccatacatgtt

SEQ ID NO: 104684 - DNA, 1044 bp, Homo sapiens
ccacacatggctgagaggttcatcctgctagaaccccttgaggatattactgagaggcaaaacagtgcctaggaagaatggatttctcctggttgtgggcatgagttaatgctaaaatgaagccctggtggggcatggtgggcctggcaatcagacccacgcaggcttggagcaggaccaagggcagctccataaaacagcatatgtcagtgaccatcgaggtgatcataaggtacggaatactttttgaagaacttgctcaaccctattatctttgaaacactaccccttaaaagacaactaagaccagggcttacactttttaaagttttatgtttgggaaaaccaaggcccagggaagtttggtgacttgctcagggagtcactggtagactatttctgagatccagtgctctctccaccacactctcctgcatctgccatgtggaacttgagacttcccaataaaccctggagcagggtggtctgtgcctgagacacctctagagaggaggggagaggaccctgcattctagggccctctgtgagagagtgcgcctctgacggggccgctcgtccctggttcctccttgtcctgctgactgctgctgtggctgagttgctccgtttctgaggagaagcacttagtggctatatacaaggatagctaaccaaggaccccctttagggcccttcagagactccagcttcttggaatagagcttatcctttgggtaattaactaaccacaccctttgaggcataaattctaataaggaaacatttttatatggttaaattatgaagtttttcttgtactgaacctagggggccctgggcaaccccaaggaatgcagcccccaggcaaggtgctgcctccacgccggctcccccctggaccatcactgccaccttcctcctcttcctcctcttcttcctcctcctcggctcctcagcggccgggcggccccaccacccacggagatgcaccctccagcagcagctccctggcagaggcccagccacccctggctgctccaccac

SEQ ID NO: 104685 - DNA, 1039 bp, Homo sapiens
gagataccatcaccattatagccaacaggtgctgactgctctggcagtgccattcccagtctctgagcttgcctgcattacctcctttcatcttctcaagaaaccttcgagggtaggtactagagatgtttctgtttcgtagatggggactcaggggaggcttcagtagcttgcccaagattacgtgggctcagcgccagagcctgggagacattgatatgggtgtgcacaccagcactccctgagcaccttccagtgctaagtatcgtgccagtgatgggcctgtgtgtcatctcaggtcctcacatcactgccatgaggtgggtcctgttcttatccatcttccacaattggaagaactgaacacagggaagtgaagctccttgctcagggtcagtatgtggacttaggcactgtggccccagaacctatgtgcgctaaccactctaaaccactctgctgtgcacttccagtgataaaggggcattcatcagtacaacaatagggaacggtgccctgtgcaaatgggagaggtgtgtgttcaagggtgcagaaacatgagaagccttggcgtgttctgatgggcacgtcctgtgtccttgcggtcctggatggtgctgctttccccagtcctgtcactgcttccagtcgtggctgctgcctcatccttctgccacgctcccccttaacactttctgcattttacttctcatttctcttcctgcaactgctccagcatctgggattgatggcaacaggacttggctttttaaggtgttgccagccagctagaggacgccttcagctctgacccatgtgtcgttgtcttagtcatttgtttgtgtggctcttttcatcatatctgacttggaggctttcttctacatgctcttcgagcctcagtctcctttgacttttcatagcgatcctctgagaccctgaaaagggaacacaggtatggcctggttctggtatgtgacagaaggcacagaggtagaagtgctaagtggcttagctcagagccacacggaagagccaa

SEQ ID NO: 104686 - DNA, 1084 bp, Homo sapiens
gggatgcgtggccgagacgctgggcgaggccagcgcggggggctacgccccgagtttgaagcgtggcccctgtgggctgggaggaaggacgtcctagccagggccgtgcaggatgccggggcgctgtcgggaaggctctggggcttacgctttaactggaaaagatttgaagttgagtaaagggacgccgagaggacggttacaaatggggataccacataggagtaatttgttaatcgattatgagggcctcaaagtttggagaatccagatgcaatctaaacttgcagagagttaacaagtaaaagttgttgtgtggaaaataacgacaggtagcatattgtgaatatcggcgaagcgccctgcatatttccaagtcctttatattcattatcatcagacttcacagtaagacaacttagtagttattattaccattttacagtgcaggaaactgagaccgaaagacgttgacactcatttatcttactgagagagccatttacgaggagaaatgcgacggtaatggatggtttattgtagaaaatagccagatagctacactacgactgctcctatgaaatagaatagtgtggttgtgtaacaccctcattgcttggtcagcttgtggcttactggtaatggagtctagtcctattgaattgtatgtttggaaaacgcaaattgaattgtatgcttggaaaatgcaaatttcatttaataatttttatgggaaacattgcttaaaaacagttatagagtttgtgtaataaacagtttattttctatgttgttacttctcttcattggtatgaatagttgagacgtgactgtgtagtaagttttctgttagcattagtgtacatttactgttcaatttatccaaggcccaggtggcttatgttaagctgttgtcagaaatttgcacctagtgtctataaaaagacttttactaggttatttgtactagaaggtgttttgtgaagacgggtttgtgtgtgtttacgtatttttatttgtataaagtttctcctgctggaggaagtattcctaggtcattgtgcactgtaaagcagcttgtagc

SEQ ID NO: 104687 - DNA, 1113 bp, Homo sapiens
attctcaccagcaatgtatgagggttatttcatctgtcttttttgttgaggaaaccatatatgtgtgtgtgtgtgtgtgtgtgtgtgtgtgtgtgtgtgtgtattttttttgctttaagttctggggtacatgtgcagaatgtgtagctttgttacatgggtatccatgtgccacggtggttttctgcacctctcaacccatcacctaggttttcagccatgcatgcattagctgtttgtgctgatgttctccctccccttgcccctgcaccgacaggccccggtgtgtgatgttcccccacatgtgtccatgtgttctcattgggaaaccctattttgttaatagtaaataaggttcttggatgattgtgatttcatcttttggaatttctggtgaaggaaatgcctgtagtggtgaggcagttgagcaagaggtttagcagagagtgtgcccaggcttcgtaacatgacttctcccttagtaatctaattcttatttcaggtcttgtccagaatgccgtgtgatatcagagtttgtaattccaagtgtgtattgggtggaagatcagaataaaaagaacgagttgattgaagctttcaaacaggggatggggtaagtgcttttgagtttcgacgtgcccctgctgcctgcctggctctgctgtcagcccgtgtcctcgttctccttcccaggagtgtggtcttaggggcctcttcctctcttccttctctcaggcaccatgctgggctctgggatgcagcaatgagcaaggacatggtgatgtggacctgtttagttttggtgttttttttttttttttttttttttcggtgagatagggtctcactctgttgcccaggctggagtgcagtggtgcaatctcagctcactgcagcctcagcctcctgggctcaagcaggagcctcttgagtagctggggccaccagtagtgtgcgccaccatgcccagctaattggctaattttttttggtagagacaaggtttcgccatgtagcccaggctggtcttgaactcctaggctcaagtgatcctcctgcctcggcctcccaaagtgctgggattacaggcatgagccaccgtgcccggcctca

SEQ ID NO: 104688 - DNA, 1482 bp, Homo sapiens
tggctttaggcagttgctaaaaccctctgctttccctgtagccaccttgacagcactgcggccaggaggaaggggagagttggcttggtggggtacctagggaactttgagcagagacaagtggcccagcttcagagcttagtgcccagaggagtgaccaggcctggcttagctctgtggtgacccaggaggtgctctggagctgccggagggcctgtggagcactgcagtctccacacagcaagtccccaggcaggttaatatcctttgcaaggctgcaggtaagtggggatacttcctatcctgcttggaaatcagaatcccagctgtgtgtgacctgagacaaatcactcaacctctcccagcctcagctgccccacctagaatgtgaggctgacctacctctggcgtaagggtggtaaggatggaggcaggcagtggcccagtttggacccctcattttcccaccagcctcttgactttttctttctgcttttcaggaaaaaagcctgtaaatactttgagcaaggcaaggggacctgcccatttggaagcaaatgtctttatcgccatgcttaccccgatgggcggctagcagagcctgagaaacctcggaaacagctcagttctcaaggcactgtgagggtaaggactttagccatctctagttggggacacttagcagctgtgggcatttccaggtaccgttcctggcagagaaatggggtaggcaaaagaacgatcaaggaacgcagccttcctgttgctcttagcagtaaccaggcatgtccactggctgtttttgcagttctttaattcagtgcggctctgggatttcatcgagaaccgagaaagccggcatgtccccaacaatgaagatgtcgacatgacagagctcggggacctcttcatgcacctttctggagtggaatcatcagaaccctaaagagtagatggttgccctgcatcttgggctccatcggccgaaactttcccaagccagggtgtgcggagcttccctgtactgcagccaaggtgacgtgtgacttggatttgagtggagttgggcttagccttagtctcattcaatctccattattacagccatggggaagagtgaaagatataaagtaacctaattaaatgtatggaattgctatttttatagctgatatagttacacctcaagcccctcaggggtaacaactaacaaacacccaaactgtttggattgattgctttaaaaaacaaacctggctcttacctttgatcttttcttccccagaaatagtaaacttgcagctgcccctaatgcagcatatttttcttaccaaaggagtcttcagccctataaaaggattcctctatagtgtatttctctagtgtatttagtgtgtcgtcaaaattttgatttatacagagctttcaagaacacacaatgcaaagtgagcgcagcatagctgttaacaaacatacaacttt

SEQ ID NO: 104689 - DNA, 1116 bp, Homo sapiens
ttgattttaattgaagggtgagcataaccttgtgaaccagcactagcttgttccaagctggaatttatctaatctatttttgtgtttaaaaaagctgtacctaccaaataaataaatagtttataaaatgtattacttaaggtattagctgagtttagagtactttctgcttaattaatttttatacttaactcttcagtagaggtttacaaagagtacaaaggttaaattacaaattcattcccagcctaggctctgggcacatttcctgttcttgaattctgctcctgaagagggtgaacaaatggggcattcaagttgtgagctcagaattactttaaaaggaggtaacagccagccattacacctaaatttaatttattttattaaaataacataattgagggaccatcagataactgtattttgtcaggtgcaataaaaacaaaattaaaacccaaatcatcaagaaaacctgtattcctggcttccttgtatacacatgatgtgactagagaaacaaggctgtttgtttgtttgtttgttagagaaacaaggctggccctgcggccccgccccataggggcagctcctggaagacaaaattcagcatgatggaagactgctccctgagagggctgagatgcggattggccgagtgccttgcctggaaaaccatcccaatgcactggacaccttagaagctgtgaaaggaggacgtgtcccctaagaaaagttccatagtaccaaagcaggctccttcgggcggccagagtctcggcagtcctgggctgtttggtgccttatgtgcaaaatgtctggcgctgcaccactctctgaagaaagtcccgcctgtgacatgcattcctccagaagctgatttccaaaatcccatgtgtctccacatcagggctggactgcctgctaccttacttcctctaaatactcatgtagccaacagctggggctgggcccctgctttttgtactaccatcaacatccacttgcgcatctacagaaggctgggccttgagcatggggaatgtggggagggagcaggacacaccagcactgcaaatggcttccttctcccagggcccaaagggatagaaaaga

SEQ ID NO: 104690 - DNA, 1410 bp, Homo sapiens
gagattaccgtgttataaagaactttgggatatttttcaaaattaacctgaccattcttttgaaaccagagtccttaacaagcattgagatatatttctccatgaaggcttaacagtgaaaattggagattttggtttggcaacagtaaagtcacgctggagtggttctcagcaggttgaacaacctactggctctgtcctctggatggtgagaatctgggctcccaccagcagtctctggtatagggcaaaaggaatgccttggagatttatgtgcaaacttaaagcgtttctgtacatttccccgaaatccacatgacccctagtgacagccagcctcagggcaattgtagattttcttgaggaagctgttgatcagaaccactgtgaagcttagtgtggagaggagttaataagctgggtgacagaaatgctgggtcttggtcctttaaagacaaggattcctgagctgttttaaccagtgcctgagttggagtcctttgggggaaaagctatgtggggactgaagaatggactcattcataactaatgaaagggacagcctggcccctagatgtctgtgaggcctgtcatatggtgataaatgcacttttgtcatatggtgatacatgtaggccccagaggtgatccgaatgcaggataacaacccattcagtttccagtcggatgtctactcctatggcatcgtattgtatgaactgatgacgggggagcttccttattctcacatcaacaaccgagatcaggtaagtctgtgctggtgcgaaaggacccaactcgtgggagcccctgggcctccgccagcctaagcagctagagggttaggacttgttattatctgttgttcattcaccccccattagctcagctgttttctttcccttagatcatcttcatggtgggccgaggatatgcctccccagatcttagtaagctatataagaactgccccaaagcaatgaagaggctggtagctgactgtgtgaagaaagtaaaggaagagaggcctctttttccccaggtaaggctcagggctgctagaatgtgattaaagcatgggttggttcgtaaagatggcaatataaggtgggagtgttttgttttgttttatagggaggggacccaggtcctctacaagatggtggggggcagggtacatcctgtgtctttgagacacagctaatgagagcattcttgggctttgtttcagatcctgtcttccattgagctgctccaacactctctaccgaagatcaaccggagcgcttccgagccatccttgcatcgggcagcccacactgaggatatcaatgcttgcacgctgaccacgtccccgaggctgcctgtcttctagttgactttgcacctgtcttcaggctgccaggggag

SEQ ID NO: 104691 - DNA, 1106 bp, Homo sapiens
taattttgcaggagatgttgcagtaaagatcctaaaggttgtcgacccaaccccagagcaattccaggccttcaggaatgaggtggctgttctgcggtgagtagaaagctggcggtccagtccctctggagtgctggagtggggagtacaaggactgtagagttagtggactgtgccgcaggttgggacgggcaggcagttaggactcactgtggagtttctgtggttggatgctcctcccttgagagcaaagggatgtttcctttagtttatgtggttgtcaagcctttcgaagagcccctttttaggagaataccctcctctgggcacagtaaactcaatagcccaatttctgtctctgggttttggtttgaggtgggcagaaataggccctatttttacctttatttcccagaacccttttttttatagctgagttgccttattttagacttcagaacagtcagctttccaatctttcagtcactatttagacttgtaggaataagtcatataatggagacttctacaaggagtccttgtgacctccacaggagggtcatggagtgtacattgatgaaagagaatgtcctctctgtaagcaaggctggcactgaactgatggcccagtgaactaatggtgggcttctctttgctcagaatgccacccgggttatcagccgtgccatgtgtttgtttttgggactgggggtggtgttgggactgggggtggtgtcgacagcacagaacccactgtccacgggaaagcacagtagacctccctgagcactttcctcctccctctcctctcttcccctcccctccccagcaaaacacggcatgtgaacattctgcttttcatggggtacatgacaaaggacaacctggcaattgtgacccagtggtgcgagggcagcagcctctacaaacacctgcatgtccaggagaccaagtttcagatgttccagctaattgacattgcccggcagacggctcagggaatggagtgagtagatggtctgatgcctctctgggacccaggcatcaaatttgtccctaaattggaaccaggatcaggaaaagccttctagtccattaagcgattc

SEQ ID NO: 104692 - DNA, 1048 bp, Homo sapiens
caataaagcaaaaatcacagagtcccttggtgcctatactactttggatgacactggaattatctttagagataaatgtgcaaagattgagagaagttaaaagcatcaaatgaatggagtattaaaattcaaggtactgaaaatatcaaacacctccagttttgagtacttggtggttttttttttttttttttttttttttttgagatagattcttgctctgttgcccaggctggagtacagtggcacaatcacagctcactgcagcctccaactcttgggctcaaacagtcctcctgcctaagcctcccaagtagctgggaccacaggtgaatgcccagctaatttgttttaccttttgtagagacaaggtctcactatgttgcccaggctggtctccaactcctggactcaagcagtcctcttgggtctctcaaaatgctgggattacaggcatgagccactgtgcccagccttaccatgtgctcgttaatgcatggtttttaccacttgtaattaatcatctgaccaatttctagttccttaagaggattggcacccgactgaacatttgtaaagtacatgtggaatgattccttttcctttgaaaattgcatctggctgggcagggtggctcacgcctgtcatcccagcactttgggaggctgaggcaggcagaacacttgagcctaggagttcaagaacagcttgggcaacatcgtgaaaccccatctctaccaaaaattaggtagatgtgatggcactcgcctgtagtcccagctacttggaaggctgaggcaggaagattgcttgagctcaggaggcgaatgttgtagtgagctcaatacagtgagtacacactactgtactccagcctgggtgaaagggcaagaccctgtctcagaaaaaaaaaaaaaaaggaaaagaaaattgcatctagtatgtactactgggctgtctcctgggtcccagagaaatgatactgttgtagaatatttatttatatgtatttagagacaagatctggctctgttgcccaggctggagt

SEQ ID NO: 104693 - DNA, 1027 bp, Homo sapiens
ggccgaggcgagaggatcacctcaggtcaggagttcaagacgagcctggccaacatggcgaagccctgtctctactaaaaatgcaaaaattagccgggcgtgctggtgcacacctgtaatcccagctactcgggagactgaggcaggagaattgcttgaacctgggaggtggaatattaaatccttctaatatttaatgaaaaatcagccttggagatactggccactgatatttgctgaatttaatcaaggaacgttgattagagtatgtttaggatttctatggtttttagaggtttttataatctattttgttcttgcacatcctcctcctcttttttccctcccccagagaaaatcttttgtgtgtaggagttgaccagctttccttttctgtttcaggatgcaattcgaagtcacagcgaatcaggtacttttccatagtcatttagccaacaataatgggctttttttctttatgcggtgtatcttctgttggcttatccttgtgtggcttctgtttgtcttgtctattaagcctcaccttcagccctgtccagtagccccaacaatctgagcccaacaggctggtcacagccgaaaacccccgtgccagcacaaagagagcgggcaccagtatctgggacccaggagaaaaacaaaattgtgagtatagacaacagtacctcctgccaattagggttcagtaagaaaaacctcgttggaaattagaatacttaaacttattttgggagaagattctaataaaatacattcaatgaaggagattataaatgttactgtcatttttggcacacttgcatcagacagtttgccagtgctataactaaaatggtatttctcaaaagacaaaaattggaagtatggttaatatgtttatctttaaaagatatggaaacagatgacatgggttgatcctttgatgccctcattatcaaaagattattaccattgcatggagtataataatgatctctacttgtttcagaggcctcgtggacagaga

SEQ ID NO: 104694 - DNA, 1914 bp, Homo sapiens
aaataatgaaaatgttatacctcttaatgcatgttcccagtttggttggtgggggttggtggtgactggaagaggccagtggttaatttcacatttaggtatttccatctaaaaactgaattcccatttatttactttgtttgctggttgtagcaggtaaggacaaacagagggtaaaatcctggcctttttacagacatgctcagcacgtctacttatctgtttaaataaattctcaaatttagtctctaaactgggcgtgttccaactagcttaataggtggtagcgtggttgtcaaatgttaatctgttctttcctggagatgttgtaaaaatttggagtagagtggtgctttatttaaaaaaagaaaacttataatgcactctccttttcattgaattcccaatacatatattatttcctgttccaaattttgtatgcaaaagcacctagacttaagataatttttagatgtcacacatttgaaagaatcaaacattttgtcaaaggttgtacaggtagagtttgcccttaagcatcttacttagtcaaatatgtacttgaaagacttcaccagtatgaaagcctaagtgccaatcatggaattttctttctcctcctagttctcagcacagatattctacacctcacgccttcacctttaacacctccagtccctcatctgaaggttccctctcccagaggcagaggtcgacatccacacctaatgtccacatggtcagcaccaccctgcctgtggacagcaggatgattgaggtaatagggcaccttgggggtggtaatgtcagtcaattaatggggtgaggttgatacttatttcagagttttgggtttcaaatctgatcaaggaatgttgcaacactttctcaggtctctggacttttacagtttattttatatccataatatcttcagactggctgaatagtctggttagtatatcattcaactggagaactaaaacttcctgaaaaaatgttaacatttgaactcttcccattatcagatttgaataggctattaatgaacaagtgtctaagatatttaaagagcagtttagttttggtgtgggacagaaattaacagtgatggagaactacagattctctggaagacttttgtgattttatttagaaataaaagggtggagtcctaggactttaataagcaggtgtttggggagatgtcaaagtgcccaaagctagtgtttttgaactgctttttcttctcttggctttttggttatgtcctattggtttaatttgctttctgcttcatctttaataacaactgaatacacttaaatacttcctttgttctttattcttctttatttctcattgctttggactagaataacaacctgagtgcttctcccagggcgtggtccagacgattttgtttgaggggaagagtaggtatttttcttcatgcctttgctttcttgtaattaacaggattgctaaaactgtcagacagcagactaccaaaaatgaaatagttgctaagttaaatttatatttcttgtcacttgtttccatgttttctttttctttctttctttttaaaattttttttggcagtagagtatatagaagtaaaaaaaatgttgtatgtggtattgatgataggtgaaatgaatttctgaagttaggccaggcatgacggtgtatgtctgttgtcccagctactccagaggctaaggcaggaggatcactggagcccagaagttctaggctgtagggagctacaattgtgcctgtgaatagccattgcactccaactggggcaacataataagaatccaccttaaaaacaaacaaaaaatgttaagttagattttgaggccaagggcattaaaaagttttttttttaaatcaattccaaccaaa

SEQ ID NO: 104695 - DNA, 1051 bp, Homo sapiens
ctcctgcctcagcctcccgagtagctcagactacaggcacacaccaccacgcccagctaatttttgtagttttagtagagatgaggtttcaccatcttggccaggatggtctcgatctcttgacctcatgatctgcccacctcggcctcccaaagtgctgggattacaggcatgagccaccacgcccagcctttttttttattattattttttaaagacagggtctcgctctgtctcccacagtggagtgcagtggcatgatcacagctcactgtagcctcgacctctcgggttcaagtaatcctcctacctcagcctcctgagtagctgggactacaagtgtatgccatcatgcctagctaatttttgtattttttctagagacggggtttcagcatgttgcccaggctggtctcgaactcctgagctcaagcaatctgtccgccttggccttccaaagtgttgtggttacaggtgtgagccaccgcatccggcggcacaagcttttgagtctaacagacatatgtcaaaatctcagtgttgtcattaaccataaccacatctgagttttcgttcatgcatctgaataaaggggatattaccttccttgcattgttcttatgaggcttgctgacataacctgtgaaattactaagcacaagtgcccacctcatggaaaaaaggtgcctaattactcacttttctgtgatttattccttctattttagtcttttatctatgcattttcaagatggaatgtttccagagaagctgtgtgtgacatagtttgtgaaatgttatactgtagtttgaaaaatattattttgatatagctagacacaggaccagtatttcctagaaatgcacactgggccgggcgcggtggctcacgcctgtaatcccagcactttgggaggccaaggcaggtgaatcacctgaggtcaggagttcgagaccagcctggccaacatagtgaaaccccgtctctgctaaaaatacaaaaattgggggaagggatagcattaggagagacacctaatgttaaatgaca

SEQ ID NO: 104696 - DNA, 1134 bp, Homo sapiens
caaaaacaaacacatgttaggtattgataatgtttccatggatggaaacagtgatgttagatgctgtgtttttttgagacaaagatttttctttgtgtttactctaatgcattatatagactgggcactcagaaagtgcattattttatataaagaatgctatcctcgggagattgacttttctcattcactaatttttttttttattcagttaaatgtgtactaatccctgctgtttgatagattgtttaaagatgcagaagcatttctgcttcagggaagattcatggtttatcctattcctaatggtggtggcaagatagaggcatcccctcaaaggctaggagtaatacctcaaagcagcagagctgtccataattatccattatccattattccctccaccccgaaaatatagggaaacctttaaagggttcttttttaccctcttcttggaaagcgtcacttatgttattcatcgttagcttacattttttcatgtttcaaagagttctgcagtttgggagaatagcccagggaatgaatctactcgaaggggtgagtgtaattctcaatttaggaggcgtttgttgaagtgcaaatctttgaagcagacgttaacttttgctgaaggtagcccaggttgggtccctaagccaatccatagtgttccttaaggactagagagattctgagacagggagggcttggtctactctcatccaaggctgcactggtttggagctactctggagtctctaggacagacagcagattgtcactaggatcagtctgcagattgatgagaaaataaggcttgtcctccttctcttcataagggcaaaatagtcctttggagttataggaagttttccaggtgctgtataggtaattatattaaggaatgtattgtttactgttggatagtgagaaaaatggcttgactaggcttctggtagataatggagaggcttgaatggtgctatacatgttattttctctttacctgagaatattcttcctttggaaaatgggccagattaactggataaaacataagaaaggaattgggcattactttttacttatgtatctattttttgtcttatttatactgtaggcacagaaagtgtg

SEQ ID NO: 104697 - DNA, 1443 bp, Homo sapiens
tccacttgtataacatatacagatttcttcactttttttttttttttttttgagacggagtctcgttcttgtcacccaggctggagtgcaatggtgcgatctcagctcactgcaacctctccctcctgggttccagcaattctcctacctcagcctcccaagtagctgagattacaggcgtccaccaccatgcccggctaatttttgtatttttagtagagacggggtttcaccatgttggccaggctggtctcgtactcctgacctcaggtgatccacccgcctcggcttcccaaagtgctgagattacaggcgtgagccaccgtgcctggcctcttcacctttaaaataatcttactctattattctgaaggatattttcccccaattaatatatcatggactcctctccatccaggtcattataagtaatataatagctgcataatgtgacataatacagatgtctcacactccattcaagtactttcctattgctggacattcaggttgtttcgtatatgtgtgtgtgcgtgggccatcacaagcaatacagactggtgcatttatttctgtgcccacctttccaaggggtgctgcagcctgtgttggtcctaaaggtggtcctttgtttgtaggtcaatgtgcgaaatggaatgagcttgcatgactgccttatgaaagcactcaaggtgaggggcctgcaaccagagtgctgtgcagtgttcagacttctccacgaacacaaagggtaagagctcaaaagtcaattgacttcttcagactagtaaggatcttctagcttcaaatagctatgtttgtattaaattgtactagcttcctatagaatattgtatatttctatacctttctttataaagagataattcagaaaaataggtattaagaaattgaaattattgcttggacattctcttgaaaagttaaatacacgttaagctgggcctgatgaccaatacctgtaatttttttttctttttgaggtggagtcttgctctgtcgcccaggctggagtgcagtggcgcgatctcggctcaccgcaagctccgcctcccgggttcacgccattttcctgcctcagcctccggagtagctgggactacaggcgcccaccaccgcgcccggctaattttttgtatttttagtagagacggggtttcaccgtgttagccaggatggtaatacccgtaattttaacactgggaaactgaggcaagagggttgcttgaggccaagagttcaagaccagcctgggcacatagcgaaggcccatctctacaaaagatttttaaaaattagccaggcatggtggtgcggccctgtagtcctagctgttcgaaaggctgacgtgagaatattgcatgaccccaggggcttgaggctgcagtgagtcatgattgtgctactggactccagcctggg

SEQ ID NO: 104698 - DNA, 1071 bp, Homo sapiens
gagccactgcacccggctgctatgattatttcttagctttttatacatctatgtagtccttgatcccctccatttgagcacagctggtggttggaagccaagcttgacttctcctacagcttatgagaaggttgtagcctaggttagttttgcctgtttctttgggtaaagatgaactaactgtggaagaactagctgctttcaccaggcacgcagcttgaggaaagcggtagaagagggaagagttgcttagctaggccagcaccatcagtcagctctttttactcctccccaggttgctttacttcctgaacccagaatgactctcataatcactcagtgggttctagaaattatttaactgatttcagcatgtatccatggagggctgtaaagaggagaatgagacagaggacgcgtatctgatttaaataattttagatgtgataattaggtttttgaatgtttcttggaatttttattttctaaatgtgtgcctctttgacttcctcctgctgctgttgctgctattgctgctgctgctactgcttctaattattattagataagtgattgactggagccgaggaccactactattagagtcagctgaccagcaggttaaaatacagattcattctgtatgaatgggctttattccatactaactgaatcagaatccttggatgtgttggacaggtagatggaatctatattttctcaagcttctctgaggattctaatgccagctacatttgggaatctgactggattagatgatatttaaagaactgtccagcttgcagtatgatttagtgaagactgataatgtaacagatatcactttatagcttagaaaacattgctatacagtatttgatgcaggtcatgattccgttaggtatgtttattactctttgttttcctcattcttagtgtcttagtagttcacatcagtatagcttacttgttttgtttctgaaaagctggaagttggtgggtatcactgcgtcaagaaacttttaaaataaacttattttggaacattaaaaaatatatacaggctgggtg

SEQ ID NO: 104699 - DNA, 2603 bp, Homo sapiens
acctcggcctcccaaagtgctgggattacaggcgtgagccaccgtgccccgcagttgcttgctaaatcttttaactgctggtcccattttcctcatctatgaaatatttaatggaagtgtactattaaagaaacttttctttgctgatgaatgcaggaggtatcattaaaaacccacatagtgctattttcataattactctttatgtattgtgttcttgggttgaatacttttgttctagagttacaattatttgtgtttcttaccaggtttaagaattgtttaagctgcatcaatggagcacatacagggagcttggaagacgatcagcaatggttttggattcaaagatgccgtgtttgatggctccagctgcatctctcctacaatagttcagcagtttggctatcagcgccgggcatcagatgatggcaaactcacagatccttctaagacaagcaacactatccgtgttttcttgccgaacaagcaaagaacagtggtatgtgaacattctacttaggaaatttagctatttatctgcctgtggagcacattaaggatcatgttcaacttaaagacaggcaaaatattcattgtcatttagggtctttatttttttttttctaactgcagatttatttttttatattgctgttccttccacaccccctattttttcctacctcttggccttccttctgttactcttgcctggaatgtcttcctttgtgccacttcatccaaacaaatagtacattcttatgggtatatttcaaagacttttctttgagaagtctctaggcctttccaactacttattttagaagacattttatttcttctattaaaatattcacctaaagctttttgactattacaatcaagtataaagaagaaagtaaagttacatagaaaagattatttttgtatatttcataggcccaggaccagtctggaggcagcttagaaatcatagaatcttctttttcagggcactgacaccagccacttagttctgcgtagtttattttttcagtgccagtgacaggttcatattggcatcatggcaggacactgccactaggttttctgatagaaaatttctttttctttttcttttcttttttttttttttgagacggattctcactctgtcacccaggctggagtgcagctcactgcaacctctgcctcctgggttgaagtgattctcctgcctcagcctcccaaatagctgggactacaggcacacaccgccacgcctggctgatttttgttttttgtatttttagtagagacggggtttcaccatgttaaccaggctggtctcaaactcctgacctcaggtaatccacctgcctcggcctcccaaactgctgggattaccaacatgagacaccacgcccagcctgataacaaaacttcaatttttctaagaatttagctctcaaaaagttttctggctgggtgtggtgatttatacctgtaatcccagcactttgggagaccgaggtgggcagattgcttgagctcaggagttcgagaccagtcgggcaacgtggcaaaccccatctctacaaaaaaaaattcaaaaaagtaggcctggtgcagtggcttacgcctgtaatcctagcactttgggaggctgaggccagctcattacttgaggtcaggagttcgagacaagcctggccaacatggtgaaaccccatctctactaaaattgcaaaaattacagccaggcatggtgttgcacgtttgtaatcccagctacttgggaggctgaggcaggagaatcactcgaacccgggaggcagaggttgcagtgggccaggattgcgccactgcactccagcctgggcgaaagggtgagactatattaaaaaaagaaataacaacaaaaatgtagccgggcgtggtggcacacgtctgtagtcccagctactcggtactcgggaggctgaggtgggaggatggcttgagcccaggaggcaaaggttgcagtgagctgagattgcaccacttcaccccagcctgggtgacagagagccagaccccttctcaaagaaaagaaaaacaaaaaaagttttctactattatggataaaacaaacaaaaccaaccacctggccaaaacagaaaagtgaaattgcattggttttgcttggtggaacttttgagaaaacttgggttcaaaacttccatgcctcttcctttcccatcctctgttctttgtgtaaaatcaatgcattgtgtttattccatatagtcaggtgaagcaaggttctgaggtggggaaccccagtccagagttttctgtttgcttctaacagttccactcttcccaatttgttaataaattgtttatactttttttgtgaacctaaggagcctcccaagtgtagtgttgaatacttaggtgcattttgaactgaaggcaaaactcaaaagtctaactttaattaaagtttgagtaagtttatctttgtctctcttcctaaaaatgaaaattttatggctggcaaaataagcagtaataatcccctatatctgaacaatggtcttccatttgcaaagtaattttgcctactgtttctcatt

SEQ ID NO: 104700 - DNA, 1075 bp, Homo sapiens
tttggttctgtttatatgatggattatgtatgttgaaccagccttgcatcccaggatgaaggcagcttgatccagcagcacatcaaaagcttatccaccgtgatcaagttggcttcatccctgggatgcaaggctggttcaacatatgcaaatcaataaacgtaatccatcatgttcctgtacattcttttgcattctacatgaccttatgtatgtttaaaaacacatttttacatttctttttttgtatttttaggccgtgttggccaggttggtctcgaactcctgacttcaggtgatccgcccatctcagcctcccaaagtgttgggattacaggcatgagccaccatgcccatttttacatttcttgagcaggagccctgtagtttaaaagtcccctttattttcagcagtgtacatttaagacaaatcggatgtgtgagtaggtagaaaatatttaccgtttactgtgacagaacagatgaacaagaatgtatttggttttatttgtaatataaaacaactgtgaagggaatgccaaacaatagtagtgaatcaaactttggaaatacctctgacgtagaattctatagtagctttaattgggtattattatcagctggtctgtttgggacttgtttgatgaactgttagatgactgactgccagccaatcattatcctggctgctccttagctgactgccagtcaacaattactccatgctgattctacagtttttccacagttgtcagtgttctagttctgagtatagtctcttggcataatgtggttcataaacgactgcactgataacttttgttagaactcaccacttgccagatagcccagatgccatatgttactcattcagtaaataactcttaagagcctgccaaatgctagatacttaaaggcagtgggttataagggtgaactgaacttagcttcttagagcatactacctagtggtataggcagtcaataatcattgagtaggcaaatacctaatattatttcaaatggtgataaattattatgaaaaccaaaaagctgagtaaagagaagaatgatg

SEQ ID NO: 104701 - DNA, 1050 bp, Homo sapiens
ttggctatctgaataatcattcctaaaccatattttatttgtacattgtgtgttttggtacttgtgttaatggtgtactttgaatacacatctgtttattttaaaaatcagcagttgctgactagatgaagaaaacaatgactgatttgaaggtgaaaagaaaaactcgggttaaaaaagagtccagacaatgtgatttaaaatgaaaataatttaagcttatttgtggtgagagttaaaaataaagttggctccaggtatcatttgtggaactgatttgttttagcataattgtttttgaactagctcgtttttaacttgtatttttaaagttacacttttaaaatgtaggagtctgttttgtaaacttgtacagcccctgctaacttttagaagagtagagtggcttatttcttcatgtgtgtttattctgggctgtcatctgatgaagttaccagtttgtggtcagaaattgagaaagaggagtgaggaaacgaaaaatattgacacgtacacatcaccttgcagtgcatgagagtgcccttttggactggttaggaaactaacatttgagcatatttgctcagcagaaactttttatgtgtgaaagttattttttttccagtgttgtgaccacttaaaatttatttatttgttttgtttgtttgtttgtttgtttgagacagggtctcactctgttgcccaggctggaatgcagtggcacaatcatggctcactgcaacctggacctccctgggctcaggtgatcctcccacttcagcctcttgaatagctgggactacacatgtgctacaccgtgcatggctgattttttgtagagatggggtttctccatgttgtccaggctggtctcaagcttctaggctcaagcagtctgcttgcctcaacctctcaaagtgctgagattacaggggtgagccaccatgcctggcctgaatttctttttttttttttttgagatggagtctcgctctgtcgcccaggctggagtgcagtggcgcgatctcagctcactgcagccttcgcctc

SEQ ID NO: 104702 - DNA, 1045 bp, Homo sapiens
gcaaaaaattctcttaaagttatacttgctcacaaaaatgttaactttataaatgtagaacactctcctactaatttttattttattattctattgttttttatttttttgcgacggagtctcactctgttgcccaggctggcgtgcaatgatgcgatctcggctcactgcaacctctgcctccttggttcaagcagttctcctgcctcaccctcctgagtagctgggtaggcacactccaccacgcccggctgatttttgtatttttagtagagatggggttttgtcgtgttggccaggctggtctcgaactcctgaccgcaagagatctgcccacctcggcctcccacggcctcgctgggattacaggcatgagccactgtgcctggcctaaattttaaatataagtaatgtactccccagtcttacagaaattggacgactatagaaaacaaacatcaaaaaaagtgtagaatgtgagtatttttagtttaataagtgtattttataaactatttatttgtattgacttctcggataacaacctgttataaaatctttatccccataaacataattttcctaaaatagctataatattgtgattaatgtttatgctaaagtgactattatggaattaacagacttcagttgcagtttctaaatcttgctttggttgtgatgattatataccactgaagaacattcaggattattttggcttgtttttacccttatcactcaagggctaagctgtttaaaatgcaacataaacatttgacccagttgaatgctgggatacttggaaaaataaacctgttactgtttctgtactaaaggcttatcttttaaagatatgtggtgtttttttagcgcagtggtgcgatcttggctcactgcgacctctgcctcctgggtttaagcattctcctgcctcagcctcctgagtagctgggactacaggcgcctgccaccacgcctagccaacttttatgtttttagtagagacgggatttcaccatattagccaggctggtcttgaact

SEQ ID NO: 104703 - DNA, 1019 bp, Homo sapiens
tgtgaacgggttctagggggtcacttaatctaagtggaaaatgaattcaaggcacgttcattgagcgtttctgcttgcctggtcctctgtgggctgagtggagagactctgccctccctgcgctcctaaggcgtgaaaacaatgcagtgtgataagaattggcttatcaagtgttatggggatttagaacagttagttttgcttggggaggagttgaggaagcttctacactcgaggagacttctgagtcgagttttgaaacacctgtgagtaagtgctcatcgggtgaggaggagctcagggaacagctggtacaaaggcttagagccatgtgggagttgggatgagtttggggagcagcaaattgcctggggtgcaggaaggaaatggtgagagatgagagtaaaataaaagttgctagaattgtgagggggctgtctttgttgtagatagtgaactagttgaatttggattattgtacatgggttgccgagtcttcattcttgctgataattttctccctttgttgatgttgaagctgatagtgattgaacatatttagtttaacttagttaatgacttttaaatttttttttattttttcagaacaatgcaaacttttttttttttttttttttttttttttttttttaaaggaacaggatctcactctgtcgcccaggctagagtgcagtggcatgatcatagctcggttgcagcctctaactcctgggcttaagcagttctcctgcctttgcctcctgagtagctgggactacagacaggtgccaccacacatggctaattaaaaaaaaaatagtagagatggagtctggcagtgttgcctaggctggtctcaaactcctgggctcaggcgatcctcctgcttccacctctccctcccaacgtgcttgctgggattacaggggtgagccactggccaggcagaactttttttttttttaaataatagagagggggtcacactatgttggccaggctggtcttgaactcttggg

SEQ ID NO: 104704 - DNA, 1053 bp, Homo sapiens
ggcctggtggcgcatgtctgtaatctcagctactcgggaggctgagacaggagaagtgcttgaacccaggaggcggaggttgcagtgagccaagcttgtgccactgcactccagcctgggcaacagagcgagactctgtctcaaaaaaaaaaaaaaaaatttccttatgctcatgttttcttcctcaccactttcaaggtcaatgtaaggtcactggcaaaaccctgtgggaaaaacaggcagctccatacaatgcaacagcaacagtttaaagtgccaaagaggccgggcccagggcacacgcctgtaattccagttactcaggagattggggcaagaggattgcttgagcccaggaattcgttcagcctgggcaacatagcaagactctgtctataaaataaataaataaaagtggcaaacaaaatagaactagccagatactgaaaacaagttagttaatggagttgggaactgaatttggtgagtgagtttcctgccactacttctgctgttcgtggttgttgtttttagtaataataactctagtaccattatctaagcttaacctgctgcctgaagttccaccatcagagctttgtttgcatgagttaggcccttgtccagtggtggcctggtgtcccttgttggggcacaaacttaacttacttttttctttgcttctgagcagtgtaccgtatccacagcgtcctccaaggcttcatccccctcttccagaagtttaggctgacaggtaacttttaaagtcttcctgtgttcactcattttctccctagcagggtcttcatttagaaagaggcttagcatacaggaaagaacacagcctggaggcagaggacccaggtttgagtcctacctctgccagtttactagctctgtgaccctggatgagccgtgtagcctcggtttcctcaactggaaaataggtgtaatacttttctgctgcacaagtgtgttgtgaagatcaagtgaggaatggatgcaaaggcctgaagtgtgaaacagtagaaaaatggtctggttagtcttcat

SEQ ID NO: 104705 - DNA, 1034 bp, Homo sapiens
tcttggctcactgcagcctctgtctcctgggtttgagcgattatcctgtctcagcctcccgagtagctgggactacaggtgtgtgctaccatgcccagctaatttttgtatttttagtagagacggggtttcaccatcttagccagaatggtctcagtctcttgacctcgtgatccgcccaccttggcctcccaaagtgctggtattacaggcatgagccaccgcgtgcggcccaaactttttcataattgggaagtttacctgaaaacctggcttctctggggaaattgacagacctgtaagagtgggtaggcgttcctacagcagctttctgtggctggtgggtggtggctgcccctttagttggaacaggaaccctccagccggctccattccccacctggccgactccagattaagtgggaagtctccgagcaggatccaccttccctgaagcatgacttctccccccccagaggatcatgggtatatgatcactgatttcctttctgtgcagatgctcctggagaggtggtaccctctggggaatcaggtgagtgtccagttagaggagagaggtcgttggtgctggtattgagccaggtctaggcatcacctctcccccaagagagccagcacctgttgggatacctggctctgagaaacaggagccccaggtccacttagcctaggctcatcaagcaggctgggccagctgtggcatgaagcagggagcctggggagcttggaaggctgtcccagcaagaccccaggagattacaaccaaccagccatcaatagagagaaggataccgtgggggctgcagaattccatggggacatttttttaggtcacctatagccttccccagggtggaggcacctgttaaggaccccaagcggggttgggcactaatgttgagtttcttgtttccaggactccgaaggagaggctctgacccagcaagtggtaaatacacaagctcaaataggagagccagagcgggtgtggattccagacgatgggttgggtc

SEQ ID NO: 104706 - DNA, 1063 bp, Homo sapiens
gacttagctgagtttgggcaggtataaagaggatgctggaggggagactgtccccagtccagaaggcagagacaggggaagacttggggtcccagagtctgccaggggtcgtggggcaggctgtaatgtggagaggtgggtatgcagagctgaggtgcagggctggccaggagccatggggcaggggtgagtatttgtgtgttctaccctgatctttctctctgcagtggagagtaggtgggaggggattgaacaggcaggggactggttaagaggctgctatagggaaagcaattcgggttgtattcaggagggggactccacaggacttggagtgggcaggggaggcagggactggaggctgacccctagggttctgcctttagtaactggcgggggcagacagaggtgctgtgatggggtgcactccgggagccagcagcaggtgtgtggggaggaaggtgatggattcaagctggggcatgttgaacttgaggctcctgggaggcactcactcaaccacacactccatgagggcagctcccaggatcagtctgtcttgttcaccctggcttccagcacagtccctgtcacttagcaggtgaacaggcaaacaaatgaaacctaggagagggggttgggtaggacatagaaataagggagggtaaggtcagcgtgtttctgtaaagtgagaaagaaaaggtctcaagatgtttacaggacagaaaatgcacgggcctcgtttgaaggtgtggatagaagctgctgaggcaggcaggagctgtgctgtgtgcgcagaaaccattgtctggtgttgcctcttgtcttgagcccagagctcagcatctccaaaggcactagggagccatggaaggagttaagcagaggagtgaccaggtgagaagtagactttatactgctctggtctcagcgaggaggatggacagaaggggatggtattgaggcaaggcctagacttccaagaaatagggacagccttactagatcctctatgctttcccctatcaggtctttctccctaggctgggagccaggctttgca

SEQ ID NO: 104707 - DNA, 1041 bp, Homo sapiens
ggagtacggtgacgctatcttgtctcactgcaacctccacctcccaggttcaagcaattctcctgcctcagcctcctgaatagctgggactacaggtgtgtgccaccgtgcccggctaatttttttttttttttttttttttttgagacggagtctcgctctgtcgcccaggccagactgcggactgcagtggcgcaatctcggctcactgcaagctccgcttcccgggttcacgccattctcctgcctcagcctcctgagtagctgggactacaggcgcccgccaccgcgcccggctaattttttgtatttttagtagagacggggtttcaccttgttagccaggatagtctcgatctcctgacctcatgatccacccgcctcggcctcccatagtgctgggattacaggcgcgcctggcctaagctatttatcattatataatttatcttcacaaaatctctgcccaggaggcactgttatccttgttgtgaagattagctgactaaggtcaaagaaatgttgtgacctgcccaaggtcccatagcagttgggtggcagagtcagggctagaacccacatttgcttgactatgaaacctctgagttgaatctacagtggtcagggctgcaggtgcatagacagtctgagtgctgtgggctgggggaactccgggagagtgtctggcttgggttcagtgatccacctggccctgcaggggctcacctggaccgcctggtgcccctggtggaggatttctgcaacctggatgatgatgagctccgggagtcctgcctccaggcttttgaggccttcttgaggaagtatgtatggtggggttgcctggggatccctttgggaagttggtggggatgctggcccaaagcagtaaaatttcaggactcccattgggccctgtcccccactcctgtcctggctggatccagcaaagcattcctcatcctgccccacaggtgccccaaggaaatgggtcctcacgtgcccaacgtgaccagcctctgcctccaatacataaaacac

SEQ ID NO: 104708 - DNA, 1111 bp, Homo sapiens
gccaccatgcccggctaatttttttgtatttttagtagaggtgaagtttcgccatgttagccaggatggcctcaatctcctgacttcatgatccgcccgccttggcctcccaaagtgctgggattataggcgtgaaccactgtgcctggccagtaacatttacttctgatggcatttgtgatgcttgaatgaaacgtcatcagtcaagcagtcagcacagtgcctgccactcagacagtgcctgctcagtagattataagaataattgttcttattgccactgttatcacttgggggaaatgacactgcaggctgagcaaaggcatggagacttgagagtataaggcacgatttggggctggcatggattgtggaatagagatgtggggtttgtagcagaagctagaagaggtgtccttacaccctggggccatatcaccaaccttcatccctcctgcaggtggagatggggccctttaaacatacagtggacgatgggctggacgtgcggaaggcggcctttgaatgcatgtattcactgcttgagagctgcctgggccagctggatatctgtgagttcctgaaccatgtggaggacgggctgaaggaccactacgacatccgggtaagaccaagccccctgccagatctatgtgcccctgtaccaagggatagtcgggcaccattggggccatgcttgtttgtccttgctccctactccaggcacccaatgaaaatagctgcattgttgttttctgataagaaaaggaacctgtgtctcaaacacctttggtgggagtctacactgggcaggctctttggaggatggtttcacagcaaccagaaaaaaaaaattgtccaggtgtggtggcttatgcctgtaatcccagcactttgggaggctgaggcaggaggatggcttgagcccaggaggttgaggctgcagtgaaacatgatcacaccactgcactccaacctggacgacaaagcgagaccctgtctcaaaaaaaaaaaaaaaattcccagacgaaatttttgaccctgcagggcactttcagctgtggaatactagcagcattgaggagcgagctgcatctcttcgtgttgtgac

SEQ ID NO: 104709 - DNA, 1125 bp, Homo sapiens
aagagctgggattacaggcgtgcaccaccattcctggctaatttttgtatttttagtacagatgaggtttcaccatgttggccaggctggttttgaactcatgaccttaagcggtctgcctgccttagcctcccaaaatgctgggattacaggcatgagctactatgcctggcctggtttgattttagagatagacaggctctgtgttgccctggctacagtgcagtggctgttcacagctgtgatcatggcacaccgcagccccaaactcaaggtgggctcaagctgtcttcctatctcagccttcctggtagctaggaccacaggcacactccaccacacccagctagttctaggtgttttgagtaagttagacacttggtgagctttgtgtataaaagactcagtgacctgcttagattaaaactagggcagtggaatgaaaaattctcatgggaagtgacagtttattttcttcacttactggtaaatgaaagccaaaaagctgaattttcctaagtaaactagaaagaacatggagtgtgtgtgactaactaggatgtttgtgtttacgtttacaaagataactttcacctacagtggttgtagatacaagtaataaaaatgaacaagaccagtattctaacgtggttaccttccaagattggaaatttaaccaggcgttgaaatgctgaaaatttctgttagaaaagatgggcgaaggaattaatggtggatactgaaaccacagttggctgtatgagttgaactgtaacaggcaatacctgttgtatggccaacatgattactcagttgcagtgcacatgttggctggttggcatatgctctgtaagcgcagcttggcagtctttaagatccatagaaatactctttgacgtttgatctctaagttccatttctgggcatttgtccttaaggaatggaaaagcaggcaaactaaagctagtcattgcagcaataacccactggaaacaactgaaaatataatgagagaattgtagagtgctggataaaatgttgtgggtccactcaaaatgattcgagtgttgtagtgtggaaaatgcccaagccaggggggacacatttaaaatggtgggtacactc

SEQ ID NO: 104710 - DNA, 2662 bp, Homo sapiens
cccatcagcccttgcgcgccaccgtcccttctctcttcctcggcgctgcctacggaggtggcagccatctccttctcggtaagtgttaatccgtggcaatccgcattcctgcgggattcatctggccccgtcgcccagtggtgcggaggcctccccttcagcgcggtagtgtctgtgggtattgttattgtcagcttactggagcgtgtacaggaacagaacgaagccgccgagttgatagggctttgcgtcccagagcctcctgccctccgcctgtattcagagctgcgggctgcttgtttgttccttggcggtggagggtgctagttgaggccagacttcggggtctcctgggggccgtgggacgaccaggggtggcccagcttgacagctttcagctgggatctgtggatcccagcgctcaccaatgtcggcccacgtgtattcgttcatgccatggccggcttcttccgctgcagtctctggcccgagggctgctgctgcgggaccgccaaggaaagacgagctgtaggtcggctggtccagctgcaggcagaaattctggtagtatctctgggaatatgaagatgcaactgcccccaccttgccttcgaggatatcatgggccagaaggcagagtcgttttgaatacgtggttcattgagtacccactctgggccagttgatggctgcgaagagagcagaaggggtgctgctgtaggaaatcaatggctcggaagaccacactgaggaaggtgtgagttgatactggaagatctccaggtttgaggcatcttcagaggtatatggtggttttgtgtgtgttgagggtgtggtagcgcagcagctccctagggaattagaaggttttattgaacatttaccctgtgacaggcactgcaggcattcagcgcgcagtgtcatcttcattttacaggtgaggaaaagactcaggttcaagtagatggtcaaggccagtactaccggaaggaccatctgggggttcggacactggtggggtgggatttgctgccccttgcaaattgagagtgtcttggggtcagttttgatttgctcagctgttggcattctttgggctctgagtgggtgaggtgacccttgacctcctgggatcgcatctggagagtgcctagtattctgccagcttcggaaagggagggaaagcaagcctggcagaggcacccattccattcccagcttgctccgtagctggcgattggaagacactctgcgacagtgttcagtccctgggcaggaaagcctccttccaggattcttcctcacctggggccgcttcttccccaaaaggcatcatggccgccctcagaccccttgtgaagcccaagatcgtcaaaaagagaaccaagaagttcatccggcaccagtcagaccgatatgtcaaaattaaggtatgtggtcctgggatggaaatgggtgtggggtgaagaaaagagtttccaacagtttctgacatcacctagtcaggattatctttgaccgatgaactggcttgtggaagagctttctgtagaaatacaggtctcccccagtgtgccctagtgctggtacttatgtctcttgatgtgtgaagcgaaactttaatgaaaagggacatttggccgttttgatgtgttcagagggctttgcatttgtgtcctgtattttgggttgccttgtgacagcaggatccctattttatagacaagaaaactcaggtgctgagagcagtgtctgcagctgtgcttgccatctcagtatctacacagtcccctcgcatcccattggtgcctcctccattgcttgggagtggcaatggtgggggtgccttcatccctagtggctaaagccacgagctcctggtttttcccaccaaaaaagtaaggaaatagtgaagtcctgttaccaaaggcaactactgtgtggcatacttccttttcatttggtcctttttttccctccccaaaaggaagagttcgcactctgcacagacgctaacccacctgtgtattatttccttcagcgtaactggcggaaacccagaggcattgacaacagggttcgtagaagattcaagggccagatcttgatgcccaacattggttatggaagcaacaaaaaaacaaagcacatgctgcccagtggcttccggaagttcctggtccacaacgtcaaggagctggaagtgctgctgatgtgcaacaagtgagttgggtcccacctctagttttcagtgatcagaagtttgcatctgtgtgagcacttctggcaggaactctacaaactcttgggatgcattttggcggggggtgttgtacattctctgagggaatcagaagttgttccttgcaggattttagagaatgcttgttggggaattcaaggtgtttcctttgctgaaggaggtgacttggtcttctaagtgtagagacccaagaccaggaaaagactgctttgtgaacactgcaataatagccactttccactactacaatatcctttggctgttgtttccaaaatgttgctttctttatgaaggtgtcaagcaaaagagttgaactctgaaatattcgaagagatttattctgagccaaatatgagttgaccatggcccgtgacacagcccttgggagaccctaagaat

SEQ ID NO: 104711 - DNA, 1034 bp, Homo sapiens
ttccttacttttttggtgggaaaaaccaggagctcgtggctttagccactagggatgaaggcacccccaccattgccactcccaagcaatggaggaggcaccaatgggatgcgaggggactgtgtagatactgagatggcaagcacagctgcagacactgctctcagcacctgagttttcttgtctataaaatagggatcctgctgtcacaaggcaacccaaaatacaggacacaaatgcaaagccctctgaacacatcaaaacggccaaatgtcccttttcattaaagtttcgcttcacacatcaagagacataagtaccagcactagggcacactgggggagacctgtatttctacagaaagctcttccacaagccagttcatcggtcaaagataatcctgactaggtgatgtcagaaactgttggaaactcttttcttcaccccacacccatttccatcccaggaccacataccttaattttgacatatcggtctgactggtgccggatgaacttcttggttctctttttgacgatcttgggcttcacaaggggtctgagggcggccatgatgccttttggggaagaagcggccccaggtgaggaagaatcctggaaggaggctttcctgcccagggactgaacactgtcgcagagtgtcttccaatcgccagctacggagcaagctgggaatggaatgggtgcctctgccaggcttgctttccctccctttccgaagctggcagaatactaggcactctccagatgcgatcccaggaggtcaagggtcacctcacccactcagagcccaaagaatgccaacagctgagcaaatcaaaactgaccccaagacactctcaatttgcaaggggcagcaaatcccaccccaccagtgtccgaacccccagatggtccttccggtagtactggccttgaccatctacttgaacctgagtcttttcctcacctgtaaaatgaagatgacactgcgcgctgaatgcctgcagtgcctgtcacagggtaaatgttcaa

SEQ ID NO: 104712 - DNA, 1091 bp, Homo sapiens
gggccgcgttcccagtggacagcgtggtgagccgtggccggacggcaggaggagaggggagccccctctggctgtgtgtcaccttggctggctggctggccagggttttgccgatttccctcctcacatccctcccaccctcggtcatatcattgagatcaccgtaccagcaaatctgcaaaccaagcactttgttaatctccagagagagcaaatacagcaatctagagtttagcctttttaaaaatgtgactttaacccgcccacctgtgtcctcccattggcgtggcatttctttggtgtctgctcagaaagaaacagcatgggaccgtgtgattgggtccaggctgggctgtcagggaagcgccctggtgtctccgactcatcaattctcgggtcttttttaaaagccaggctccccaaagcactctgtctcgcaattttgaggaggctgttccgacctggaagcgttaaactgctgcatgtcatctggcgtcagctgtgaggctgcgctctgcgtgttgtgcgtttgcaaaatgtattggcgtgactgtaaacacatcgttgaagtaaagcgattacatattgagtatgtcagcttttctcaccctcttctgtgctgggaggagagtctaactgtaacctttaggttgttccagaaaagattcaggccgtttggcacagaattgctctttctgaagggtagcagtaatgaataggaacagacagaaaaccccaggaggggctttcaggaaactctccctctccatcgccatcctgcaagctccacagcctcgggctgccagcctgtggcactgtcctcggtgtgtcctggagctgtgctgggcagcagggcctcgcgtaaggaactgctggaacccactgagcccttcccggggtttcccgccgcactcagtgtgttccttcaggctagtgaggtttcattctgttttatttgcaagcttatcaaaagtttgtggaagatacattgttgggttccagaggctggagtcatgctgcccacatcttgtttgggaaagcaaaagctcccagtgagctggtgtccccgtgtgtctttcatgggactgtcc

SEQ ID NO: 104713 - DNA, 1407 bp, Homo sapiens
tgttgccatctctcccctctgcccctcacggcccaaccggagccccaggagcccacagggctggtgttgtgtggaacaaaggcccagatttcatttcttgttggcaccctgggctctgctcacctcagtctgagggatgggtgggcctcagacaccatcagccttgaaacggtgagccagccaagtagtgttgaactgcctcccccactccagctctcagctccctgtgccctaatgtacatgcatatgaaaacccaacctagaaaacgaagaaatgagatacaaaaacagacaaaacaaaccccaaaacttgctgcattattgctcttttattgacaatgggcaaaaaaataagtagacctgatatggttgatgaaaatacgtaagtaaactttatataaatatataaatatataaatatatatatatatatactgtataggtagtacttgtgtgtgaaaggcaggcgtttcagtccacattagcaatacccaccttacaaggagctccacttacctaataggaagacagtaccttagctgggtgtgtgagacaatagaccaaaccctaaatgctaggaacaaattcagatacttcatattttcatacaaagaagtccctctaggactggctaaaatctttacacaatcattactaactgtgccaagtaacatagcatctaactgtttaaaaagtccagtattgctttgtataaatccttattttattaacagaatactatcataaatagtattataatgctgttatttcaggtaagcaaatagctaaactgcagtacactctacagtagcaactcaggacagctggttacaagctggttgtcttaggacattggttacacggattcttagacactttaatggctgcgataactgtgactctccatgatccatgtttcttttatgcgcatatgatttgacgcacactcattcagagtcctccgagaggggcacccatacacggcagaagtgttcatctccaacatgaaagtgaccagctctcatcctcgtctccccaacaccataacgtcctcatcccgcctccaacccacaccaggccgaagccctcagagagtgttttcatcaggaaccactctcgaacctgaaggttgactttagcgtttagcaacccagggcggtgtgtgtgtttcccgttttgttttctgagtggtagcagtgatcaccgtaattccatgtagccatgtgctagcagaacccctgtgtcctcaccgtggcccgtgtgaccccagccgacgagtgcccggcggagcccccgctgccttcccatggtccagtgagctgccagggcatcacatgactctcagctgtgctcttgtcgcttctgtgttgtggtgacaccatgcgctccccagggccagacctgcac

SEQ ID NO: 104714 - DNA, 2083 bp, Homo sapiens
gtggagtgcccatagtgcaccccatgggagctgtgggccacaggccattcgggagaatatggcgctcactgctgtccagaactgagatgactagagaagactcccacctttctcaggacgcaacctctgtcctcctccaggacgcggccccagcagcctcccctgagctcgaccacttttgtccctgagtcacatgtggagcgacacagaccatctttcccaagtcgggagatgaggttgctctgcacccctgcagcctgccactgcggaggctggactcccggcacttatcccaggctcacgcacaactcagccctaccattgtttcctgaccagagaggagattgcagagaacacactgagacccgtgggcctcctcccctctccttcccttttgcagactaccccaatggcatccggctcacctcgtctgtccccggagcagatatcaaagtgttaataaacttcaacgcccccaaccctcaagaccggaagaaattcaccgatgacctgcgggagtccattgcggaagtccaagagatggagaagcacaggatagagtgtgagtaccaggcctcatggacagaaggccgagacttgccagactctggcacttgcctccccatgtcagggcagtgacttctgagctcacagagacaagatgtcccccagtcttttctggccttccctatggccacatgatggggcagtctgtgttcccaggctgcaggaggcacagagggagtccaatccaggacccgccctacctgttgcctgttgtatgtccatcaaaagaccctggctctctggtcatcccgtgcgcaagagcccgcagagttcccagctggcctctctgcacctcgtcatcttctgcatcaggctcaaccgactgatgggtcacacagccaaggccatccctggctccaggtctactccctggctccaggtctactccttggaggcacatgggactccctaccactgccctctctgtggaagaccctggctaatctttgctcatctctcagacccaggcaagtctgtgcctccctgtccactcccgagcctggaaggtgactatccttcctgcaggtcacaaggccctctggtctctctagcctccctcctgggatctcctttctgctcttttgtccagggtggccatcacaccctctttcccagaaacaacccttccccattccaagcagatggtggctcaggacagtgctagctccaagcagaaggccccgtctcctgcccactctaggctgtgctcctctcaccaggaccctcaccctctctgttccagcggagctcgagaagcagaaaggcgtcgtgcggcccagcatgtcccagtgctctagcctcaaaaaggagtcgggcaacggaacactgagccgggcctgcctggacgacagctatgccagcggtgagggcctcaagcgcagcgccctcagcagctccctgcgggacctctcggaagccggtaagagcttggcctagaaccaccttgctagcccagcgcatgcaagaccgaggcagggcgtctgcattcagggcatgcatcacgcggggcagggcctgcggcgaagccagtgcggcatttcccctgaccttccgcaaagcagagcagcgtgtgacatacagaaagggcgccccaaaaagacacagggaaacaggacccaaacgtcaaaaagaaaggcattgcacacgaattagctggggaagtcacccccattttccctttcttcttccaggggttttatttacttgtttattgatctgggaagtcgctctagcccgagtgagccggcggctgtgtcccgtgctctctgtgcggccgcgtccctgtgcttcatgctgatgaatgaacttgcgcggaaccctctaatctgtctggcgcccccttgcccactgtccccggtcttgctttccctgcggggcctcctctcctgggaaacccgggcctcgtccagcccagaggccattgagcagcagccagggctggctccggggtccgggaaagccctggtgggaactgtgatgttgtggttgtttctttgtttctgtgtgtgtttaattt

SEQ ID NO: 104715 - DNA, 1160 bp, Homo sapiens
gtagagctcactgcaaaacgagtttgcatttcccatatgtataaggctgtttctctgctcacagcggttttcagagtggggaggaagaaagaagcagtgtgtgcttgtggttagggcagccccgggtcagagcccagcctccagcctctgcccatgtgatgtgggccagcaacagcaaccactgcagcactcccaccgctcagatgcagagctgggcacgccccaggcgcccctcgtttcctcacaacaagcctgtgctgtgggcaaggtgttttagaggaggacaccaagcatggttgaggcagtcactcgcccatagtcacacagctagtaagggtgaaagtaggacgtggccccaggtccatcggagcccaaacaaaccccagcctccctatactccagcctccccacacgtcagcctcagtcttcccatctgtggaatggagatgattatacccacttcgaagggctgtggttagcatggagcagggtagcatttataaagccctctgaaaatggcttagaggtggctcagcccctgacacccatcgcctactagaccgggtcggatgtattgggcccgttctggtaggaggactgaggaaatttgtgttgactgaaaatgtcctgttgctgtgggcctgcctgggagttctttggttctgttgggtctagtggaaggttcgctcctctgatttgctttagaaactggtaaatcgagtgagcctggggcccaccctgatatccagctgcatcccctacccaggtgtggacgatggtgaggacattccccgtgagatgctgatggggatctatgaacggatccgtaagcgagagctaaagaccaatgaggaccatgtgtcccaggtgcagaaggtggagaagctcattgtggggaaaaagccggtatgtgatgggccctggtacgtggtgggccccagcaccacccgggcggggctgcctgccaggccttctcactcccacccaccccactccgtgtggtctcttccagcagggctggtgaattctgccagggcttggggttttttcgagtgtctcctgtcatatttgggaataacagctattggctctgcgttacaatctgaagagagctgaggctcttaatgatctagcaggccagggttgtgcagtggctgagt

SEQ ID NO: 104716 - DNA, 1025 bp, Homo sapiens
ggtggtgagatgtccagcagctgagctcaagaggtcggggcagggatataggagccagtctggctgttctctaacccaaaagtcccacctagagactcatgtatgctggtaaaatgtgaccatcactttatagccaagctctgtcactaaggtatctgtgtttctgccctagaaagggaaaggttgacataggatagttcttcctgccccaggaagaaactgggtagagctgagtcctaatcaggaaggtggggctgagagcccagagtgttgctgtagagcaaaacatctttacgagttcagccagaaaatagtcaagcgtccacatcatttaagttcgataacttcctgtcctgatttatactcctagcagcagagtcctagagtgcccatggctgcatgtacttgtcaatactgggtattttcacttaaattgtatttttatttatcagttcagataaactcagaaaagccacttttttagggtctaatactgcactgcgtagttgctgattggggccatcaagaggtgatgtcctctggctcaaatgggttcatagctatgtggaaaattccacactgtgctcacttttgtccacgtttgctgaagaatcctgtggtgccacactggttgcagtaggatggcccagccatttcttttttttggggtggtttgaagttgggtttgatttttttttttttttttggagtgtggaagggctgccacattgcacaagctgatgctattcaatagactggacaggacccggtgacagattgaatgggggcgtttgagtcgggggagggattaaactgatgacccccaggaccctggctccaggatggaagggaagactgtgggtgactgtcaggccttcccttcctggagagggaggcccggccactcccaagcatgttctggacctgctgacccagggcagccaggaacccaggagtgcccagagcggaatcctgggctgccacaggcccagaaagtctgccccaggccaccaccattgcaatcc

SEQ ID NO: 104717 - DNA, 1073 bp, Homo sapiens
cagcggagatctggggagatggtccctgcaaatccctcttttccttccctcctgctgaggggaacccctctcccccatgtttgccacgcagcccccatcagacgccctgtgctgccatccacatgccccagggcctctcccagccctgggctccacactgccattgatccacagccaccaaggccctcgggctctttcccatgcgagcccctgaagctgtgaggggggagggagatctgattccaggttctaggggctgccctctcatccccagcctgtctcctggaacctgcattctcatctccaaaacccactcaggttcctgggctctttgagtgagagagggtctcacagcagccgtggagggtgtggcctggcccctgcaggctgacggtactctttatgtttgggagcgaggcctgggctggggaggctggagccatcacctccctggggccggaaagactgcctttgacaggacaagggctgccttggctgtgtggccctgggttcacaggacacggagacctttctttctgtcccccacccgactacgcgctgatgagaaccagccatgtctgaggaccagaggtctctcctgaaataattaccctctaattaggcatggcattagctgttggtggggcttcctggaacactctcactgactccactgtgatgctgtgaaggggcggccttgcccccactgtgcaggtaggaaaccaaggctcagagaagttggggttccaactcaagtgttggactctagcccataatgttactgtcactcctgtcatgacaacattagggtggtagatgcctgacggagctgtacagagcattcgggaccagagggcaggggcagtgcgaaaaactgcatcttccttcatgtggttgggtggcctgagaagccccctgtacgctgactgctgcccgactcctcgtgccgtctgcccatctctccagcagctgctgacacatagggagatgctcaatgttggatcagtcagcaaagctctaaaaatagcctcccgctttgaaaagttcattgttcgagtcctatatttttctat

SEQ ID NO: 104718 - DNA, 1024 bp, Homo sapiens
gtggcagcagtctggacatgggggtcatgttattcatatcccacacacacccgcggccctcatagtccatcagctgtcccacctggtattacaattgcttcttacccttgtggtaccagcatcctcatattgcaggagagcaaatcgaggctgagcattcagtcttgtcagtactaaagctctgtggtttattgagtgcctgctatgtaccagtccctgctctaggcaccagagacacagcagtgaacaaaacatggagtctttgtcctcatggaaccagcagtctagtggggaacaagaaaccattagcgtgctctcctggctgcacctcccgcctccctctgagctgaaagtaactggggaggggtttctgcccctccattaggaccattccagttgacatgtccaggccacctctcttgcatacttctcagtcccacatcccttctcattagaagtccctccgggcatctcatctcaatcttccagcttcagggaagcctgcttggatccttctgtggtctgggttggtgatgaacagctgctcccccagtctcagaacatgaggcagaggtcttggaggttgagaagcctcgctcaggtgtagcccatagttcacgcatcagcctcagagcaggtggatcccatttgctctggagcacctggtatgtggttccatgggaagcttgggggaggggtagaggaaatcaacccagtccttggcctgtggaggcagagctagatgctccttgggctggctcccaggggccagagccctttaagctggccgtctccccctctctaaacccggatgggatgcagcacggtccagaaacctcaggggaccccccttagtctgtaacgggcccaagataaccactcccaagtccagccatgccaccatgcaccactctacaaataacaggcttctttccaagagcgtgtgtggcactttgctgtttgagccttgtgaaacacaggactcttcttatcctcgtttttttaagggtacacacactaagag

SEQ ID NO: 104719 - DNA, 1029 bp, Homo sapiens
gcttggctggcctggggctcggacttggggccggagccgcgggagccggcggacgctggaccaggagccccgacgtgatcgcgtggcgggtggtcgggtctccgggtggccgggtgtcggccccgggatccggcggctcgctggcgggagtcggcggcctctgctgggcctgggtcccggctcccggcccggcccgctcccactgcggccgccatgtggtgcctgcactgcaactcggagaggacccagtcccttctggagctagagcttgacagcgggtgagggcgcggcgcggggcgagcggccttcccgggtgctgagcggtgggctggcgcaggctgtggggatgcctgtgcgggagtgcgggtgaccgtcgggaccgggcgcccggcgtgcgagagaaagctgcctgcggggcggggtgcgtccgccagactgtgggtttgggtgagagaagagcaaacaggacccgagtttgtgcgtgggagagagagacgcgcccttgggacaggagcgctgtgtgtgccctgggagggtctcaggatgggagtgtgtgtgtgtgatcgagggcctgttggagtgcaagttggtgtgggggtgagtttgagtttgggggcttgagagggaaacagtgggactcggtgtgggtgtgaggtgaggggcaggagggagagcggagagttggtgggagggtgcccagcgggtctgtgcctgtttccaactgcaggcagggccggagctgccaggaaggcctcttgcaggcctgtctattccagacattgggcctatgtctggattgatgtgtctgtcctgtctgcaagaccccaagtgtgtgtgagggtggatgaccctgaacaaacaggcgtcccaggtgtgtcagcagcttctgtcgggtactctgcccctggcagggccacttgggggtgcactggggtgtgtggctgctgtttgtggcagagtgtggatgtgaggggctttgtgtggtgatgcgtgtgcacctggtgtggtcagggatggagtctggtgtgt

SEQ ID NO: 104720 - DNA, 1065 bp, Homo sapiens
ccccactttgaggctgaagatgctgaggccctgggaagcagagtaactgtgtgaggtcacatagcggggctgggatatctgctgggcctgctgcccacaggcctgcctcttctatctggggcacagagagtggacacgggggacagagctcaggggcgacagctgcaagggcctggagccctgttccaggagctgtgccccagggggccaagcccacccagcataagtgtcctccctccctgagggtgctgctgtggctccctgcgccacctaccagggaaggtgggatgagtatgaagggctgaagtgggggcatttttgatcgtcagctggggctggcaggcacctaaatgggaagggtgatagcagtgtgttggggggagtttagggaacggtcctctaccgatagaggcagcagctcagtggaatttcctcctgaagttgtcttgccccttgaatcctgcaggaaggctggcaaatggccatttcccttccacttgaatagagacccataactcaagtagctgcccttaagacaccacaggactgttcttcgcgggccctgcccctggatttgggagaggcagtccagctcacccaactaggctctgcagggggaccaggagggatgggttgtgtccacaggagcagccagactgatgagggatgcggcaagcatattctcaccaccttctttcacgtttacaacagaccagcattccctgtgtggcaggggttacattggtcaccgaggacctagaatcatggagtgctctggggatccgggcttggagggcttcttggaggaggtgaccattcctggctgttttgtgtgctaaagaaaaccctcaccaaccactgagcacccatcatgtgccaggctcctcagagccctggcagagccacctgtacccgtgctgggtttcatttctccttgcgggggacactgtggcctagctgcagtggttctttattgcagcccttccctcagggtctttcccatgcatcctcagcaggtgagtccgtttgtcaactaatggcaccataacagctgcgtctaatttt

SEQ ID NO: 104721 - DNA, 1058 bp, Homo sapiens
gctctattgcccaggttggagtgcactggtgcaatctctgcttactgcaacctccacctccagggttcaagtgattctcctgcctcagcctcccgagtagctgggagtacaggcacccgccccacgcccggctaatttttgtagttttttttattttagtagagacggggtttcaccgtattggccaggctggtctcgaactcctgaccatgtgatccgcccgcctcagtctcccaaagtgctgggattacaggtgtgagccaccgcgcccggccctgtgcaaagattcttaaactgctgcaggtattacagtcatctggggggtgggaatttgcatttcaaatgattcccagctgaggctgctgctgctgctgtttctaggaccccactttgaggacaactgttggagtgcaaggaacacaggctgagtgtcagcctactgggctctaatcccagcttcatcacatgggctgtgtgtcttagtgcaaattacttaccttctctaggcttcaaggcctctgtgataaatcagaaaacaatccgcaccttgtagaatttctgtcaggattatgtgaactcatgcaggaatgtagttgacgccaattgtgaattactttcactccccttacccaaccgagtttcctgagggcagggcccacatctgcagcctctgagatgcctagtgcctaacacatagtaggtgggaaggtatgctgggaagttattgagcacattcaggaatgcacacattctcaatgacagatttattcaaacagtgaatcacacgtcacacatgtcctgcctccattaattctcaatcagtggagttgggtcaggtcttccttccactgggacaaaagaaggtgttgtttaaatcagtaacataaagatgactgcaaaaagggatgtttaactcacttaggagacgctgttgatttaggagcacttaatggcatccatttacaaaacaggtgaacccagcacttattataaatgaacgtatctattcattacagcagaggccctgcattcccttggtagctgttctttggtgtgaa

SEQ ID NO: 104722 - DNA, 1090 bp, Homo sapiens
ctggaggtgagtcatttaacccctctgtgcctctgtttcctatggactaagagggcccacttgaaggggtggtgggagcattacaggagataacagaggtgcagccccttacacctgccctgtgcagaaggtgctcctgggcccaagcgcctctccttctctctgcacagctcaggaggcacacagtggggcagcagccaagtcttgttcccaggaagagtggaacaggacgtggaggcctccagctgcatgcccctggcaccaggctgccttcccccacctcaggtagtcgggaaatcatttctcgcttgagtatgctgtttcttgttgcgcaaaatggattcttagatccttgttacccaccaagcagggtttcaggaagtatgagatccaggccgcgaaacgattccgggtgaggcacaggctcagctcttggtgacatggagcataccacctggaacatgagagagagttctccttccggtgctctttccgcccttctgatgacatcagacaggagggtcggcatgctgacagacctttaatgtctctttatcacccacaaaggcttaatgcaatgtattgattatatagggagtaatacagtcatggttcaacagttaaacatacagaagggtacacagtgagctatgcgccacgcccttccacgtcccattcccctccccagagacaaccgctgtccagggacatcttagagtgtgtgtgtgcgcgtgctgcgtgcatgtgtccgccttttttgtaacccaaatccagcattcttcagcttacctttttcatgtagcactatgtcttgtatctcagtccctatcaggatataaaaagcatgcttctgttttattggcggcgtcctgtcatgtggattctctgtgcttgctaatctgtgttgtaaacaaaacacagcaggcctcagggatggggctgataacaggatcaaagcaggagtttataacagcattttgtttttgttgatttattttcatgggaaaattcaatttatgcttagtgaggctggcttttcacttgtggagcagatataaagttttcttgatagaatgaagagcgttaagta

SEQ ID NO: 104723 - DNA, 1021 bp, Homo sapiens
ccgcggctatgcagacggcttatcccgaagccttgcgaacgctaaaggcgcgatattgggggtcggggaggggcggggtgctccatctcttcatcagtgcagttggttgcctccccgaagcgggggtacgtgaatccagaccccgagggtcgccatgcaaagcattccccaccccccgactccgcactaccctgcttctcttccccacccccaccccgcctccaccaccgctgctgcctccgggcggagaaatcccgccaccgcgtccagggtcccgagcctgcgagcgggaggttgaggcatctcaggaattcgctgggagccacacggacgcgccttgggagggagggagaagctttggcagggctggagggctgggtccaacctggccctgtccctgcctcccaaccccgtgtgaccttgggcagcccctcctgccattaccacgtggggaagagactggttctcagtcttggggtggagggagctctcccggtagacctccaggagagttggcttagggagcagtcttggggaccagaacagccttggcgacctctggaccctgacccatagggggcaggtggcagcagggggatgaggtgtaatgggggctgttgttggaaacctgtcccacctgccagcctgaggatgagacactcctgggccagggtcttagagtgtgggacccccgcccccaccgcaacctcccgctacaaaaccacctgcccttgggctctaagcaggcagggtgggttggcagaggtgagtcaagcttctccccacccctaatagtcctggggaacttcccctcccatgtttctgccaggcagttgtcactttaaattgccaagctctcaactgtcacagctgatctgttcctggagcaaagggagcagaaaggtgacagtgggtgtcccctccccctggccttgtccaggagatgaggctcacaaggacagcagtcggctctgcctggtcagctttgtgagtgttgctctgagcatgcccagtgatctgt

SEQ ID NO: 104724 - DNA, 1054 bp, Homo sapiens
actgtggctggcccgatgctgggtttttggtgggaggtgaattagcctccccccttgataatgcttccctccatccctgcagcccctcacctggacagcccccagccaccctccctcccacctactcttgctgattccgttctgagctttgctggtggaaagtggccctgcatagatgccctgtccctgctctgggcctttcgaagcctgtgggccccagcggtcaaaagctctttgctgtgtggagacagtttgacttccttataatccaaggagagggaggagggaggcggggagagtgcacagaggtgattcagacacaaatccctgccctccaaggctccagatctggtgggaggctggggcctgggtgtagctgaggggtttccacatcggcttccccctcctgcagagcgctcccccggcccccagctgcatctcaacacctgagggcagggatttgatcatctctgcttcacagctgattacccttgcacatgatggcacccaggaaatatttgttgggtaaatgactgaatgaatgcaagctatggcatatacagacacatgctctcaccctaccctctggctgtgtctttgtcttctctttggggtgcaacagacatgatgagcaggggcaccctctctaggaactctgttcacaactagctcagggctttttctccattcagggtctatagatttattcaaggtcccaacaataattttttaaatgtgtggattctttaagagttgtaagttattttgaagtgatttcaatcttaaagaagagttacaacaataatacaaaacaaaattctcccgtgtaccattcacccagactcatcactaataacattccaccaaattttgctttctcttaaaaaccgatttttcccttagaagcatttgagatgtcactgcaaacatgccatatgtaactttcacccctaaatactgctccagtacataattactaagaacaaggacattctcttacataaccatggtccattagtcaaattcaggaagtttaacatggacatgatactag

SEQ ID NO: 104725 - DNA, 1045 bp, Homo sapiens
agtttttatctggaggagttccccaaaggcttcctggaggaggtggcagatgagctagattttaggagcaatggaggaggtagcctggcaaatggcaactgagggagcaggggcctagggtcgggttcaggactcatacacagtggagctgacctggctgtgctaggttcttggaagtcctggctgaactcagagaactggttcttgggccatgccgggggtgcaggcaagtaagcctgcatgtgggtgaaaggtagccccagcagcaaggctgtaaggaaaagagggaatgagcacttagtgtacacctaccgtgtgccacaccccctccatatgttgcctcattctggccactccgcagcctctggtggtgcctcatgcccactttgcagaggatgagccacaggttctgatcaggtgctggaacaaaccacccttcttaagtgagtcccccacgaacttagaatttgagactcactcattggccaggctcaatggcctctgttctgctatcaagaggctgctgggatgttacccatggcagggatagatggggaagtcaccatattcaaaacaatcatgtgttgaaacacctccccagcttctgatctaccggtagtggcagcggaagcaaatacagcaaatctgaaacccgatgcctacagaacaggggtgtgaaatgtgacgccagaggcccccacacagaagtgggtgtggacagccacctgcctgtgagcaaccaggggaagctagcttggtgccgagtttacacagtgaatgttaaaaagacttcgaagctggccccagtgtattcgcacacagttgagaaaggccagggaggataacaagggctagaatatagggtcagctccctacagttgctgtaaccccctgggcagctccctttacttctctgagcttcagtgacctcctctgtaagtgaggataacatttcccagagtgaggattaaataacattatgcatggacctgcccatagacaatgacctagcaatggctcagtgagtgtcagtgatgattatccc

SEQ ID NO: 104726 - DNA, 1082 bp, Homo sapiens
tctctgggcactcacctctgggcccctggcagacaaaggccttgctctgggtacagggcagtgccctgataaatccacagcccctctcaggtcaggcaggaagatcacttttgcatctggcattatattgaaaaagaaagatcgttttgtgccttgagagccaatggggcgtttgagcctcttcgtgggccagggcagctcacttggaacacatggggcccagggtgctggttgataaggagtggggtggccttggctgccctggccctgcccccctctgccttcccaccgtggctgcatctgggcaggagggccgtgaacagctcagctggcagccagcctttgagagcttccagggagcttcctggacaattagccatctgatgcccctctgcaggagggccagtgggcgttcctcttgggacagagtgctcaccacctcccagcctgggccatgcctaggcagctctgacgcgaggacatttgttcccacttggaactggcaccatccttcctgcggtgctcgctgccacccacccacacactgaagtggcctggccctgtcctctgagcctcacaacccatctgctccccagctctggacagcctgcagagaccaggactccctgaggctgaggaaggggtcaccagcctcctccccacccacgccttctggacacaccctggctcgtgctgtctatctccgggaagagcccagagctgagtttgggatgggcaggaggtcctgggcagagcagagcagagccgccacttctctggctctgggcactgcctggagcacacataaattcccttatggctgctttcccctttcacccgtgggcctcaccattgcctcagccctgccagcctcacctccctctcctcggttcccatctctgctagtgactgccgccccctctccctgcatcgagtcttcgttcaggggatgaagacctactctgtgcctgacactgtgccaggtgctaactatccattcccacatccagccagctagcgcccaccctgtgaggagcactgtcccacagcacagaggaggacctgagtccaaggctttgcgt

SEQ ID NO: 104727 - DNA, 1054 bp, Homo sapiens
ccccccttgacctggacggcaagacccagggagtcaggatacaggggctaaagaattgaggcctctcagcacaacaaaatggagattgaagggagcagctttcttctttgtctaaggaagggggtagtgaataggcacagcctgcaacaaaaaggatttaggttagacattgagaaagacttccaagccagccgaggagagccgtgttatgtagcggttatgaagcatgtctcagaacaaagctgcttcagttcaattccccaccctgccatgttctatctgtattaaccctgggcgtgtctgtggacctctctctgccttcctttctttatcctatagatcagatagtaatagcacctacctcatgggatgagcctaagcattaaatgaattagtcacacatagagcagtggctacaggaaccattcagtagcccttaggtatcaccgttcttgttgtgttgatggagagctgtgtcaccctggaagttttaaagacggccatagccagaaactttcaaggctagaggcttagaagggcagttgctatatattcgtgatcttctatatagctttacacagtacagtcacacagcgttagctccttccatttgtttcatcttcacaacccctggagatagatcctatttttctccccatgttgtggatgaagaaactgaggtaggccagaaggtgtgaggaacggcttgtgaggatcccttggccagcgcaggtctcagaatcaggacttctgatccggagtcccagatctgcggcttccttactgtgtgacctcagggcaagtcgcctccacctctgagactccattctccatctccaacactgaagaatgaggccagagcctccggtgcctatgttgtctgatttccttgcatagaagatctgagcacaaaccctgatggtcaaacccagtaccatctgccctccccatggctgaaaggaaacgtgtcagaaccctcagaagggacaacccatggggactggctgtcactttgactgattgctaatgtgagtccttccatctggggtgtcat

SEQ ID NO: 104728 - DNA, 1062 bp, Homo sapiens
gagacccctgactaatatgccgtgtgaagacacagggagaacacagccacatacaagccaagaagagaggcctcaggagaaatgcgcctcgctctgacttccagcctccagaactgtgaggaaactcatttctgttgtttaagcctcttggtctgtggtgttttgttacggaagcctctgcaaatcaatacagggcctctctgtcttgatctgtgaagtgggtacgaggacctgtcctcgggctcgtcaggagacgctgtctgggcgtgtattctgtgccctcagaagagcttatgtgcctggtgtttggtggtcagggctgggattagggtgagacaagtgaggtgttcacctcgagcacagaatttaaggggtgccaaaaactcaataatcaagtaaacaaaatattgaattttaaaataaacacaggctgttgtttgtcttgcaacaccacgtgagtattgtaaagcgagaggtcatttccaaaggcactgcagtttccaggccccgaggccctcgtgtgccctgcagagctgctttatgagggttgacggggacatgtgaacagatcgaccaatgtggggctttatatataatgttttaaaaaatatttttaaggcctgtaatcccagcactttgggaggccgaggcaggcggatcacgaggtcaggagattgagaccatcctggctaacacggtgaaaccccgtctctattaaaaatacaaaaaaattagctgggtgtggtggcgggcgcctgtagtcccagctactcgggaggctgaggcaggagaatggcgtgaacctgcgaggtggagcttgcagtgagccaagattgcgccactgcactccagcctgggcgacagagcgagactccatctcaaaaaaaaaaaaaaaatgtttaaagctttattagttttttctacttggttcaaaatatggggggctattttggtgttttaggggtgcacacttgtccttccgtgtcaggatccaacctggctccgtgcagtgcagttgctggccctgggctggcccatccgcatcctgcaggttcggcctgc

SEQ ID NO: 104729 - DNA, 1031 bp, Homo sapiens
gggagcttccactcatggtggaaggtgaaggaagagaaagggcaggggaggagaggggagcaggagagagagaggagggtcacacacctctaaatgaccggatcttgccagaactcactatcaggaagacagcatcaagcatgagggatccacccgtatgacccaaacaccacccagcaggccccacctccagcattggggatgacatttcaacatgagatttgggtggggacaaatatcacagcctctgggggcaggtgcagtttctttaagcagttttggacccggggagtggcagagcttggatatgagctcaggttacctgatcgagggctctgtctatccacacactcaccacccagattggctggtatttgtatttcaccttatttccttcatctctcttcttttaagaaagaaaaagaagaagaaaaaagagtggtgggagaatgggagggaggaggggggcctcggctgctcatagcttccccaccctcccccaggtggaccgtccttatgtcacagcctccaccttcaccatgcagcattgcgcatgccagtccctcggtaatgcctgtacaccaccccgcgattccccagtgagagtcattctgcccacgctctggccatccccttccatgttggtggttggaggccactggagctgcctctgggagctgtttggacgcatgcatccatggccaggccccaggacgcattgaccatgtgatgcctgaacttgtagaggccacactgtctctgactgatgtcctgtccactgtttaccgcatttgccttcaagacgtttcactcgggggccatgacctgcaggtccccctaccccatctccagcagaggggctgtgtgatccacaggcttctgttttatttgtgagatttacacacattctctcagatgatgcttatctggttgcgacttaccctttttgattcactgatgtgtttttaagttttgtccatgctaagcagacccaaatggcaaacacacaggagcaatgaggttgctgctgg

SEQ ID NO: 104730 - DNA, 1021 bp, Homo sapiens
agcgccacactgcactgccagctctggcgggctggttcccgcacctccagcactgcccaagccctgtcctgccaccaccgcctgctccgggacagaccgtgaaggagggaatgcctactcattagatgactgtgatttaagcaacaaggcagagaaaatgacctgggagcaatgacagagagcagctggagggcctcacctggtggaggtgggggtgggaggtcagggaaggtttctctgtgaaggtgatgattaaaaggacacctgagggtacgtagacagccacaaaaagagctgagaaggcacattccaggcaaagggactagcaggagcaaaggcccctagctgggggtttgcttggcatgtttaaggatgtggaagacagatgatgttataaggattcagtaggcaagggtgaggggtggcagaaaccatgctgtagagttacccaggggcagtggggagctgcgcactgctgcaggcagaagggtggtgctgtctgaattttgcgttaaaaggtccctctggctgctgtgtggactggagaaggaggatggagatcccttaggaggcctccctgatgccctggccaaacatgacggtggccaggccaggatggtggcacggaggtggtgagggcgggtggatatggatcggggacctaccctcaccataatgctgaacgactgctggcaggtgctgtgtggggctgaaggcagccactgggaggagggcatggcccatgactgagccaggacagtctgggggggatccaggagctcccatgggacgtttgcccaagagcatcgctggtcttgggtctgatgggcggggcccccgagccaagtacaccacgaataatgacagtcccgccagtgccctttcttgagctcttaacatgtggcagccttgcctagccaccacagcatggatgtctcttcaatttgcactttgcaatccagtgtgtgtggaagggggcagtgccattaacatccccacatcacggatgaacagctactct

SEQ ID NO: 104731 - DNA, 1063 bp, Homo sapiens
tccatcctggcccaggaggatgagggcagcccccctgggatgacagggccatgagggagaagagctccctggccctgccccaccaggccagccctggaccatctgctttcacactgaaatgccagagacacaaatttctatttaccactctcaggtggggctctttgtctcagcagctgagccctgtcttacgcagtacagcagtcttggagggcactttcccacgtacttgcctggggtcaggctgtgccagggaccacaactgtgtgattttcagccctcccgccgtgggtgagagccacactcagctcccacccactgtcctctccaggtgcttgtgaggagatcgaatgcatgaaggtggagactcccactaaaaacatcaggagccaatatcttccagggcaccccttgttcctcctcctgaactcctgctgccccgactcttccccatgcaggcgcttgtttggaaatgtggtgtgctgtctccttcctggctggtgtctgcagattctaataaataacttgggaacaggccacctcacgcatggtccaacctgcttattgctagaaagatgggtttggaactgacaagttccctgctaagctgacaagtttaaaaacttaattcgaaaaaccaaccacattccctttgcagaatgaaggcaaagatcaggacatggtcaagcctcagcctgaacgctcactgtgaggagacagatttaggacttcccaggtgtctgatcttgtccgtataatttcttagatgccttccagcctatgcagcctgcagttttggagaaaaggaactctaatatgtattaaaatattaaacttcttgaccctgttgggaaaaagtgcatagtccatttgttcctcatttttcactcgtgtctctaaagtgtctcatcattcagggctggtctagaggttgtgtattaagagaaaatttgaggtgtaatagggcactgcaggtcggattcttctccctcctcccactctccctctagaaccagggtctggcaggaccgttcccgggagcctagggactgtttgtcaccct

SEQ ID NO: 104732 - DNA, 1094 bp, Homo sapiens
ctacaggcgcacaccaccacgcttggctaatttttgtatttttagtagagacagggttttgtcatgatgcccaggctgaacttgaactcctgggctcaagtgatctgcctgtctcggactcctaaagtgctgggattaccacgcccagccctgaccttagaagcatattgcatgaggtggtcccatgtaggtcgcctccccgtcaggactctgaacgttgactggcattttccaaaggcaacagcaaggctcagggctgggacaatgaggagagcccaaggactgttttgtttggggatggtgggggagattctggagacggtgggcctggttaccagcattgactcagctggaaccaagatgtgtgagtaaacgtaattagtccaaacaaatccagttttctgtctccataccaaggcaaagcagcctttgtaattaactgggcctttttccccaaacccaaaatgagaacacacagtttattttgttcacaaggaggtatgaaaactgctgaacgtggcagacaaagctgggagtgtttgctgtgccaggtagacagagctgaactctttctctccaggaaggaatgggagcaggctccaaatgtgagagacgggctggggctgggccgggtccctctgccgctatccagccatgttttggaggtgctggactgagggctgagccggcggcctctggaggcgagtggacatttcttagcacggtggaatcaaaagagtacagacactgggggcagataatcttgaattcaaatcctttctctttgtcttaccctcatgtcactatgcaacagcccctgagctctccaagcctcagatttcacactcatttaacagtcttcattgagcacctactgtgtctttgtgctaactactaagggtgtgaagaccaatgagatacagttaatttctgccccatgatgaaatcggagcaaagactttagcctcaaggccatggaccaattaaatgaggcatagatggaacagcacatgccatgtcatagcattcagttaacatccatttcctttcttctccctctgccacagtctgtggagacgcggctgctcagaatc

SEQ ID NO: 104733 - DNA, 1007 bp, Homo sapiens
tgcgtgcccttaacagcgctgggccttttccgcccaggaatcccgggcgatctccccgaagctccggaaggctgagcgcctccgtccccattgcagagatggggcagctgaggcgcagcgtgagccgctctcgctagcggtgggcggccccggcctccatcttctaggctgggagccaaggttaagagcagctcctgccttgctggaccgtgggagggggaagtgcgacagtgctctgaagaggcttggcgaacctcggccgatgtggggcggtgctctgtcgtacaggtgtgactcttctccgtttctccgtctctcttggctgggatcatcgggggagtcagtgggcaccagcgctcatttgaatccacccccgtcctggcgctggcgcccgcgctgctcactgaggttttcctcgatgacagtcgcacgtggaggcggcgggcgggtgtgaggctgcacgcggggccccagctctccgcagctctccgcagctctccctgggcttggcgtcttccctgcccggtggagagttacccctgcggcccatgaaggtgtagagtgcctgcgtcctcccttctgaaggccggacagccccaccctggagggggttcacagatgggcggggggaaggggagctggggacattctgagcccagttctacctttggctcacttggagacaggccaggggcctagggcaggaaagccgagtcccagcctgggacggggtctgccaggccccacatacccctgcccaagcctccgtctgttcactggcacgctcagggccccgcacgtgttaggtgctcagtaaatgtgaggaaccatgagaggaagcagggagggaaggatgaattcttggacatggggccatgtgactcagtctggctgatgggcaggggctgtcagtctcttccaccagtggttatctgcccatcatttgccagcacagggctccctgacttgctttgagacccaccacgtcctctctgtgcgcgtgtgac

SEQ ID NO: 104734 - DNA, 1151 bp, Homo sapiens
cccccgtcatcacaggtgtgaaagcagaggctggatcctcatttcttcaggctgtgcttacactgttctcctgccctgtgtcttgtccacacagactgcgagctccatgagggtggagatcactcagtcatccgacacacctttactgcacacctactgtgtgtcaggcactgctagccagaggatgcatcagggaacagcatacaaggtctctaccttctagcagactcttgtctctctcaagtgatagtacaggatgatctttccagagggaggcatctggggtctgtgctgctgtgtttatagagtcacagcctcctcgcctcccactcggcctcccggagtcattgactggccatgttcctttcagtccacagtgggccgtgccctccatgtggatggcgtttgtttacaaggcctcagggcctgcctccttccccttctcccctaggagtgtccccatcagggtgggcacagggagaaacacatgactcctgaggctgcctgaagcccactcagctctgtggagttcggcccccgagacactctccttcttaggaaaactcagagcggaggagccccggctgttagtggactccagtggctgtggcatgtgtctgcctgcagtttccacgggcctggctttatctgcgtagattgggataatctagagtagttgctggagctcctggggttaagccgcatggacacgcatcaaccccctccttctgagcactacaggcaattatcccaggggaggggcgggtggcctggcagctggtgcctctgcagtggaggtggcagtgggggcttggagattgcggttcccttccctgggcagcccagggaggtgcaacccctgccagctgcgtgaaacattctcctgcaatgagtgtgcggggctagatgagaagccgaactggagccctgggagggcacccgaggataagggcacgacctaccctgtcccgggcacttggcgttcattctacctcactgggtccccccagcctgggggataccacagccaggccacacagcccaagccacataagtggcatttgatgaagccaggattaaaatcctggtgcgtttgtgtccgaggttgatgttcattcaccaggctgggctgcctccccactaactccctg

SEQ ID NO: 104735 - DNA, 1004 bp, Homo sapiens
ctctacccgtctttgagggcatcatcccctgcacatggtgtctggatgtttaggaatcactaagagaagcagactttggctgtgagggctgagacagagatttggtttggaagccccgggcctggtctgctctggggctcggaggatacttgttctgtgagctccacagcagatcctgcctgaaggtccctggcccttctcaacaggagacgtttgagaaacgggctctcctctcagcccagctgctccccagctatatggcatcagccactgtggaggggctctgagcttatgtgggaattgctgatcataccggcctctctgcccagcccgtgccaggggtggagtgcagtggccatgtcggccttctctgggccccatcaacacatccatgtgtcatccatgctgagaagatttggtaatgccctggtgttttattatctgtgcaactttgcctccctcggccccaggaccaaagaggcgtttatcaagcctctcaaatgtgcagagagctctgtctggctaattgcaattgtgaagctgttcagacttaacatggattttaaacgaaactcttgcagttcttgttctttgcttttctgagggagcctgaggctgcccttcatgatgtctggcatggccagagcctgaaggtgggcgccaaagctccgtgtgctcctggagcaggtactttggttgtaggctgatgatctgtgctaatctagttggcgtgtcctctcgatttcatcaggcagccgtgtggatttctctgtcctctgggcaaggcctctggtcagccattctgagccttggccgctggtttatttggaaaccttttccatcccactggcggaggcttggtttgattttcctccatgctcctgtcttgtgtactgcaggagcctggcacaggggaggggttggtggtaaagagtcaccttctcttcccttgccagatggtgcacaaggagctgcatccccaccacctgcctctcgcctctgca

SEQ ID NO: 104736 - DNA, 1616 bp, Homo sapiens
agccttctagaaccacagttctcaacctgtctgacaaaagacccctttttgttatttcccatccatcacgatcgacaccttggtaagtggatgccagggtgctgaggggctggagctgagtctgggcactgcctcttgctttctgagtttaccctgctgtgggcctgtgccatgggggaccagccagtccccaggctgcccctcagagagcagttcctcagcagccctaaaggaagcagagggtctggggccccacacacgtcgccctttgtgggtcctgagctcattggcacatcgagcactctgaggagtccggtggggaagaaacgtgatcagtttcccaagcctgtttgacctgggagtgctttcaatggcctctaccaccgagcttggcccccagcgtctgctgcgagaggccattctctggttggtgaggatgtggagaaataagaacctctgtggctccattgctggggggaggtaacgtggtgcagccgccgtgggaaacggtgtggtggttcccgaaggagttaaacatacaatacaattcccatatgatccggcaatcccacttctcagtgtagacccaaaagaattgaaagcaaggcctcaaacagatgtgtgcacacccatgttcacaacagcattactcacaatagccaaaggtggaagcaaagaaagtgtccgtgacagatgaacgtggtctgtccctacaatggaatatgattcaccctaaaaaggaagggcgttctgtgctgcgctgcaacagggatgaacctggacgacaggatgctagtgaatgagccggccacaaaaggacaaatactgcatgattccacttctgtgaggtccctggagtagtcacattcacggagacagaaagtggaatggaggtgccaggggctgggggaggggggctgggggttcgtgtttcatggggcagagtttcagttggggaagatgagaaagtcttaatgccactgaagtgtgcgcttaaaatggatgaggtggtaaatgtgtgttatgtatcctttaccataatgaaaaggaaaggggacactcctctgggggttgcagggctgtaggctggggtgtttctcctccctcctgcccctctgctccgcggctaccatctccaggcgggcctggtcatggttgaggaaactggctcattttcggagcacactaaatttccagatcaggccctggagtcctttatgaatctagtttgggaggctggctttccagatcgctgactgcaggggagttcccggttttgtggcagatgccaatgccggaggcagctccctgccgaggaggcccggcctctgtgatacagtcatggagccacacgctgccccattggagggatggaagccccacttgggcaggagacggagagccgccgtgggctccaggcgtctgttcctggggccctgggagacctgcagtgtctgagcttgttaggcccctgggtttgccttgggagggcctccttggccaggcggcctggggtgggcgggcaggggcttggccgcaggcagttggggtgggagtccacaggtgggggccctctacttggccttgcctggaaggcccttcctgtgccccctgag

SEQ ID NO: 104737 - DNA, 1067 bp, Homo sapiens
gttccgtctgtgaaaatgtgtttcacagctgcttcctacggcctcagaggctctgggaggttagcgtgtgagagagaggggtccaggggccagtgggtccccctcccggggctatccccctctgggatgagcccagctggcaaggacctgccagccctgtttctgaaacacggaagcccgggaactgggctagaatgtgctggggttggtctgtcctgaaaccagcagatgcatcctcatttgtcatgaacggtggggacattcgggactcatcctgacacctctcctattcagaagaggaagacaaaccaccaagcactcattggcctggaaaccagtccccgagggagaggctgtgacttcaagggctgggcaaggtggctttgggtgaagcgtctaagctgaagctgccagcatcctggttaaaggacgtcacagcggacacacctgctcccaggcgtagaaaatggagaaggaaaattgctccagggcagcctgtggtctggtggacagagcccagctcaggtagaacagcaggggatttccaggtcgtccttcgaaagcttccaacttgacatattttgttaaaagctgctttcgcctgcttgtgtctggcctgtttgcataacaaggtcccggaattcagcattttccaaactcagatgtttttagggtcatgaactaaaatatttcattatcagttcaatcgtgggaattctgggtttctttactgcgggacttctcagagcctgcagtgggcccgtggacatgaggcgttgacaaggtgaaattggactgtgcggcacattctggtgtcttcagaccatcaagtgcctggtttggagacgtgatcacacggtgggcccacctgtgcactgccaaacagaaactgggacatgctgctgaagttgatcacttaggagaaggaagaagacttctgtttttttccaagaactacgttaacaaatgactgtagtccagtgtggagggcgccccttggatctggtactccaaatcaatgaacgtgaagtccacccatatccaaagtgtgtcggatttatcatctc

SEQ ID NO: 104738 - DNA, 1061 bp, Homo sapiens
tgcagcctcgatttcctgcgctcaagtgatcctcccacctcagcctcctgagtggctgggactacaggcacataccaccatgtccggctaatttttttaaaataattttctagagatgggatctcactatgttgcccaggctggtctggaactcctaggctccagtgatcctcccatctcggccttccaaagtgggaggattacaagtgtgagccatcacacctggccctgagttctagattttttaaaaggttttttgttgttgttgttgctgtttgttaatagtctttacttttagagcactttaggtttacagaaaaattgagcagtaagtacagtgagttcccatgctcctgccgtccctgttccctccattattatcttgcattagtgtggcacatctgccgcaatggatgaacccactttgacacatcattattacccatagttcatggttcaccacgggcttgttctgccattgtggcatcacacagagcagtgtttctgcccccgccccccgcaaaatcctctgtgctctgcctgttcatccctctctccctccaggtcaccttctttcacttagtcatatgcattgaagcttcctccatggctttttatggttgatagcacatttctttttagcactgaataatattccattgtctggatgtagcacagtttatccattcacctgctgagggacatcttggttgtgtctaagttttgacagtcatgaatgaagctgctataaacacccatgtgtaggtttttgtgtggacatacattttcagctcccttaagtaaacagcaaggagtgtgattgctgggccgtgtggcaggggcgtatgtagttttgtaagaagctgccaaactgtcttccaaagtggctgtgccgtttttaattcctgggcttctagattttggacccctttaaggggctccgggttcagaggatttcacaggctgtagtgccccaccccatttctcagaccagctgcagggtgcggagccctacccaaactgagtggtctcaagtgagctcaaacgaggaagatgtcccg

SEQ ID NO: 104739 - DNA, 1032 bp, Homo sapiens
ggttgcaactttccttccctccaccctcttcccttcctcctccacgctttcacctctcttttctgtctccctcactctcttttctcatcctccttccccctcttcctccagccctgcaaggcactgtcctccaggcgtggtgagccaaggctgcttcctgagatccagctcctggttttgcctctggcaggcacaacttttgctagaacaatgtgattccttgcagaagtctgcctgccagcacgactgttctaattagtcatattttgaaagcagatctgcttaattgcaagcagaactaaatattggtatataaataaagtcattaataactgtatatggtagaaacttctcccgctgagcgccacaacaagcaagccccgttgaccttttcttgggtggcattggctgcatggcttgcatccccttgtggcatctgtggatgaccagaggtggaagcaggtggaggtaagcattggaggctcccacgggagggcaggaagaaaggaggtttgtgggagaccccatggacccaaggagatggttgtggagctgctggttttgaatggcaacgaacagcctagtgggtcttctgcaatcatcaagttaatgaacacttagtgaaaacagttatggcttaaacactgcatccatcagcccgcctcgaaggccttggggagtcggctgtatttccctgattcggaggttgggcttctggaaatgaggacgtggccggcgatgacagtgctatctcacccgccactgttttgatggggtgcaggggagaatatggcactgggcttagtgcaggccagcagtcagttcccctgacgctgctcacaggcttggtgacctcgggctgtgccttggtttctgcacttagagaatacagatgataacatctgtgcagtgcattgtgggcttcttcattcattagaacacccatcaactatttacagagcacttcctcttgtccaggtcctgctccagtggaaactgtcccgtcccagggcctgcatggcagagggtggt

SEQ ID NO: 104740 - DNA, 1053 bp, Homo sapiens
ggtaccagggtgagggaggcttcaggagatgctgcagagctgggtgctgggatcctgggcagaggctgctgggatgggcaggagcacgtgggctggggctgaaggcacacggccccaccctctcttttcccccaacaatcgccagttcagatgggaaggagagagaggagtggaaccaaaggagtggctccagatgggaggggccgtgcccatcttggctgcctgcagcagttcttggaatggggagttcttgaaacggggagttcttgaaacagggagtgaggtggttggcgacacccctggactctgcctctggcttcccacacccaggccactcccctctttcaccttgagggaggagcagcccaagcagagatgttcacttcccttgggctggccaggacttctagatggcttgggtgaggctcccggtggagtatttgggcagcacggtggccaggagccaggacacagactctggggccaggccagcagcctgaatcccagctccctccacatgcaccacctgtctttgtcttctctggcctgtggctgagcctctctgtgcttcagcttcctcacctgtaaaatggggttataaaacctccctgctagaggagtggcaaggattacatccttgatgtatgtaactgtgcacagagccacttgtatcattattgtttcttctttctctgttgagaaggaaagtgattttagaaagtcatggaatttagaatcaggtgacttgggtttcagcacatgtctcttatctacccacttctctgcatagttaatgctgctgattttgaatccaaccctttgtacgatgtgttatctcaatccctttaacgctgcagcctcttcacatgttttaaagttgtggagtcttaattttattaaattgaattagggcctccccgacaaaaaaggaggagcctggaaagttccatccccctcccacagcccatgacatgctcacatctctgtctttactttctgtgaggctttactcttacccagctcagcagttgccggacatcgagatgtgtaaaa

SEQ ID NO: 104741 - DNA, 1002 bp, Homo sapiens
cctagcttgaatcctgattttgaagtgttcagctttccctcttggatgaggcgagatccacaaaggaacgggttagagactgtcgttctgcacctgaacttagaatgtgttgattgtagtgaggccacagcaataaccgagcccgttctaggtgctgcctgctgggcacattcttctccatgtctctgttgatgctctaaccctgtgacaagtgtgaactgtcctcatcccatttcgcatatatgaaacctgaggctcaaagaagttaagtggtttgcccacagtcacccagtggcagcggcgggattcacacccaggtctgtctgcctccagggctggtgcagttcaccaccacgctgggctgcttcagaactgttcattgcattgtgtagatgttttggaaacattgggggccgtttccaaatgtggcatggtcccttccccagatttttggcttcaggagccagaatgaatgtagctttgtcacccacctggagacagcccaagttccttctctgcaaagcagctgacagtggttgcacccagctggcagggctgctatgggcagtgggtgccagtgtgcttggggagggccctctaagccatgcagcacacccagcagccagtgccgggtgttcctctctgagttggtctgacctccccactccgctgagatgaacacttgctgagctcccagaaagttgctgttcacgtcttcattcatgcaggacacacttgggacatgtggtcgcaggggagggttgggatgggggcccctcttctggctttgccccagcttttgctggaagcacctgtggtggtttagctgtcctttgctctgcataccacttgcatgaagagcgtcacacccgtggagaaccaaggggcctgagcccgccccctccgtgggaaccgcaggagcacagcttgccaagggcagaagacagggcctgcccagagggtgtcctgggaccggtagggcaggagggtccttgcaagtca

SEQ ID NO: 104742 - DNA, 1377 bp, Homo sapiens
ggatgcctgtggttactttgattatttggctatgcttttaccctgacatcagaattcatatccaatgtctggttggctacatgctagtgatctgtttctagaattgctctctgctcactagaggttcagacgcataataggcactcagtaaagatttgttgagtggatgaagccagagggattgattcaggccattgcattttcctttagaaagtcagttgaacttcagcaggcccagctgggattgaaaatcacccagacccaaatcccagggagcaggggtggggccgatggctgcatccaccgggggcttcctgtgtgcctgccctgcttacggtctatgccttggtcaggtcatctccttgtctcatcactcctacgaggcaggtgcagctgctgctcccattttatagatgtggaacctgaggctcagaaatcatggccttgcccaagctctcccatctggctacggggtggagccaggatttgtactcagatggtctggcttggcctccctgctcttccctgtccccccccaccctgcccctcaccaagacggagtcttgctctgtcatccagagctggagtgcaatgatgtgatctcggctcactgaaagttccgcctcccaggttcaagcaattctcctgcctcagcctcctgagtagctgggattacaggcgtgcaccaccacgcctggctaatttttgtatttttggtagagacggggtttcaccatgttggtcaggctgctctgaaactcctgacctcaggtgatccacctgccttggcctcccaaagtgctgggattacaggcgtgagccaccacacccagcctccccccagctcctatccacccaccacctgcccttcatgctgtcgaatggccagaccatctcccaggatcccagtgactcctggcctctcaagctggagaaagcccagatgggaggtttccaccctgccgtgtgcaatcttgtcaccaaggcagggctcacggtgtcacgtggggtggcagtgtagagggggcaaggatttaatgagatgattccttccagcctttgatcttccaaagttccttggcaaaaggaaacatcgcctaaggaggctgggggtgggggggggaagcccagtggagtggcctgcctcgctttctggtcccctccagcccttaagtgctgtcatatcactgggagaggacgtttttctgaagctctgagttggtgactcactccgggggaggttttcagtggcattcagactctgttgatttaccaaaccagtattcttgccgggttcatggtgacattaaccgtacggcggcacgtcagttcagaggcaagctcaggggtggccactgatgagggggcagcagcgga

SEQ ID NO: 104743 - DNA, 1381 bp, Homo sapiens
cctgctttcatgggaagcagtgacacgttggtcagcacatgcctcacaacaccaccctggggaatggcttcctttttcccttcagcgtcacccctggtgaccacgcaggggacaggaggatgctgagagggagcacgtcgtccttccgtggggcatccccctgggttgcatccaggcagccgccttggccgggaagccgggatgggaaggctgggattttgtttcagaagtccctggttctgtgtccacctggcttccccttagtggagacacagccaaggcctgtgagggagagcattgcctttagggaaagcagagtggcagcacagtcctcagcccacggtctaggtcaagcacagcttccaaacttgaatgtgtacaccaggagtctgggaatcttgctacaatgcagatgctgagccagtgggtctggggtgggctggagtctgcatctctagccagctcctaggacacccgctgctgctgggcccggaccccagggtgagcagtgaggctgtggggagtcttggtgtgagcaggagctgtgggtgggttcccttcaagatggagcagccggacccatttttgtgcatctgattcactccctagtcttttgggaaggagaatgctggagtctcctcccctcacaggagactcacagggacgggggcatcacatggcctgctcacatgcgtggggttctgggcccccccggggctgctcagcaaaccatggattggatgtatcccactgcccatctgcagagcaaggtgatttatgcctaaggaacatgggataaccaatccccttgaggacttttattaagcacctgctgtatgcagactcattatcaatgtgcttggaaacataagaggaagaatggagaggaagagaataagcaactctgtgtagagagagcaacatgagtggacaaactagggtcctaggcccagccctgcacttcccagccggtgaccatgggacaagtcatactacccctcgtagcctcaggttttctgaaatgcacgcaaagcaggaatgatcatagctgcctcccatacttttttgagaattaagcaaagatgggcatggaggaaactggtatacagtaagtgcttaatgcaggtcagattcttccattgtccacctgtttgtcatttcttttgggccaactgagcacaggcagggggtgagacctttggagccaggggcaggaggcatggagagggaaatggggtaccgtgagaagggctgcccagaggctaggtgggggttgagcatgggtttcccaaggtgacagggccatgcaaggccacagcatcaggattgacttcctgctgaggactctgctcccctttccccctacctgcacacagaggcc

SEQ ID NO: 104744 - DNA, 1068 bp, Homo sapiens
ctggtgaccctgcacagctccagggagcacctcactgtgtgaatgtagtttctctctcaaacaatgcagtgcccagcctgtactgctgtacgtgaaggccctttaatgtctcctgattcccatttgagggttctctcccctacacaaagagtcctcgagctcgtgtctgctgacatgggggcccatggaccggcttcaggggggtccctgaatttttttgaaagaagacccagttgtgtgggtagaagcactttcctgggtaaggagagcccacacgcccttgtcttctgcctgacgacttctctacctgcaaagcggcacccaggggaggccacgggtgctcggcctcctcgcggctctgctgccttctgcagctgctctggcagcaggtgcctgccctttctagctgcctctctcagcgtgctcctccctgggttttgggagccacacctggatctctgcaaggtctccggagcactgcagaatcgctgctcccctcggggtctttgttcctgtggcgctcttgcccgaggctgcattgcattcagatgcacggggcctccctgcctcatgccccctggacagatgctgctgtggtcctgaaacttgagacacgttctccccggaaggctctgcgctcctgggtgttagggtggcatcccaggcctctctgtgtgaatgaggccagctcagcaggtgcccgtggacttccctctgctggccggggaggcctcggggcatcactgtgagagtgtcctgggtgaggcaggcgcctgctgaatgctggctgtaactgaagagtgcgccgctttccctggctctgctgctaacatcgtctctcttcccaccctagatttcgctgcctcatcacccacatctcccaatgcattgcctcctgctcgcaaagccagccctccctcagggctgtggagcccagcctatgcctcccactaggccgcgtgaaggttcccggaggatgggtctcagccgagcctcgtgcacccccaagatggaacatccctgctgcattcacactggaacaagcccctccagatgagtgccccggcc

SEQ ID NO: 104745 - DNA, 1369 bp, Homo sapiens
tgctggaagacatgcaggggcaggtggcatttgcagcccagccagcctgtgcaggcctggtggaatttggtgtggtggccatcgggcctggcccacaccctctcgtctctcccctctctaggcgagtgcacccccacccagagggaagtcatccaggccttgcacccagagaccctcatcagctgccagtcccagttcaagccggccgtctttgatttcccatctcaagatgtgttcaccgtggagccacagtttgacactgctctcggtaattgcgaggatttgaaagtgaaagggacttggagacagtctctgtcttctgggcatcttgcggcttccacgtgcccagctcaccatggccgtctgtccagagggcagagattgtcaggagcccagcctggggattgacgccagggggacttgggaggactgctggtcacagagggtatcctagcttggccaaggcctttataggggattcccaggaggactcctggaggaggtgacttctcacctgggctttggaggatgcataggaatcccctggttagagaagcagggagaagaaatgacatcagtgcacgggcaggagaggggacaagacaatacacccttgtcttcgcaggccagtacttctgctcaatcacaatgcacaggctgacggacaagcagcggaagcacctgagcatgaagaagacagctctggtggtcagtgcctccctctccagcagccacttctccacagagcaggtgggggccgaggtgcccttcagcccaggtctcttcgccgaccaggctgaaatccttttgagcaaccactacaccagttccgagatcagggtctttggtgccccggaggttctggagaacttggaggtgagtggcatctgcatgcctcaggccaggccggagtcaggggcatcaggaaggccctggaggaagagggaatgtggtgtggatgtcctgggccagctctctttaaaatttatttttacaattagaatttttaaattgaagtactcttttctttttccatagcactgttgctgtctctcaggctgcgtgattgtattaattgttctgaccgctgctggtcttccccagctacaagttaagcttgtgggggcagcagtgagaaccccagaaaaggtgccagtgagcgtgtggtgcgtggcatcgcagaattcagtgcaggagcatctgccacagagcagggaggaaagccctaatccctgctgggacaagtcccctctctccaggcctcacttcccccatgactaagtcacggggtgggattggtgggtgaatgatccctcaggcccagagcctggcaggctgggaagagttcgggggtgagagaaccaaggag

SEQ ID NO: 104746 - DNA, 1052 bp, Homo sapiens
agggacttgcccagggttgcccagcaagccagtggggaaatggtactgggcaccagcccctgtgactctaggcccaagcccaggtgggccttggacacacaggacccaagtggagggtggcttgaaaggtcgctccctgcctgattcagggacagtggggatggaggcctggaaagagaccaaagcccagggataggatttcctaaaggctgcctgaagcttgtctagtgtgggacgaatgccccccgaccccacccagtgggaacagagtcctgtccctggtgcccgggggctcccccagattgctcccatggaacacaaacagtgagacttattagcagatatccccaaacagaatagtctgcagggacacactgcaaaacccagcatcgctctgggtgacctagaagcactgaagtctgagggacatcctgtcatgaaggcccctggcttacgtgggtgggcccagtgttttccaaatgcatctgtgcatgttgtgcgatgcaggcagggcaggacccgggcacccatgctggggaagccgggtctgcacagctctggggttagcagacccaacccaggcaggaaggcagagcccttgagaacaggccagcagctaccaggactggggggctggggggtctggggctactgtccggctctgcctttttgaggacacaggggcctgggccttacccctgaaaacgtgtttgatgtcttcccaggcgtcgatccgactcccgtcacagtacaactttgccatgaacgtgctcggccgggtaaaaggccggaccgggctgagggtggtggtcaaggctgtggaccccacatcggggcagctgtatggcctggccagagaactctcggatgagatccaagtccaggtaggaggcaggtggaaaggccacagggaagggggagaggaagtgccagctgcccaatcttccttcggggccacatgttgcatgggcaggggctgagagacctgagaagctctcagtccgtggggatgacagtggtccatcgcagtggggtaaacatccgggtgtgat

SEQ ID NO: 104747 - DNA, 1317 bp, Homo sapiens
tgaagctgggcttccagagggttgcggtcaggttcctcagtggatagaagggctggtaattaaaaggggagtgttcatgtggcttaggctccttaagaagctaatatgctgtacccagcctcacatactccttgtataatctcatttccactgctgtttgctaatcatctgtttcttcgctgtgtatttctgattcttatttcctaaagttcttactgtattatacactgccaggtgtgagctgttcagtcagtgagcatttattgagctcctactggatgctgctgttctaagtggtgtctcatctccctaattagtgtattagttacttaagagtagaatgtggaatttatgcctctaagtatccccaagctccccctcatcgattttcatttgctgactggctgatagtccagaagtcaacctgggtgactctcctgattcccaggtctgtgggttgaggttagtgatgctatctcagaaagtcacggagcaccatagatggtaggattggtcttttggaggctgcccctgaacctctgtccccatgatgcaggtggagattgggaagacagtgaaggcatacgtccgcgtgctggacttgcacaagaagcccttccttgccaaatacttcccctttatggacctgaagctccgagcagcctccccgatcattacattggtgtgagttctcctaggggtcagaggagggcacctcagagacagtgctgaccccagctgcagcctttcccacggggtggtcttggagaagtcccagcccttccctctgtttcagggcccttgatgaagcccttgacaactacaccatcacattcctcatccgcggtgtggccatcggccagaccagtctaactgcaagtgtgaccaataaagctggacagagaatcaactcagccccacaacagattgaagtaagacgagttcttcccacaccatgtgggatcagcccagtgctgggggttgggagtgtctttatagtacagtccaggaagctactgtagagaagccatataaaaatctgtgtcccacaatgtcctctcatcaaaaggcagctgttacgagctctagggatctgggaggcagcaaagttagactggcagaaccagagggagggggccaagtgacttgacctttcctctgtgacttgggggattgtgtggctcagagaaggggtgtgcctggtcacatggcaaggggacacaccaggactattcccagaaagcactgactgggtggaagcttagacagatgctgactcatgtgtagaagaactccttaaccattggtcctgagcct

SEQ ID NO: 104748 - DNA, 1050 bp, Homo sapiens
agtggcacagagtgcccattgcaggcaggacccgggacgagtctcccctatggcaagcagcagcccgtgccacaggccctgcgaactgctctggtccagaagtttccttccatggaggcgccctgcccactggggtcttcacctcccttcatttcaggcttgtgccaaagactctcgcaactccaatcaggccctggttcctctggtctcttctgaagcctgcaggaggaattttccagggagtattgacgtcagcagcaagtcctggttgcttcagaaacagttgcaggcgactgtttccgagggatgtctactcgtggctgtggctttttccagctgcagagcagcagcacagagatagacaagcccccagcgctccccagttagctcagagaaagggtttctttccttcctgttgatacatattcagcacggaaggatggcttgcgggaatgtgtggctttggagtgtctctggggggctctctggggctcacgcagcaggggtcctgtgggggtttttatccccacacagtggacatggactgtgcagggccgtgatgaattttgctcacacagccccagaacgctctgtaagggcctttattttgttttcggctggtttgcacataggagtgtttatccgatttaagcctaagttttccttcttttcaacgattctttacatttcaatcaagtcctctaggcggaacccatgagatgaccagagcaggggaaggagcctgctgggcactttacatttcccattaactcgtgcactcagagacgctggagtgcttatcgtgtgccaggtgctgtgttaagcactgcggattcaggagggaatgaagccggggggcccagctcctgtgagccgcagctgtgtctctccatctcctgggtcctatgagctgcggctgcttctctccatctcctgggtcctgtgaggcgcagcccgtcatggggccattgttcaggtgaggacatgtgtccaggatgagtggggagtgggtggcaattgcagggcctgaagtcaggtgcatccaccttt

SEQ ID NO: 104749 - DNA, 1697 bp, Homo sapiens
gtgtgagttgcccaccactggggcctggtgggttggggtggcgtcttctaagctggattgctcccaaccctctcctcagtctggagtggaggagccagcaactcattccacctcaggaggctgaagggagacctcaaagggtctgtggccattctgctgggctcaggagcaccaggggcttgtggccaggagcaaggccaggccctagggcttttgggcctgttcttcccgaggggcagcctaatcatgtcctcctggatctaatggccttgcccttgtccttcagcatgaccctctggtgcctctgtcggcctccatagagctcatcctggtggaggacgtgagggtgagcccagaagaggtgaccatctacaaccaccctggcatccaggtacagtccttgccctgccaccttcctgggcaagacccacggggggactcctcgccctcccacatgcggcccaaccctccctgcatctgcctcctgcaggcagagctccgcatcagggaaggctcaggttacttcttcctcaacaccagcaccgcagatgttgtcaaggtggcctaccaggaggccaggggtgtcgccatggtaagcttgggccatcggtccccactgttggttttcattccttatctgggctgttgtgtggttaattgattgatcattttgaaagctagcacttgactcacactcggaatcccagaactttgggaggtcaaggcaggaagatcacttgagcccaggagttcaagaccagcctggacaatatagtgagacccccatctctacaaaaaaaaaaagaaaaatcaaaaattagctgggcatggtagcacaggcctgtggtcccagctacacaggaacctgaggcaggaggattgcttgagccccggaggttgaggggtgcattgagcagtggtcatgctccagcctgggcaacagacctgggtgagaaacccagaccctgtctccaaaaaaaagctggcacttaatcacattagctataattagcaaggtctttagattctctgattcattctacaactttagtcattctcatgaaacctttgtgatttgtattccctgtccacaaactgttagttacctaatggtttcctttcaatcaatcctttaagattaaaatattattccataaggagcactgtaacagccataaagaaaattgcttttaaaagatgtctcacctttctctatttttcctgtgtttctctcttgaccctctccctactcttgcaagcattgactttagctgtgctcatggcatggaagaatttaatgttctgcttttattatgttattttaagtttttatgtttttgcgtgttgctaatgtaagctggcagtccatcttcaagtttgctaatgctttcttttgccagtttaaatctactcttgtgcgcttctagtgaatttttcatttcagctgttatacttttcaatttaagaatttctggccgggtgcggtggctcatgcctgtaatcccagcactttgggaggccgaggcaggctgatcacaaggtcaggagattgagaccatcctggctaacacggtgaaaccctgtctctactaaatatacaaaaaaaaaaaattagccaggcgtagtggcgggcgcctgtattcccagctactcgggaggctgaggcaggagatggcgtgaacccagcgggtggagct

SEQ ID NO: 104750 - DNA, 1051 bp, Homo sapiens
atggggtgttgaagccctgagctggcctgagaggagggccaagcagagatgttgtctgctgtttcctgtgtcctcttctctcttctcttgctggagggctagaatgtcccacttgtggggacagtgaatgggtgactggttaggaagctccgcgggcttaggagagtgaatgtgaaagtggtcaggctctctggatcagaacgccagctctgttttccactagctgcgcaatggtgagcaggctgctcatcttgatatcctcagtcccctatccccaaaatgtggctctcagtagcgtgttcccagggctattgagggatatgagggaacgtgatcatgagacacctcattgctctgaggcatcttgatccctgctcagcagtcaccattgctgtcaaaagtgcttgtggtctctgcccacagagcaaggaagatgtacatcgatgttgctcactttatagaactcttacttctcggggaaactcttctccatcctagcccacgttgggcaagttatttttctgccaagtgggtgtgaagggcaggggaacactgaagctggtgaggatggcagcagggttcattgttggcaattatagaccccatgggagaccagtgaccagagcttcttgggaaacccctagaggctggacggaaccagcaagaaccccagtgccccctctacgtagaagcaaagagttcactttgcaatgttcagaaatggcataatgttaatattctccaagcagttggcaaatagattgtggttaattttttttttaaacagcttacacagaaaaactgattgcctctgaaaattcatggagtgtcagttttgtccaccagcatgcagaacaatattaacatttaaagcactgaaaacaattaagaaaatgcgtcagctgtactgagagcagagtgcagagattcggggtggcagtgggagtgtattggcttctaacatttcctgtctttgctctctctttccctgttattttttgtttcttggtggccagaactctccatgccttccgatcagtacgagttgcag

SEQ ID NO: 104751 - DNA, 1011 bp, Homo sapiens
ggggaaggggtcaaggaatagcagccaaggctcatcacagcatatgcctctcctgctttttatgttggcctggggcttctcaagttccctggaccttgggcttttgtgtggagagaacttgagctcccggtggccatagcatccctagagttcaccctggctctcctcttttactccagtttaatcatggtttcacatagagataaaccatgcacaatgggcagtcagtgtgagggctcagtctgggtaatgccctttttctgggtgcctgctatacttatggagctcccctgggacctctgggttctgaaagtgaggatttgggaatgatatcttgtttctttcctcttaacttccctattcccatgtttaaaacatctctttctcttgctcacaccaccacttccccattccctgtccgcacctcactttgtctgccttttctttatgccaagaatgtacgccctgcagaagtcaggctgctgattttggaaaacatccttctgaacccggcctatgacgtctacctgatggtgggaacctccattcactacaaggtgcagaagatcaggcaagggaaaattacaggtgtgtcattggctctgccatcatgacagatgcttccttcctcctttttttattgtggttacatacatgtaacaaaatttaccatcttaaccatttttaagtgctccatcaggtagcatcaagtacattcacactcttctgcagccatcaccatcatccatccacagaactcgttcatcttcccaaactgaagctctgcattgttaaacactaactccccttcaccctctcccagcccttggcactcatcactctatttcctgtctctgtgaatgtgactactctggttacctcatgtacgtggaatcatatagtatttatttttttgtaactggcttatatcacttttttcctagcctgatgtcttcaagtttcatccatgttgtagcaagggttggaattcccttcccttttaaggctgaa

SEQ ID NO: 104752 - DNA, 1075 bp, Homo sapiens
gtgaagagacaagagtcatgtgacactagacagtttgggtaatgcccctccaccctgggtcccctcccctgcacagggagggagaggagtttactcccaggaagtggtgagcaggaatgaatggcccaggtttccgagcagactcctaaattgtaaaccgctcacagacgtgcggggcagcagtgttatgcactgcactgagctggtcctgcagtcaagggcagggagtcacagcaggaagagcacaagctttcatcggacagccctaggttcaaattctggcctcgccccctggtggtcacatgaccatgagtaagtgtcttcattcctttcagcctcagtttcctctcctgacatacagtttatgacacctgcctggtgggtggtgatgtggagtgtggttcctgcatggggcagaagctcccatcacgcctccctccaccctgggaaattaactccatatctgtctgcctctcccatctgctcttatagggaacaccttcagcactctggctggactggtcttcgagtggacgattgtgaaggactccgaggcggacaggttctcagactcccacaatgcgctgcggtaaggggtgcctctgctaggcctggcccctttgaagggaaggggaaagggggacacctgtgagctcctcaccagcggggggctttcatctgggtcattgaggagtctgggagactcctaggatgcccgtaacattccgagtgtctgattgaggaatgggatccactcacaccattgtgcgggagcctggctgcttctgcagcccccagagagtgtcctgtgagaagctgtcagaggcttgggatgtccagctggagaaatgagacatgcatggctgtctcagggcacagggaaagtgtgggtggccccaggctgcacttctggggggccagttaaagggcagccaggtttcggctggggcacaggccagctgtgccggtgggtctcaggtggaacaggctgagtcgcccatatggcggtatagtaagaccagttgtgaggcggacaccttaagcatcttgacctgtgtcatcctcctggcagcca

SEQ ID NO: 104753 - DNA, 1050 bp, Homo sapiens
ccccttctgtactatacttgatagtcttttataaaaacaccagcatatgtgaaaaccaaaaaccaccagcgtaatccctaatctcagtgaagggacagggttctcgtctttgggatgggaactcatcatactataacccttgtcacttcacggaatgcttacaccctgaacgaaactaagttttcctggagttttttttgcccacagctttaaatgctggtgccctgctggaaaagccagaatgggtggtgacaaggcccccacagccctttctttctggtagtccctgttaactgtcagtggggccatgtgtgaggcagctgcttggcttctgagggtgaagctggtggttgccgtggtctttgccagagtgtaagcctgcaaggcttggaagtggagccaggggcggggactgtctttggtgctgaccccttcctggggttcctccagccacaggccaggtcctgcgctgtgatgccattgtggacctcatccatgacatccagatcgtctccaccacccgcgagctctacctggaggactcccccctggagctgaagatccaggccctggactccgaaggtgagaacgtcccctgcctgtttgtcttctgcagcccatgctagatcatccccccaccatgactctggcctctctgcattccccactcctctggcatccaaccctgcaggtccctagagggcagctctggtcaggcaggtgaagttggtgctgggggagatgctgaagaggcagaaaccacctctgaggtgggcctcaagccctcggtggtgtcgaatcatggtcactcctggccctcaggaacccctgcagtggggcctgtgtgctcagagctgtggctctgtgaccctggagccagaccctgcctgcatagtgctggtccttggtgcagcacatcttggggaagctagcattcttggcagcgatgggaggcagggagaggctccctgctctggctcttagggccagtggtggcttcctgttccagacctcagagcatgtttgtgggtcaggtcacatttatgctgc

SEQ ID NO: 104754 - DNA, 1092 bp, Homo sapiens
cccttgagcagctttcctgctggtactgaacgactcccacatctgcaggagtcttggacggtggccatctgttgagccttgaggtcatttccaggtgtgaggtctcctgtttgatttgctccatgggaactgtgtgcacaggcctggagccctcagcttgtggaggtcttaactggagaggccttggcagggccccacgtctcctctgggtttgaagctggtgttaggtggcccacctcacttctgtctttgggtccaggactgcgccctagacgggtgccacagcctggtgtctggaccccactgtgccttgcagtgcagctccagagagtaaatgctgtcttcttccactgcaggttgtccacccggccggaggtggccagcatcgagccgctgggcctggacgagcagcagtgctcccagaaggcagtggtgcaggcccgcctgacccagcctgcccgcctcaccagcatcatcttcgcagaggacatcagtaagggctgagtgctgtgtgtgatccccggtgggagccagagacagggaaacgcccactaagacccagggtcctagaggctacctgagcccatggcagggctttctcttgttgagtggcaggacacccaggcaggagacaggcacccagcaggcaacacccatcccaagccttgtgccagcacttcgtaccgtgttcccttttgtggaggctggcttgctaaatttctaaattattatttgttacctaaataactcttaatgggtagcaactcattactatgacagttgtcctaatctgtgagatcactccttttccttccccatatctaatttattatattagttgtaaaatagtttgacaacaacaatataattttctatcatgcttttccctacttagattataggacatgttccattttaccatacaatgatttttttttttttttttttttttgagacagagtcttgctctgtcgcccaggctggagtgcagtggcgcgatcttggctcactgcaacctccgcctcctgggttcaagtgattctcctgcctcagcctcccgagtagttgagactacaggcatgcgccaccaca

SEQ ID NO: 104755 - DNA, 1032 bp, Homo sapiens
aaagtgctggggttacaggcgtgagccaccgcacccaccctattttttatattgggctgaagtttaagactctggtctaagtacttctgctgaagttttgttgaaaattgttggtctaaaaactaatttgaaaccctcagggctcagcagagaagagaaacaagtgggagggccggtggtagagtctgaggtgaactcctgccccttcccaaggggcggctcctcagctccactgtgggcccggcatggccagagcacctggtcttcaaagagaagccaggaatccagattattaagtgacatttcctgattttttttttgagactgagtctcgctcttgttgagcaggctgaagtgcagtggcacgatctcagctcactgtaacctccgcctcccgggttcaaacaatttttctgcctcagcctccgaagtagctggaattataggggtgagccaccacacccggccctgatttcttaatgtggcactcattataagattgtaaaagcccacctgtagaccaaactgggcacactggctgcctgcttgtgacctctttccagagaaggacacagctcctattagtggctgaagttctgagggctgaggcattcagttcagtgctctttgtaggaacagaggggaggttggggcgggggcttgcattggaatctggtactgccagcctgccttggtgggggtggggtcagggatgcctcaggttatctgccccaagagtgtgggagccctgacccccaggctccctggctgagctcaccttagactcagagccacagtggatgcctgaggccagcaggcccctctgctccacaggtggaaaagcctaggtccagaaagaggctgtgctcaaggtcacctgggaagttggccgggccttggggagacccctggcaggtcatccagtccagtcttctaggttcccagtcagggctgctgcctccctgctccccaaccgcagcctgaggtgtgagaattctagatagggccacgacagtgtgagcacatgaaaga

SEQ ID NO: 104756 - DNA, 1084 bp, Homo sapiens
tctgcctggctaatttttgtatttttagtagagacggggtttcaccatgttggcgaggctggtcttgaactcctgacctcaagtgatccgcctgcctcggcctcccaaagtgctgggattacaggcgtgagccactgcgcctggcccagtctactgtatttctgtgagcaaaactttgcctattttccctttgaaagccatatcaaaattattgtcagctcatatgtgatggatgataagtacttttattttttccagtttccttgcacaatttcaaaggtgcttatgcactgtacatctcatatgccagccaagctggcacttacttcctggactgttgcttggggtagggagttccttctatacccctgccttgtagctcagctcatccttcccccagagctggctagaagcagtgtttatggaatgagtgcatgaatcagtgaatgaatgactggtggatcggctgcctgcgccccctcaccctctgcttgtctccaaaggcggggaagctggctgtggagcgaggctgggccatcaacgtgggtgagtgctgggaatgtcctcgggaatgtccagcccggcttggtggaactggcctgaaagggggctgggggagggcgggaggatcctggaggtggcagctgtgaattcagaagctctggttttcccaagtcaccctagcctccttgtggagtggcctggaggttgatgtgtagcctcctaggtacctgggagagactgaccagtgcctccatctgacgtgggatccttgtctaaggaggtccccgggtggttccccagccccctctttgcgtacttccggtggcagggagcttcctcccttccagagagcgtgtgccatccttgggcagctcagcatggtctgaagcctgccttgtgtcttccctgaaggactccacctgtgtcctggggcccaggacagcccacagaggcttggtcatgttgggttgggtgggcacatcctgggtcaataccaccaccttctcaagggtccagagggcccgtgctccccagcccccttgaatctcccacaagattggctcatgggagggctgcacgg

SEQ ID NO: 104757 - DNA, 1278 bp, Homo sapiens
gctgtgcccggagctgccgcccaactgcatcgaggctgtagtggtggctgacagctgcccacagtgcggccaggtgggctgcgtccacgcgggccacaagtacgccgctggccacactgttcacctgccgccctgccgggcctgccactgccctgacgccggtggagagctcatctgctaccagctccccggttgccacgggaacttctcagatgccgaggagggtgaccccgagcgacactacgaagacccctacagctatgaccaggaggtggccgaggtggaagcagcaacagccctggggggtgaggtccaggcgggtgcagtccaggcaggcgcagggggccccccagctgctctgggaggtgggagtcagccactgtccaccatccaggcacccccctggccagctgtcctccccaggcccacagcggctgctgccctgggtcccccagccccagtgcaggccaaagctaggagagtgaccgaggacagtgaggaggaagaagaggaggaggaggagagagaggaaatggctgtcactgagcagctggcagcaggtggccacagggggctggatgggctgcccactacagccccagctggacccagtcttcctatccaggaggagagggcagaagctggggcaagggcagaagctggggcaaggcctgaagagaacctcatcctggatgcccaagccacgtcccgcagcactgggccggagggcgtgacgcatgcaccgagcctgggcaaggctgctctcgtcccaactcaggccgtgcctggctctcccagggacccagtcaagcccagcccccacaacatcctgtccacatcactgcctgatgcagcctggatcccacccacccgagaagtgcccaggaagccgcaagttctgccccattcccacgtggaggaggacacagaccccaactctgtccattctatccccagaagtagccctgaaggtaagaccctgtcctggttccttcagggcactttgtgtgggaagggcagccttgggctctggccgctgccccaggtctctgcctggggctggggatgctggactgtggggccaggcctagggtggccaccccaggcccttggtttgggcaggaggctgtgagagtgcatcttctcccaggcccagctcttgggatgggatgggtgggtgggagtggggttcctgttgtgggaggtgctgggccccctggtagggctgcggtagtggtcaagggtccagaaggtgcacatcttcagagctgggggccc

SEQ ID NO: 104758 - DNA, 1026 bp, Homo sapiens
ccacctctgccccaggcagcccaacagtgactggcaggcagtgaccagggacccggaggctgtgctcctccaggctgacctgccagccttttctgggattaggtctctctgtcctccccgaccgttgtgggggtggggactctgatgccaacccctctctctcagaggtcatgaacacacatctccgagtctagtgggacccaggcctgcatctgcatggttaagccaagaaatgaaacccatgcaacccagtggaggttgtgccggctctgccacctgcaccggctcccttgctgtggaccttgggcagagcttccctcctctgagcctcactcactttccactctgggaggatgaggtgggcgactgggggctaagttaccccctctgtttcaggacagcccagaggcactgctgtgtctcctacttgcaggagaagagctgcatggccggcgtcctgggagccaaggagggtgagacctgtggggctgaggacaacgacagctgcggcatctccctgtacaaggcaagcctgacctgtggccttcaaggcagggtggggtggggcggggcgggaggctggcctgggcctgaaggtcctcgtggcccaagaagttaggctgtccttggggctcctcctgggagtgaccctcacgcctggggtggaaggactcttaatctgcgcagaaaacatcatcagttattatactgaccaattaattcacagaatatttgtagagcaccactgtgtgccctgggcatcagggatgtagcagtgagtaacacagatggcaattcccgccctcccagggatttctttctggccaggaagacagaggaagatcacgatgaatattttagcacctggcgtggttgcaggcgattgtgctaaggagaaaaacttaaggagaggtgggataagtagtgtcagggctggggagggactgcagtatcagctgacagtggccagggacagcctcactgaggaggggacatttgtgcaatgcccggggtgggggatgtctg

SEQ ID NO: 104759 - DNA, 1024 bp, Homo sapiens
tccatcttcagggtcacttcatggcccaagttggctgctaaagctccagccatcacatatgtgctccaagaaggagaaagagggggagcaaaaacgatgtacttgattcaagtagagtcatccccagtttaaagccctcctgaaggctccgctgagtgaatctaactgcaaaggcccctgggaaatgccatcttttaactgacttgaatagaattggggtttgctagtaaacatgaggggataatgagtgtggctggggggttatagttccttcaactaaaggccatttacttgttatctgtttcaaaagacttacattagtcctacctgtgccagacttgggaaatagaggcagaggacccctctgccctgggagagcgcatagtctggcagaggagataagataatggtgaattcatctccatttatcagtccctcccctgagcctagctccaggctggggccagagattgggcagtgataactgtctctccctgcagcaatgctgtgactgctgtggcctgggcctccgcgtgcgggccgagggccagtcgtgtgagtccaatcctaacctgggctatccctgcaatcatgtcatgctctcctgctgtgagggtgaagagcctctcatagtacctgaggttcgccgacctccagagcccgcagctgcaccacggagaggtgagtgctgctcttccctggctgcggcatatagggcgaaggctggttgacctctggccttctgtggggaccctgggtccatcatcacctgtggcttgagacacaagttctgctctaaacagagttctgaggatggtgatttcattgttttctgtggactacccactccaccaacttaaccaccaactaccacccatcaccctttcactgtccactcaccaccctcccctctctttgtctatacatcttcctccctgtctactttgtctatacatcttcctccctacccacttatcagtttgctctttttccatccattgcacttgtctcccacccatcctcc

SEQ ID NO: 104760 - DNA, 1037 bp, Homo sapiens
agcacagccggcatctccgtgctctatgtcgtgcccttgtgtcctggcgtcttgtcccgcttggctgccagctccacccggaggctgctttccccagggacgtgtctatgtgtcagggaactggatgtgtggcctggtggatcagggaccccacctgggctgcaggaaaatgagggggtcagacatgctgggagcaggataggatgtgtggggtctggaggcaggaggcctagccaagcaggacccccagaagctccgtggccttggatgaatgactcgtcttcccccagctgtggttttctcatctgtagtaaggaggctgttgatcctcttttgacgattgtgtgacatgtatgtggggtagcacagagcctgggcaccgtgagcatgctacaacagctacgtgccttccccagggtcccccgcagagctggtggatggaggatggggtccagcagagcccgcctcgcataccagcttggcgttcctttgctatgtgaccttgagcagcggagctctcctctctgagcctgcctttcctcccctctgaccgtggggccagaggactgggtgagggctcatacccggcacctggcctgcacatcgcccgggttggtgctcagtgatgcctcttccttctcctctcttaggccccatgtgggccaggcgccgtggctctgggagtgctctgtgcgtacatgtctgcagcctctgatgttttcagagaactgtaaacccttgtgtcctccagtttgtggtcccaaacggagatagacccaaagtagctgggactcagggcagacggtggtaaatgccatcacagagacacgcgcagagggcgaggtcattccagctggtggcatcgggttagcatttggaaatcagtaagggcatgcagcgtagaaggaacagctcaaataaaggtatagaagtaggatcagaacctagtgcgttcagggcatgtgaccagagccccgtttgtcttctctgtgcttggggaccatgtccagcctggacatatccccttccttcctcgc

SEQ ID NO: 104761 - DNA, 1776 bp, Homo sapiens
gaaggtgagaagggcccagaaggaccaactggaggccccgccccatggccagttttgccccgcccctccctggtcccacccctgtcctgccctggccacccttaggcctggccacgcccctctccatcccctcctttctagcaagctccccttagttgggtttcctgctggtgggaagaccccacaatggtggtgtttggggcggagatgggagtctgaggcagggtgagggcaggctaggtccaccccggctttgctcctgcctgctggtgtctgggtgccagttatcccccttgctgtggcctggtttgtacattgaggtggagcccacagagggttcactctgtcccttttactggaaaattctagccttctaatcagagggaggggtttcatccaaccctttcaacaagtacgtcctgagctgctcttatgtgcctgccgggtcctgggtaccagggatccagggtggggtgctgtggcccttctctgaccttgtggttggggcagcggggtccacacaggcaaacagagatggcagagtgactgggggctgggggcccctgtaagtggtgggttcaaggaggcccctggaggaggtgacgttggagttgagacctgaatgagaagctcctggggagggtgttcaggcagagggggcagcgtgccaaggcctgttgggtgtggggaggaagcactcttggcatgttccagaaacagaaagacagtctccggggttggagccttcttgctacctgtgctacctccctaaagtgtgaacacatgaccttaccttagagatttaggcacacggtggggatatccccacttccgccccctgcaagtgtgggacagcggctaacaaagcaggcttgggagccagtcccccgggttctggtcctggtccagtgctccccagcagtagagccttgtctctgcctcagcttccctccttgtaagatggggcttgtcatgacatctacttcttacggctgtgtggggtttaaggaaataaatccatctcaggtgctcagaacaatggtgggaccaaagagaagcgcagtaaacatggtcacgttgttattactcctgggacaaaggccatgccggcaacaatgtggctgtgccagcttcccagggagatctttgtggccatcagggtcatgggtctgagggcggggatgtgtgggcagggctgctgagtgtaaaggcaggacctgccccccagcccttgacacccagcctctccgctgcagacgtggatgagtgtgcgatgggcacgcacacctgccagccgggcttcttgtgccagaacaccaagggctccttctactgccaggccaggcagcgctgcatggatggcttcctgcaggatcctgaaggcaactgtgtgggtgagcgggggctgcagggctggggatcatcagcctagggctctactggaggcattgtgggggcttttagggctttagagaccagggaggcctggcttgctgctccattcctctcccagcccccttgtccctacctgtgaatgggcatgtcaagtgttcaaccctgggggcaccactgtccccaaagtgtagctgctcctattaccttgagctgtgaaaccttggctgagttattattcagtggcctctgtgaagctatctgtggggttggactggatacgaatgagtatcccttttttttaaccagtcagcagtggctatgtgatagatcatgacctggcacagacatctacacacatccaggaagaactgcaataccagt

SEQ ID NO: 104762 - DNA, 1063 bp, Homo sapiens
tacagatgccggcctagtccccaagtgggtctgagattctacccgctctgcgccccccatcaactccttccaaaaaagggtttgcttagtctctgtgcctctaaaacttcttgttaatgtgctgtgcttccctggcagctagacccctggcacgtggttggtgtagttatcctagcactcagcctcgatcccgccctgcctccagctgctctgttgggcagatgtgagagggcgtagggccagccatcaggtgcttgggttctgggaggtgtatcccttgggtagtggggcacaggggtaggacagtctggccctgcaactctgaccagggcaggtctggagcccaggaccgaccccctcccagtgtggccctgggaggggctggggcctgggaggacaccatgccgggctccctgtcacctacacctgcctctgcagacatcaacgagtgcacgtcactgtccgagccatgtcggccaggcttcagctgcatcaacacggtgggctcctacacatgccagaggaacccgctgatctgcgcgcgcggctaccacgccagcgatgatgggaccaagtgtgtgggtaaggccagccgcctccgccctgccagccagcccggcctgcccgcttccccacccctgggaggtgtgtgtggagggagccccaggcctcaaggtaccctgctcaccccccacagacgtgaatgagtgtgagacaggtgtgcaccgctgcggtgagggccaagtgtgccacaacctccctggctcctaccgctgtgactgcaaagccggctttcagcgggatgcctttggccggggctgcatcggtaggtaggctggtggccaggacccctggggaacacctggctggtcccctgccctctgtgcactccacctccccatgcccagcacctccactgcctgagtggggcccacctgctggagtccacaaggtcgccttccagctggcctcatcctcctgctgggcctgccaggacctggctctggcccccgcccccaccttctcagtccctcctgtctcatctctgtgcctctgcccctct

SEQ ID NO: 104763 - DNA, 1027 bp, Homo sapiens
gtgggcgagctgtgggtgacccggcctatcctccctgcaggaagtgcgagcgcaccacgtgccatgacttcctggagtgccagaactcgccagcgcgcatcacgcactaccagctcaacttccagacgggcctcctggtgcctgcgcatatcttccgcattggccccgcgccagccttcacgggggacaccatcgccctgaacatcatcaagggcaatgaggagggctactttggcacgcgcaggctcaatgcctacacgggtgtggtctacctgcagcgggccgtgctggagccccgggactttgccctggacgtggagatgaagctctggaggcagggctccgtcaccaccttcctggccaagatgcacatcttcttcaccacctttgccctgtgaggtgccagcacgggccacctgcgggtgtggcgcagcccagggctcacactgcgtgggagggactgggtcactattgtggtttttactataactttgtaaattaacttaattttgctgacttgactcctgtggcttctggacccctcctctgccccgcaggaggaagttccacggcaggtggtgcgttcccacgcaggcaccaagtggaagcttgcacggtgggccacggccgtggcgggtgccctgtgggtgaggctgggtgatgacctgaggaccagagacacgcgaccatgttggggctcttggactcctctggatgacccgtccccaaagttgacattccatttcatgttccactgtgattaattcttttcttttttaaaaaatcattttaaagttttttgtttaactataaagtagtacatgtacattatataaaaaaaagttcaactagtatgaaagggttataaagtaacagaggaaaacgcctcttggtccctttacttttgtaaagtgttcagagtttgacaacgttgtccagatgtcacagggctctatggcctggccagcatgtcaattcattgatgaagaccttgatgtccttctcaacgagccccgaacctgaagtt

SEQ ID NO: 104764 - DNA, 1051 bp, Homo sapiens
cagtacgcccgcgtgtggcagtgcaactgtaagttccactggtgctgctatgtcaagtgcaacacgtgcagcgagcgcacggagatgtacacgtgcaagtgagccccgtgtgcacaccaccctcccgctgcaagtcagattgctgggaggactggaccgtttccaagctgcgggctccctggcaggatgctgagcttgtcttttctgctgaggagggtacttttcctgggtttcctgcaggcatccgtgggggaaaaaaaatctctcagagccctcaactattctgttccacacccaatgctgctccaccctcccccagacacagcccaggtccctccgcggctggagcgaagccttctgcagcaggaactctggacccctgggcctcatcacagcaatatttaacaatttattctgataaaaataatattaatttatttaattaaaaagaattcttccacctcgtcgggatccgttttctgcaatcaaagtggactgcttgctttcctagcaggatgattttgttgctaggacaaggagccgtgtagaagtgtacataactattctttatgcagatatttctactagctgattttgcaggtacccaccttgcagcactagatgtttaagtacaagaggagacatcttttatgcatatatagatatacacacacacatttttttttttttttttgctgtttgctgctacttatccagaaatttaagctggtccagatttggagacgttttttccagagtatgttttccatccttttgccctccccagttcaaacttcaccattagaaaaatccagtttggaataaatagagaggaaaaataataaattcccagcagtttccatctttcggaaagtgagccaccggataagagagaatattttgtaagagactatttttatatgaatattttatttatatcgagtctactgtatcattccacggcctgtgcttcttcttaattctggtactcacttaggggtaaggaggggcgatgcctggttgtggcgtcaggccccatggggccccttgc

SEQ ID NO: 104765 - DNA, 1748 bp, Homo sapiens
taaacctaatccaaatcgaggtgtgggtccataggcaacaatagttcctgttctgcaccccctcagtagcctgtgaggactggactagttttgtattttctgaaactttagagaacatctctctatcttcctgttctaggattgatactgccaaatggaaacattaactggaactgcccatgccttgggggaatggccagcggtccctgtggagaacagtttaagtcagccttttcctgcttccactatagcacggaggagatcaaggggtcagactgtgtagaccagttccgggccatgcaggaatgcatgcagaaatacccagacctctatccccaagaggatgaggatgaggaagaggaaagagagaagaagccagcagaacaagcagaagaaacagctcccattgaggccactgcaaccaaagaagaggagggatcaagttaatgaaggccacaaggcactgggcaccagtccttttggagtggaccttttgcaaaaggccttgtcatcaccttccaagaaagtttccttctgttgtcctgtgcattataatatacaaaataacttattttgatgatcagaggtcttgaggtcttgacatcttgacatatacactgaaaaaaatgggggttgtatgtatgtgtgtcctacccaaacctgtggccgccacttttgaattctcagattgccctgaattttgccacttttaaataatgtgctgaataagctcagcaactaaaaaccattacccaagaacgtttcttgtgagtgagctgatttattctgattcattatattccttttggtagattttataccccttggggaaataatacaacaaaaacatctcttaaaaatgctgggatggggccatatctactagcagaggccagatggtcagatatgatttctgcaaacccatcttgaccttgagtatgtgaaggggtactgtactttattcctgatacattttggtttccatgtaggtgttgagctcctggttttctgtgtttggatgatgaagatttggacccttccattcataatccctttctaagtgaagggagaggctggcttggctgttccttgttattccgaaagccctggtttggggcccatgttcacactggctctcagtctagtcaggtgcaatgttcttgagaggtggggacctaattattaccagagtagcagcaagagaggaaacgttgtgaattaagtattcaattaaaaggaaacatgatttctacctgattttgaatgtgtcctttgttttcactagttaaaaatgttttctatataaaaaagtataaattatgaacaattcaattgaaattcctcttgaaagatattggtaaaccaatttgagtccgttaaaattttctgtgttgagttcaaaggaagcttacttattttatatgtgagcagatgccttcacacagacattacagttagtctatgaggtggggaaggctcttcctgtttgaaaatagattaacttgcctaaggtaactgctagacagttttcaggctgtggcatagtaatgcctcatttgtctcaaatgtgttaagttatttatgtaaaaaattgccttaaaacttaatagcttgaaacgaggaatctgggcatggcttacctgggttctctggctcagtgtctcatgaggctatgatacttgtagtcatctcaaggtgggacaggcctttcaagatcgctcgaagtggtttctgggagggttcagtgg

SEQ ID NO: 104766 - DNA, 1055 bp, Homo sapiens
cctgggcattgtgaccccagaagagccttatccaatctagtgcccagtggattgcagggagaaccctgcctacctcccaccccaaagttgagctccgaccacctactgcttccttgatgttactctacccaagagctcagaagtacccgagccacaggtcggagggcctccccacacactgccacaaactggctccttggccctgagctcccacctaacccctccaggccctggtatccagtgttgtaaaatgagatgttgggcttcattgatacggcaaatactcatgaagcaccttctctgcgccagagaagggggatggatggttataaaactacagagagagttggaagtcccccagaaattctttggtgaatactccagctccgtcagttaattcaagcaatctgaagcccagagaaggaggtggcctacctgtagttacacatccagttaggagactagctcagcctaaaattctgagccttttccctggtggcgctgtctgcttctagaacctctcctcctctgggtcgtaaagccataagactcactctttaatgagtactattatatttccgctgattactacttaatgtgtgccataagcaaaagtcctctgccctcaccactcttgtttttaatttcgagtctttctctaatttacttcatttagcaaataatttttgagcctttgggtataatgaggctgtgctgataaacaagaccctcctctttgaggatttacaggaggcagttttctctggaaaggggaggctaggtccatctgcctccaaaacatggagccctatcttttcctgcttcaaagatctctcttagttcggagaggagtgagaattgaaagcactcacttataggccttccttagtatttatcttgtgcataccactgtccccgtaagaagtccctaacttccccccctccgccccccactgatcctttatgcttcccataggatttttaaaaaatgatcccaaactgcttactgtatcagagcttatgtgatctggccctgtctgcctttccagcctggt

SEQ ID NO: 104767 - DNA, 1631 bp, Homo sapiens
taagtcctgagtgctaggactgggaggggatgtgtcactggggatgtccgtctgtgtgtgcgtgtgtgtgtgtgtttatataatgtgtgtatacatgtaatacatactatatgtatatataaatatgtgtggatatatagatcctttatgatcctccatgtttactgggaattttggttcagaatgtgggctgggtttgtcatgtcactgcccacctcacccctcccctagcctgaggggcaccctcctgtacctctcttccttccctccaaggccgtctttgagccccttatcttgatgctggctgaggggaggcccaagaggaagacacgccttattttcctattgctgcctgcagctggctcccaacattcagctcacattgtagcccaagagatggggagcacagactggaatgagtaatgggagagtagcctccagtctgcccggatttgaatcctaactcttcctcttagaagctgtgtgatctgggaagatgacgtaaccctgagcccgattttcttatcggtgaaatggggtcgttatgacatcccgctctttgggcttgcctgtgggctggcctgtgatagacccggtgtgtttgccattgtcatcattgtgatggtcacctgcccctatgtggtgattcactcacctaatgtttccaaatggcatggaaagtcaagacgacttctggattcatggacatctggtcactggaggccttggctggtggtactcaaagacaatcagaatgcgacatcagctttgttcaagcagagattctgagtcaaatcactcctctggcccccaataccaggatggggcctgtcttagctgggccccactttacatctttgtgacttttgtcagctcacccccagcctggtgccagcccagtatcagttgtagggaaatctggtaacatttctactagctaacacgtgtccagtgcttaccacgccctaggccctgagctacccaataactgtgttctttggttctcaccacaaccctatgcacagaggaaatggaaggcacaaagtggtgaagttgcttgcccaagaccccgtagctggtatgtggcagagcataaatgcaaacccagttcttctggctccagaatcctgccctagacgatgacacttttgatcagcagtggatgcaccccaaatcatgcctctgttattgaccaaagcctgatccactcacccttgagtttgaggcccactgtgaacctgcccagaaatgcctacctccaagccctttcttcctccactgctcccacccagccaaagcagacaggcagctgctcccccagaaccacttcctacttcctcatcactgctgatacggttctccctttagggatgctcttcccctaagatctgcctctaagattccactcaagggagcctccttgataccccaggtggaaggggtcactccttgagcaccaagtccacccccatcacaggaccctctgtgtgaccttctagtattgtttatggttgtgacctcactgccctaagactgtctacttctgaccccacaagggctagcactgccctcagaaagctcagccactgtttgctgaatttaattaaaaatacatctctaataacctcttt

SEQ ID NO: 104768 - DNA, 1054 bp, Homo sapiens
ataaatgtgacctgtttttgttgttacggactctgagagagggcccgattcagatcagagggtcagggaaagccctctgaagaaatggggttcaagcaaagctcaaaagaatatgtaggaagctggccaggcatgactgcaggcaatcgttgtaggcagagcaaacccacgcgcagatacacaggcgagaggacacttgacctggactggggacagcagccagcagggtcagggcactggcagcagggtcggtgtccggggggtgtggcagggctctggcaggtgactgtgtggagaacacagagtgggtgatagaagcagggccagtgaggctcctgcgggcagacagtggtaagagactcgggaatatgtggcctggactggatggggtggtaggggaggagcgagccatgtctttcccatagatgtgagtgggtgggtgggtgtgccatgtgctgagatggagaaggcgccagtgtcagcactagacaggctgagatgtcaagtggaaatgtcaaggaggtggtggaggtggtgggagctgcagggctgtgaggcccgggagagggccagagctgcagctttaaattggagggtcacggcatgtggaggccaaggaagcagatgggatgtccggggagagagtatggactgaagcagctaaagaattgcagcatctaatggacaggaagaggggcagcgacagcgatggagcctgagaaggagggtgcagtgtccccaagccatgtggagaggttctgagattaaacagatcacacacatagcgcagagcatgctgcccagcagacatcctccaacctgctcaggggtggtgggcagggtcctgctcattccaggtgagaccgtgggctgagggctccaggtgctggcaggctctgagctgaggaaggcccgtacgttccacagagatctcatgccttgccctgtgctctgccagatgggcagaaggacttagccctataggaggcttgcccccactccgtctggcctgttcagaaatggccaacagctcccgagttggtacagccccctc

SEQ ID NO: 104769 - DNA, 2086 bp, Homo sapiens
gctgggcacataaatcattagtaacagcctgctgcatgaatgaaccaacacctctaggaatggctgagaggcccaaataggcaccttcaggaggctccacccacagcctcttgtatgagtgtgcaggacccaggttatttctagcattacaggcaaatgtctttatactggcctcagactactctccacataaagtattaaagtttacaaagcactgctacatcctctcccctggatcagggtagagtgggtggcttaggcaatgtgcccaaccacgcagctcatagcagaggctcctgtgctcccttagctttcagaacgaagctccttgccttccacccactgatcctctcccctcctcatgcatgtagcaacatgggcccatcctcatctagggacaggagagatctgctgagctggtgaggtgtagagcaggtggcacctcatcacctttctcctttccacagtggactggtttcctgttttccgagacctggtcaacattggcctgaaagcctttgccttctgtgtggccacctcgctgaccctgctgaccgtggcggctggctggctcttctaccgacccctgtgggccctcctcattgccggcctggcccttgtgcccatccttgttgctcggacacgggtgccagccaaaaagttggagtgaaaagaccctggcacccgcccgacacctgcgtgagccctaggatccaggtcctctctcacctctgacccagctccatgccagagcaggagccccggtcaattttggactctgcactccctctcctcttcaggggccagacttggcagcatgtgcaccaggttggtgttcaccagctcatgtcttccccacatctcttcttgccagtaagcagctttggtgggcagcagcagctcatgaatggcaagctgacagcttctcctgctgtttccttcctctcttggactgagtgggtacggccagccactcagcccattggcagctgacaacgcagacacgctctacggaggcctgctgataaagggctcagccttgccgtgtgctgcttctcatcactgcacacaagtgccatgctttgccaccaccaccaagcacatctgtgatcctgaagggcggccgttagtcattactgctgagtcctgggtcaccagcagacacactgggcatggacccctcaaagcaggcacacccaaaacacaagtctgtggctagaacctgatgtggtgtttaaaagagaagaaacactgaagatgtcctgaggagaaaagctggacatatactgggcttcacacttatcttatggcttggcagaatctttgtagtgtgtgggatctctgaaggccctatttaagtttttcttcgttactttgctgcttcatgtgtactttcctaccccaagaggaagttttctgaaataagatttaaaaacaaaacaaaaaaaacacttaatatttcagactgttacaggaaacaccctttagtctgtcagttgaattcagagcactgaaaggtgttaaattggggtatgtggtttgattgataaaaagttacctctcagtattttgtgtcactgagaagctttacaatggatgcttttgaaacaagtatcagcaaaaggatttgttttcactctgggaggagagggtggagaaagcacttgctttcatcctctggcatcggaaactcccctatgcacttgaagatggtttaaaagattaaagaaacgattaagagaaaaggttggaagctttatactaaatgggctccttcatggtgacgccccgtcaaccacaatcaagaactgaggcctgaggctggttgtacaatgcccacgcctgcctggctgctttcacctgggagtgctttcgatgtgggcacctgggcttcctagggctgcttctgagtggttctttcacgtgttgtgtccatagctttagtcttcctaaataagatccacccacacctaagtcacagaatttctaagttccccaactactctcacacccttttaaagataaagtatgttgtaaccaggatgtcttaaatgattctttgtgtaccttttctgtcatattcaga

SEQ ID NO: 104770 - DNA, 1065 bp, Homo sapiens
gcgcccagagatcatggcaggaatggacatgagagctcgcaggccacccccaacctggggaatggcttttcacatttttaaagggttataagaatgagaagaataaagaatatgtgatggaggccacgcatgaccctttacagaacaagcttgtgggcccctgcactagaggaagtctgtatgctgaggcccaggggccagccctcagccgcacgcccatgcctgactcctctaagagttacgtgactctgtccttgcctgtcctgcgcccctctcaccacttcactccccagggaagatcttggccttggccactgcacgctgttggggagcacactgggagtcctgaactgtcagtgctttctagggcgtgtgagcagacataggttatatgttgagacacaggctctactgatggacagttacctgaattgtaaatcctggttcttgtcacttaccagccatcagctcttaagtgactttgtctctcagtctcagtcactgctatcagtgatgacagcacagaatataggctagtggatgaaagtgtgggctctggcccttacgagctgtgtgactttaggcaaatcatttaccccgtctgtggtgttcatctgtaaaatggaaacaataataagacctaccttgtgggtttgttgaaaaaattaaataataacatataaagcactgaagataggctgggcgcagtggctcatgcctgtaattccagcactttcggaggccaaggcaggtggatcatttgaggtcagaagtttgagaccagccaggccaatatggtgacaccccatctctaccaaaaatataaaaattagctgggcatggtggcgggtacctgtagtcccagctactcaggagacaggcacgagaatcacttgaatccgggaggtggaggttgtagtgagctgagatcacaccagggcactccagcctgggcaacagagtgagactccgtctcagggggataaaaaaacaaaaaacaccgagaatagtgtctgggacagagaatgttccataaatgttagctagtgcttgtagtaagaaaag

SEQ ID NO: 104771 - DNA, 1036 bp, Homo sapiens
cggtggctcacgcttgtaatcccagcactttgggaggccgaggcgggcggatcccgaggtcaggagatcgagaccatcctggctaacacgatgaaaccctgtctctactaaaaatacaaaaaattagccgggtgtggtggcgggtgcctgtagtcccagcgactcggagaggctgaggcaggagaatggcgtgaacccgggaggcggagcttgcagtgagccaagatcgcgccactgcactccagcctgggtgacagaacgagactccgtatcaaaaacaaaaaaatggttaaaatggtgtattttatgtgactgtgttttataccacagtaaaaagaaatagctaaaaaaagagtggaataagagcaaaaaatgaataaaatatatataaaattaaaattgaaaaatgttaatacaattttgaggtaagaaaaaaatagaaacaggaattttgagaaatgggaataaaaagcaagtaaaataagtgattttaaaagacatgggatgtacaagaccaagaaataggagatgttcttaataaatgagaaaacaggaaggtacagaaaagagaaaaaggaagcgtagggaaacccacatgagagtgggcgatttgagtcctcccactggggatgacttcctgcttgtcagccccccatgggagtcatgctggaccctctcttcagggctctgccctgtcttggagctttctgtttgatgtcggtggggggcatgatgccctgggcaggggcagggctttgctgttctgggactttagcacccagcagtcaaaggcagcagggggcctgggctgccctgatagaggcttcctcttatgggtatgtacgggtagtcgggagaaagcctgttgggaagagaatgcaggcgtcgtccagaggcaccatgtcagtgacagaaggaagcattagaggtgcatatttattgatttattttttattgtggtaaaatatttataaattttttataataatttataatatttataaattatatatatttatatatataaataaattta

SEQ ID NO: 104772 - DNA, 1010 bp, Homo sapiens
aagttctagaaaaccacaccaaaccaaagaccagcaaaggaaccaaacaagaggaaacctttgctaagggcacctgcaggccaagtgccaaagggaagaggaacaagggaggcagaaagaaacggagcaagccctcctccagcgaggaagatgagggcccaggagacaagcaggagaaggcaacccagcgacgtccgcatggccgggagcggcgggtggcctccagggtgtcttataaagaggagagtgggagtgatgaggctggcagcggctctgattttgagctctccagtggagaagcctctgatccctctgatgaggattccgaacctggccctccaaagcagaggaaagcccccgctcctcagaggacaaaggctgggtccaagagtgcctccaggacccatcgtgggagccatcgtaaggacccaagcttgccagcggcatcctcaagctcttcaagcagtaaaagaggcaagaaaatgtgcagcgatggtgagaaggcagaaaaaagaagcatagctggtatagaccagtggctagaggtgttctgtgagcaggaggaaaagtgggtatgtgtagactgtgtgcacggtgtggtgggccagcctctgacctgttacaagtacgccaccaagcccatgacctatgtggtgggcattgacagtgacggctgggtccgagatgtcacacagaggtacgacccagtctggatgacagtgacccgcaagtgccgggttgatgctgagtggtgggccgagaccttgagaccataccagagcccatttatggacagggagaagaaagaagacttggaggtaaggccttggctgccaggggctccaagacacagtcaggttattaaaattattcctgtttttgagcaccttatatatgcccagcactatgttgggtgtttttaatgggttgtctcatttaattgtcacagccatataaagctggggcagttgctgccttaattttagtgtaaaaagttgtggagttgaaag

SEQ ID NO: 104773 - DNA, 1033 bp, Homo sapiens
gcgcggaacgcgcgcagcaacctccaccaggcctccgcgtctggactcccgccctgcctctgggcctcctccgcccaccggcggcgtctcccgcgaagcccgctgggcctcgctctcaccctcctcctcctcctcacgccgggccttgctcttggccttggatttctggctgcgcagttcgcgtccccgcggctccccgccggccgcgcgtttccgagccatgttgcttgtctgggcaaattccacttcgcgagtgacgcacccggccgcgatgcgctagaacgccggccccgccccgaggcggtgcgcttggccacgccccttcgttggaggcctagtcacgcccctaaaggaagctccaccccatacccgtggccactaaaaaactgcgggaagcaggaaagagcacaacaggtttctctctatttccggtgtattgtatcctcacgtttccggagattgacgttgctcttgtgttctcgcgagaggcgggaaagggcgcagggtttgaaacatggcggacgacgtagaccaggtaagtgtattttaaggaggtcgctcgaaggagcttcttgtactaggctgctttttccagactcaggaaaaatggccagtcgtgcctcctctctccaagtcaccatggcctaatccaccctgtcctttccgtaaccccccctccgaattttgccgtaggccctgagaccttttcctgttagaagcccacctgatgactattctcacactcttcgcttcatttttttaaatctgtagattattatccttagctacctcatggagctgtcaggattccaatagaaagccaggtaataaagttaggagttgttatcattagtgagcgcaacaattatttattcattcagcagatagagtgaacatcagctttgtatggttaggcactgttctaagggccagggacactgacatcgacatataagagatccttgccattacttggagcttatatttgcgaggagaacagataaaagtaaatataaatatgtaagacttccag

SEQ ID NO: 104774 - DNA, 1068 bp, Homo sapiens
gacatgtggtctactgtgtgcctttagaagactgcaatggcattatcttaccagtaaacaaaggattttatcttctttactgtatttttcttgtcagattgttataggtgaaattgaaggatgtctactgataaatgatgaagatgaatctgctgtttttcataattaaatattataaatgatgtgactgccttagataacaagtggggtggagactttaaaaataatttcaagtgatttgaagtaaatttatttttggcaatataagcagttttatatttttatcaggtcaattaagtaatcattggaagtgacttgtgaagaaacagtatattagtactgtaggattactttttatttgcatgtaaaagtttgtgatgtaagtatcaaatgccctagttgtaattgagcaatttgcatattgttaagcctttatcatttttgtaatttgattattaaatttcttggttctgtaccctcccactttaggcttatgatcaacatttaaatatgatcttgggagatgtggaagaaactgtgactactatagaaattgatgaagaaacatatgaagagatatataaagtaagtcatgcaattctattcattgctttgcaaatatcagctgttctctctcgaacagcttaacccatatttatgggaagcctgtcatgttttgacacctacttatggactcagtagagcatagcaattaaaagcaagggttctggcatctgacagaccctgttgccagtactggcttgaccacttcctacttgggctaccttgggcaagggaattaagttagctgagttctcattggtgagcaggaatactaccacttacctcatagggttcccagattcagtgagatacaacaatgcaaggtggctatgtataatagtgtgtaacagtaatagtggacagtgttctttcgttttctgtggatttgatctattaatacttaatttattagaaactgaaactgaaaaattttttaaatatttattcattaaaaaaacctgggccgggcgcggtggctcacgcctgtaatcccagcactttggg

SEQ ID NO: 104775 - DNA, 1053 bp, Homo sapiens
ggtaccggagggaccgggagctgggcgcgcagccggcgctgcccgccgtctgcagcccctccccatccccgcgtcgccgcagtcccggcctcctcccctccgcgtgcgcccatccggcgcccctttcaccaccgcggaagggaccgagagtcgcctgctcagtcccgctggcggggctgttattgtttccccggcaaaagggctccggctcttggtgcgggcggcaggagagtgtgtgtgtgtgtgtgtgtgtgtgtgtgtgtgtgtgtgtgtgtgtggcatatctgtgtgcctgtctccgtcaggatgcctacatgtgcctccgtatccctgtgtctgtgtttctgagggtgactgtttcaccgtgtccccagcagcgtgcacatgtgtgttccggtgcatgtctgttattctctgcgtgctgggctgtgtgtgtgtgcctctctgtgtgtgatacctgagtgtgctgtctttggatgtgtgctcttgtgtgtccccgtttgtgtctgcatgaatctgtgtgtggggggctgcgtcttccaggccctggctaggtgcacgtgcgtgtccctgagtgtggttgtgtctccaggtccctggttgtgggcactcgtgtgtcctcggctgtacccaagagggtgtccctggtgcctagagggtccaatggccagagctggttctccagggccggcgctgagtggggagaggtgatagggcagcgtggctccataggtgcatgcactccataggtggtgtgcaggtggcagcgccagcgtccagcagtcctgagtggtgggaccaaggcccggaggggcagccaaggggtagtggacagccggcagggccagcaggacacttccccctccagactatttctcttccttctgtgggttcctcttttgagtaggagattctcgtccccctcccactagggaagccacacagagagaattccagggacctcctcctacagcctcaaagcttcagcctggacttcagcctggactggagaggagacctgtgggcagctctcccaggcagggaggtgtgtgc

SEQ ID NO: 104776 - DNA, 1222 bp, Homo sapiens
tggcacagctgacgttcaagtaaatgtcactgaggagatctttttaaaatttctttttaattttttgttggctagaagggaggggatcttgtccagagtctcctagccagaaggagtttatttttatgagagagagagcgggtgagtgcttagcaaccacctgcctccctctcgaccagggagtcacccagggattgtggggtgggcatgaggaggtggggtgggggaggaatttcatcaagatggtgttggagaggatccaaagggggcctagcacggctaagaacccccaacagggtgggactggtagaatggtgggaggtgttaggcctggctcagcccccagttgaccttgggcaaccctttttctgcctcagtttccttacctgtaaaatgggtggggcagactggttatagagtaaaccagggaccagaggtaggagcttgtccccagggaactgatttaagtcctatgctttgttttaatgggtgggtgaccttggttgattcccttggtttctttgagcctcggcttggctgcctgggcagcaaggacaccagtgccggcctcactacgtccttgaggggattgagggagatgaggctgaataagcttgtagtaagctgtaaagccgggctcggctgtagagctgctgattagagggtgtcacgaggtcctgggtcactgtggtgtatggcaagggccaaggtgcattctggaggctttgtcctttggggacacccttgtactaacccatggctcagctgcaatcatcctcccctgcctccttcccgtcacctcaacctgtggtgattggaccacatctgcttttcagagtctggaggcctggtgagcagtacccattttatagatggacaaactgagagccacctaagggactttgccttgactggacaaaattaagtttcaaaaggttttccctagctcagctgtgagttttggccccatggggctttggtcactgatatcctcgggagttgaaattgaaccggggcctggggaaaatgaggaacaaaggtgtcccagtccttagggcaggaaagtgagcctatgggacccatttgcaccttgcttctgtccctagttactcattctcccttccttgtgccttcccctgagccctgctacccattctgctgcaggggtcagccctccacaaggcagtccgggctctggggactctgttttctaacctgaact

SEQ ID NO: 104777 - DNA, 1036 bp, Homo sapiens
aagtggggcctggggccctgaatttctaaccaaatcccaggcactgtggacggtgctggtctggggaccactctttgagtcaaggagataaatagtgcagttgtgagcctcctatacattaaaagccagatcctgtgcttcgtcaactcctcttcttaatcctcaccaaagacaccactattcccattttgcacatgaagacccgaggccctgctgagggcaggtaacttgcccaaggtcacacagctgggagcctgccggcattcgtgctgggccagcgccaccttggaaaggttgctgttggggaagcctttcactactgaacagtgtcctcgctccaaaagccacaggaggcttttcaaggcagccaagtcggatgtaaatcaggggagagcccagggctagccaggctgctgacagcagggcggcctgggtcactgtgtccggacaaggcccacagcgggatttggggctggcatgatgcctgggagtgggggagccactggggatgctctgggcgcctggaaaaccagcctggagcctgctggagcccaaggaagcaccttagcctctgacagcctcccccattatttaaatacattccagggaacacagctggctggaaggggcagtgatgggaccacaggagctgggacctgctgcttccgttgtttaaaggctggttcatccctgcagccacgcaggcattctccgtaatcgccgtctgctttgaggacagagaggtcgtggtcttctgctggctggggctttatttttgcactgagcacctgtcctcagcaaactgggaaaagtagaacacgtagtgactctgagtcctcaaaatgctgtccctggcccagcagtatgggcatcacgtgggagcctgcagaatgcagaacctcaggccccaccccagaccttctcatttagaccttgggggcagggctccgcattctgggttttcaagagccctccaggcaattctgctttgtatttaactttgggaagggctgatgacctctctggctgtgtgcct

SEQ ID NO: 104778 - DNA, 3189 bp, Homo sapiens
gggactttcgggaccatggctgcccacctcagtgaagtctgaggggagttcctggaaggcatttccatctgtccatgtgttctaagtcagtggacaattaagtccagaaacctcctggacttaaaaagcaagcaccgccaggatccctggggctgcagacagcctcgggggttttggagggctggctcctcaggcacccatgaaggaaggtgtcctggggtcagtattcagacccaaatgcccgcagggaccctcagggtgcctttatctactcatgtctccacacacttgctggcagagctgggacaagtcactaaccctctgtgtgacctctgattcgccatggaaaaaagagtgaatagaataaatcatttattcccagggtaggttcttggggtggcagtgccgagcttgggtgagtctccaccccttcgatttaggagccgatgccctggtgcggatctctcctctgagctgagcgtcctccactaagtcaggcacagagcacgtgcagcatagggccggtgtccaggccccaccccagcttggccgcttagtggctcaccttctgggggcctgcatgcaggccaccttggcttcctgtcattgcttctcacccccaccctcctcccagccagaggtagagttgcatccctgctcttcagcctttcaattcctagccccagcttggctcccacctccaaatccctaccctcactcctcttgctctgtggggtcccacctgggccattgtgttgcaaaggactcacgcctcctacctcctttgctacctctgtcacaaggagggggctaggttctcatttatattttctgggttgagttttcctgagagcttctgctagtctcacagcccctcaagtctcttctgggcatcctgccagtcctggacaagggttcccagacaagggtctgtctcttgtcccttaagttactggggacccagagagaccagattctgatgaggaatccaagactgggtccacatcaatgagaaggaagccaggattgattagcagtgtctgtcaagggggcaaggtgggaagaggtggcatgtgtgttgtccacatgacacccttagtaatgggcatttgctttggaaaaactgtagaggaacccagaggacttcaaaaggactctacagccagcaggcaagaggtgtcttctggataggaagaaggggacgaagtgcctctggaaggacagacagtgtgtccaggggagggagccctgctgtgccaggccttctcatgcctcggtgtgatctcacacctgggatgagtgtgagacactcacacatgaatgttgtgagacaacattcattcacttagtaaatattgagcaaccactatacaccaggcacagtgcagttggtaaagagccaggaggctggaccttgtctcaggtgggtagaaggaagctgtttgtgactgtgggctcatgagcctgtctgcctccaccttttcatccactttcctcataataagcctcctgaggctcagagaagtacagtgacctgctcaaggtcacacagcaccttgagacctcaggcctctgctcctctcagaaccaccttcctgttttggtgctgtcaagagaatagtatttggtgctacttctttgggcaagtccatcttctgcctgggcctcagttgccccatctgtaaaatgggccctatgataactactgggttagcaagtgcatgtaggagaaagcatcttggtattttgaaaataccaaatgtgtcttattaattaatattggtcataattcaggggtgatttattcacatttaacaatccagacattcagtgaagtctctcaccctaaaggagacaaaatcagggagtgtggccttctgtgggccaagcgatccctgtgtggccgagtctggaagtctcatggctgggttctggacctgcaggatgattctggggagaagggtcgtcccagcttaaggtcatggagtcaagaccttttgttttcctttggcctttctagtccatttgagaaagtcaccttttcaaacccctgccagctctgcctagtactggaaaggccccagcaagagtgtttgacgttaggggaagtttggggaaaaatctctaagcatataaacattgagaattgaaagtctgatcagtcatccaaaagttatggacttttgctgtggttcaggccccagctggggctagggaccctgaaatgagctgccctctgtccagcctgggagcttgtgtgggaagatgctacaaatcaggaccctgtcagggatggggagggcctcttgaaggtgctttgggcacgcaaagttaaaaaaaaaaaaaagctccctgaggtcttgaatatcaaaaatatgccagttgggcaccagacagtgagggcattcccagtaggggaaacagcccgtggaaaggcctggtagagagtggaagcctgtagaagccctaaggagtgcagcgtggctggggtgtcctgctctgggcaatggggaggggagaggagctgcctggggtagggggtggggttgggtctggctcagtggcctcggatctgttcagagtggttggtcttgattcactctggggaaccagccagaaacaggaatccttatttcatggttccaactgccccttaaaggtagtgcttgttgttttgacaactggctcctgaacagacaaaccctgccttcaaccaaacaccgctgcaggagaatcacaggcacggccacaagtctccagaggaaacccactctaacgaggtgtctaacccagtttgctgactcacgtggttttgggagcccgtgaagtgcattgggagggaggggacggggacacggcgctattgaaggaagctcggtcgaagccgcctgtttgacacacaacaccggctggagaaaccgttcagctggtattttcccagtgtggcagatctggagcccaggggtgtttgtttctgcctctctctgcacttagctggatgctaagaaggggcggagtcaaggtcaagtgttggttgaacgaaggcacgccatgaaagatggctaatctttcttgggcacagagtatcctgtttctcctgagagcaaatccaattgtgtattcgaggcacttccttgtaccttccttgtgtaattcacgacgatgacccattttacagatgatgcaact

SEQ ID NO: 104779 - DNA, 1033 bp, Homo sapiens
aaaatacttttgatctgggctgattcaagagacctggattctaatccttgagttaatttgaaaaataattcccctgcctcctgctggtttcagtttccccctgtgtcaggttgagggggagagacttcctggtatctaaggtcacagccaggcggtgccccagagcgcagtggttaccgatccagactccagtccaccacttcctggctgtgcaacctcggtcaagtcgcttattgattctgagccgtagttcctcatctccatttggggtaagtccccccccagccatcccaaagggtggctggttaaggattgggtaaaatactgcgtccacctgctgatccccaaactgcacatgcaagcctgcagcccagggagctgggattggccacgaggttggaggattttgcatacatttaaagcatttcgagtgtgcttttaagccccattagactctaagatgctacacagtctcgctactttcggactaattaggagaaaagtaagcagctgtaatcagtgaaaaatgatttaaggaaagaaaaaaatatttagcctgattaaaacatttctattagctagaattatgtaaagtgcccgtcacagtgccagacagacaatgtcagctgcagttattatttcagttatacaagaacaggtggaattaggagaaccaagggttgctatgacaataagccgggaccctcctcatccctacctgggaggagggctggccctgccctagagcttcctgcggtcttggtgaggaagaagaaacttctgggccggcttcccaggggaaggtgcacctgaggatgagcaggaatgtgtccttcagggcctgggaatggcagggcctcccagaaacggcgtggcgatgggggttctgtgataaaggaacccctctctggctttagttctgctgcagagcgttcttatgtggtgtactttcctggaaaacacagcctcccagcaccctgcgctgtgctggaaggagcattgtgacctcatgctcaggtactctgaggcacag

SEQ ID NO: 104780 - DNA, 1047 bp, Homo sapiens
aggtcacccctgccagcctttgccttgatttctcaaactccctttctctttagcaagtggataaaggcatgttggctctgtcctgggtccacatctgggctctgccacttgctatggagtaaccttggccaggtcattctcctctgagcctcattttccttatttgtaagttgagggccaaggtcttcatctgccagggcctggtgaggagcagcagcaatagggaataagagactctctggcaaactctcaagtccgggataaatggctgttgggatgatcctggacttagtgaggctggcagaagtgaaactcagcctggcccagcccctagatgctcacagtctggcagatgagacgtctgtgtgcacacacgcatcacatgcacgcactgtcatgagccagccttaatctctttcctgagctgattttgtttgatgttttgcccaggtgcctcccagttcattattagcaccgccattcccaacctcacctgattttcagattcacctgggaagctggttaaacaggacagattcgtgggcccccaccttgaaaattcagtcagtagggctgcatgggcccaggcatctgcatttttagccagtgtctcaggcaactctgatgttcctcatgtgaggattttggtcatccactagtccctcctaagatcccacagacttcagcaatgaatgactttacagattatgaggcccgcttacaggtcaagaaactgaggtttcccaaggagaactttgaactttatccaaagttgcacagttctgaatgagagtgcagtgtctggtgaatggtgggggtgatttgagctggaggatgctaaacggaagagtcttgggtgggcgggaagggcttttgctgggaggtgacacttggaccagggtcttccaggtgggtgggatctacctaaatgtaagagaacccacaaaccaagcacagacttgaaaggggcagtgccggggagagagtcatgctgggcaaaaggagaaataaggtggcagagattgggggcaagtcagacaactctag

SEQ ID NO: 104781 - DNA, 1097 bp, Homo sapiens
tgactccagccagccctgggccatgggggaaggagatggaaaaggggcttggctccctctgacccttcacccagcccctgcaccctggagcagagctgcaggcagtgtgaccgttgtgctgttattggcctaaacacatagcaacaggaaaacaaccccaaaaccccagccttaagagcaagtccaacagtgcgcgactccccaggtcaggagaagccccgatgtgtgcagaatctgcagatggggctgctctcggccctgcctctggctgtggaaacaggcctccaagtacccaaggtaggcattttggtggccctccccaagctcctctttctcctccagcccagctgtgggtaccaagtgccctggaagtctactgagtggtgtccagggtcccctcagacagcatcccagagacttgaccttcctctgtgtgtccaggctgtcaggcccagctctcagggactctttgaccagagacgtctttgaagcctacccttgaccagacacggaaccttgtccttcctctgaacttgtagaataatttttgtttctttaacaaaacgagcccctccctccttctctagtcgttagtgctgtgaaggtgggacgttagtgctgtgaaggtgggacggtgacccagtacccctgtgatggccctgggccaggtgtgtagcaggtgctcagtcagccagagcttttgttccctcccgccacctcccccagagagaattgccccaggtaagcgagtgcctgctcagagcagagtgggcagatgacttcccaagagcacattacagcaaagggtgaccctgttcctttcaaagcatggcttcacccatggagccggcagggtttgggcttcctgcacaaggatgttgtgtttgtgccaccagtcttaggtgttaggtccttggtcaaggggaagacattctggccacccaccccgcaggttctcagctcatggtgaggaacccaggcggccgaggtgtggggttaacgactctacaggccccaccagaaagtgttagctgagcacggtagctcccatctataatctcagcactttgggaggccaaggcaggtggatcacttga

SEQ ID NO: 104782 - DNA, 1029 bp, Homo sapiens
gattaaaggtgtgagccaccacgcccacccaggaatagcactcttaacaacaactcccttttttttttttttttttttttttttttttttttttttttttttttttttggtgcttaattgttaaacactagggccaaggagagtgcccttggcaggcatcactaatagatcctggccatcctgctcactgagcctgtacctagcccagaatctatggagacagtggtccagggagccccatcagagttccctgtttgctagaggagggctccagtccagcacgccatctgtcctgcctgagtctgtgctgtttcattagctggcctggcccagccctgtggcccttggcactgactgctccccaggccctgtccagcctcctgagccccgtctccatcatgtggcccttcacttccctgtttgcctttgcctagttccccagtttgtcagccggcttgcagctggctccttaaagacaccagaccccatttcatttgatccatagcagctacagtagttgagaacatggacttcagaggccaagacagacctggggggcatttggagcttaagtggccttttcctcatgtgtgactgtggacaagtgacttcacatctctgtgctttatcagcacaggaaggatgggagcagcacccactgaggggattagctaagaaaatgaaaatgtgcttgtagtcagtgctctttttaaaaagatgcatattctgcttgtgtatatggtcagtgcttaataaacacagctatctttttcttaaaagtaactttttttgtttttttttggagacagggtctcgctctgtcacccaggctggagtgcagtggggcaatcatggctcactgcagccttgacctccaaggctcaagtgaccctcccacctcagcctcccgagtagctgggactacaggcatgtgccaccacatccagctaatttttgtagtttttgtaaagatggggttttgccatattgcccaggctggaagttttaaaattgataaataaaaattgt

SEQ ID NO: 104783 - DNA, 1085 bp, Homo sapiens
agctcttaaaatggggaattatgtatctcggctgctgcaaaataaccctgggcccagtgccaaggaaaacagcccttgtcggcgggtgcagggacgcctgtggaggaggactcgctcctgagtactcactgcgcagcggggtgaccacttgtgtgtgtgtgaggaagctggggtgactggcctaattgcaagtttgcagaggtgcacagagatactccggggactccctggagggtgtcctctgaggtcagactgagccgcagagggacagtggaggctaagctcctaagggtttggatacatcacggtcactgttactcccagcggagtgacctcagggcgtctcttgtcatctctgggccttattgatctcaccctggggaggatgaaggctttatataccccaaggccaggggtggactggatagtagtgatagcggtagtaagaggagatagtctcaagtcataatgtagttgctgtgcatggagtgtgtgccacatcttgttctaagcacctcctgtgcaccccccctcatttaaccctcacaacactcccacagggaaggtacagttaccccattttacagatgaggacactgaagactagtggggttgagtgacttgccttaggtcacctgtttggggaagtgactttcagcttctgggttgaggcttatattctggtccctgtaggggccagggtgcctggggcagctggcagggagccagggggctttttatactgcggctccaacagccagtggggaaggttcagaggggactgagcctgagcagtaggagggactaaagcagttctgtgtggcccgtgtcccaaggagaaggggagagggaagatggggccagagggtcggcaggggcatgtgctgggacctggtgggcaatggtgaggagcctgtgttttcttctaggggtgagcaaagggttgggcgggggcatgaggacctgattctgctttttaatctgccttcagctgctgcattgagaatagatcaggggcgggcagagtagcagcagggagacctgtgaggaggctgccacagatgccagtgcaagggctgaggggc

SEQ ID NO: 104784 - DNA, 1838 bp, Homo sapiens
tatccatcaatccaacattcttcaatttagctgtttatccattcatctggccattcattcaatcatccaactatccatctgttcattcatccatctatttatctcatctattcagctatccatccatccatccatccatccatccatccatccatccatccaaacatccaaccatccaaccatccaatcaaccatcctctttattatctatcttttcatccatccatctatttatccatccatccattgttctatcccccctgccccctgccatccatcccatttatctaaccatctgttgtttcacctttccattcaaccagccatccattcaccctataaatatttggtggtcactgttgaaaggcctcttgtggcctggggcctggggataccatggccttccagttgagtatgtggccgtggtgggtctggcctccctcagatgtttactcatctcatttgcccaacctgcaggtatcggctatgcctccgttgtaattgtgtccctcctgaatgtctactacatcgtcatcctggcctgggccacatactacctgttccagtccttccagaaggagctgccctgggcacactgcaaccacagctggaacacacctcactgcatggaggacaccatgcgcaagaacaagagtgtctggatcaccatcagctccaccaacttcacctcccctgtcatcgagttctgggagtaaggccacctcattgaagcaaggaggaggacatgggtggggcagagaggatggcccacttccttatctcctcccctgggatacaggagccactgtcttcgggggagtgggaggagggtgcagatctggagataaatttatgcctttggccatagacaggactggaatcccagttctgccacttactggctgtttgaccttaggcaagccactcctcctttctgagcctcagtttctttacctgtaagataaaaagaatgaatcattactaccctgtgaggcaggtatgcatacttatgttgtctaaaaatgatacagttttcttaatgtattttaggaaaaaatatattctgttattgcacagagaaaaatgcatatatgaagctgaagtagttaagtggaaagtgagtaggtagagtgaaaaagatgcatcagttagcttttgctatgtaacaaccatccccagacttggcggccttaaacaacaacaatttatttagctcttgattgttctgcttgttggcagtttgggctgagcttggctgggcagttcttctggtcttggtctcctccacgtgtctgcaggcaactgtaggtcctccgggtagctcttctggggtttggccggctattggctggggtgtgaggggcaactggtccctgtggtttcatcacccagcaggctagcctgggcttgtcaccggccactaagcaagcactctaggaacaagaaacggtcaatccccgaaacccaagtgcttttcaagcctctgtctgtatcatttttgttcatgtccctttggccaaagaaagccacaagacaaacccagattcaagaggtggaggaaataaattctgtctcttcatgagaggagtgaagaactgtagtcagtaactacagggaggatacagaggacaaacatcagaaaggtgggatgtggagtcctgatcttggggaactcttgagtgagctgatgtgtggagacattcttctaacatagtgcttagaggctgatcaaaaataggctactgcatcatttccctcttcttcataagccagccttggggctcagcactcaagtgcagccccttgaccctggaaataactgagatgaggccttgagt

SEQ ID NO: 104785 - DNA, 1159 bp, Homo sapiens
tttcaaggtgtttacccacctcttaggagctggcccaggaatgggccagagaagagggagcggcctaccgactggccccagccatgctttggggtcagggctgggacatcgttggcaaagaaggggtcggttgccctcactggtgtggagcccttacttggtcggtccgtgtcactgtcgctgctccaggccttcagtgtatgctcagggcaggtccttaggcccactgtcactgggggttcctctagtgtgtatattttccacttacaaacaaaagggacattggaagcacaatcattgcccctcggttccccgctccctggggagctgagttcacagacaaagaaaggctggcacttcctttttctcacttgaatggggtccaaggcacagccttgtcctttctctgctgtttttggagtggcctgaaaaccgggccttccccactcctggacactggcactcagccagttactgaaggcgtttgctgggacctccttgcctcagacattgactggcctgcctgggtttgaaccctcactttgccacttctagcttaggcggaagtatcccgctctctgggccgtggtatcctcacctgcacctggggagatggcagtgctgacatcccaaggttgtaggatggccctgactgcatgagatcctgggtggccagccctgagaatccattattattattattattactgttattttgtttttgagacagagtctcactctgttgccaggctggagtgcagtggcgtgatctcggctcactgcaacctccgactccctggttcaagcaattctcctgcctcagcctcccaagtagctgggattacaggaacacaccactatgtccagctaatttttgtatttttggtagagatggggtttcaccatgttggccaggatggtctcaatctcctgacctcatgatctgcctgcctcagcctcccaaagtgctgggattacaggcgtgagccactgtgcctggccagaatccattattatttatcgagtgccctcatagtgcataaaactacccctcagggcagtttctttgtgtgttatgaacttaaagaatcaccccctattgtaaaggggtcatcctcttctgggctctgcttgtctcgctgttgtctaggacccaggg

SEQ ID NO: 104786 - DNA, 1041 bp, Homo sapiens
cccttgccttccagaatctccattctgagcaccccagctccattttctggcctggaagacactgagacagtatttatctttggaaagtgtctggttctgcaggcatcttcccaagcttctgcatgatccagatggatttgctctgtccaaagaaccctggctgccagcttggtactcacctcccactccagctctcacacctctcctacccctgcacccctagccccagattccagcagagctttgtgagaccacctgaacattcacaaataagctgccctctttctagaaccctggggaagattgagggccatggagcaggagcctggaaagcaggcttaggcaagaccagcactgcctcctgtgacctgccttcacagcacaggccgaggccagagagctacaccaggggacagctcagttccagccctgagccaggtgccgtgggcaagaaagacccggcctcctgccttcaagagccttctcttttcttggcatgcaatggtggaaaggcaagagaaccagtagggaatagttgactcctgtgagcatagtactaggaacttgcccctgtcatttctttcagtctctaagtagaggaaatagctaggcatcatccaaaactcttctttctacctcaaatcccacatccaattcacacatcttcttggctcccccttcagagtatacctacaatctgagcactgtccccatgcactgtcacccccatgggacccccatcactctcctggacaccagcactggcctcttggatctctccgtgccttatccttgcacctccgtaaccaattctgaatccaacctgttaattcccagctcagaaccctctcatggcttttcccatgctatgatctcaccctggcagaaaggattgagactatttcaacacagcaagtgctcactgggtgctgaatctcctcattagttccatgtcttcatccacctgcgtggagcagcaaatcactacctctctctggctcacttccccatctgcagatggaggagcatatgagctgggct

SEQ ID NO: 104787 - DNA, 1044 bp, Homo sapiens
taatataaaagcaataagtgatgagaaataggctcagggcaggggaaggacagtgaccagggatgttttttacagagggtggccaggaacagctgccctggggatgtggcctttgagcagagacctgaaggaaaggagcgagggagttttggaacaagtggctgagggaagcagttaggtccaaggccttaaggcaggatcgcgttcgacctgttcagggaatggcccagatagcagctagggtggctgaaggaggaggaagtgatgctgcagtctgggggatgagggtagggcttgggcgcccgcacccgcagcctgcccagaacacttcccctttacacccgttcacctgtgtgtttactaattggcaccccctcgctcttaaaagtgagtctgaatggcagggtcagaagggccgtgttggccggggagcgggagccctgggaggacgtggagcagaggagggatgtggcctgacataggtattgatagattccctctgacttgttggggcaggagtagagggaggaagaccaacgaagaggctgctggaaatcatcctgggggcgtcaggggcctggacaggggcagagactgtgctgggagagctgtgttaacactgtggggagcctgtgcagcttcctcctggggtacttaggaggcacaggtgagtggcagggcgccatggcgttccctcggcacgacactctacagtttactgagcacgccctcactgctgggtagggattggctgggatcctgatcggctgctttctggctgggaagaccctggaagtcagacacggaagggactgtggaggggcctgcctgagattcagcctgcatggctgcccgagatgtctttggaaagaatgtcggttgctctggccctgagcctgtgtcaggctgtgttgtgacaaatcctgattgatgagatacattggtttcagccctagtatgttcacgtggcccgttataaagcttttcaagaatttaaaataacttttataaaggtgatatgtgcacattaaaaacattgaaata

SEQ ID NO: 104788 - DNA, 1158 bp, Homo sapiens
ttgggggagggcaacactttatagacgaggagccagaggtctgggaaagttggctaacttcgttctgtcagtgacggaacaaacagtagagctgagaattgaacctagtgtttggcccacggttggcactgaagaaggttctgctgaagtcccaacagaaaatcagtgcccatttcacagatgaggaaactgaggctcaggggttccttaacttgcctgaggccagactaagttgaacctgggtttgcctgaatctggagtctgagtctatccttttcttttctttccaacaactctgtctcaagacaaatggggattcctgggtttggaaaggtgaggtgacttatgtaaatgcagcgcctcaggtgggatttgacccccagcctgttaatgtccgagccttggctctctctactccagggccaggcccctcactgactcctggctctgtgtttgcttcaaggcgcaacgtgctgagcttgtcccctggaatcgaccacccaggctctctgaaatgggacctcgctctctgccttcttttagtctggctagtgtgtttcttctgcatctggaagggcgtcaggtccactgggaaggtaagttggacttctgtccgtcccctgcctcctggagagctgtgccaggctggccctctcccccacttcccgcctgcaattagccacgccccaagagggaggtggccagtggtggcgtgctggtaagcccgccctctggaaaaaagtaaaactcaggtttgttgtagcgtttgtccatttcatggtgtcagtgctcccaccatgtttgctttcaagctgtccacagtttaatgaccagctcacagaattcctgaatattgaagagccaggctctcaggagcctacacgagctagccccatccaccacagctttctcatctcaaggtattggcagtcagtgcagatggtagcagataactaatgttgggcttctaataaataggttagctggtaacaggaggttagccagcaaccgtggtaagagccattagccacagcatggaccctcgctttgcagagggggccacaagcattcccatcagcattgcagggagcttcgtgggcctgccccaaacctacaaactccaaggctgcgttgtaacattatccccagataatccaa

SEQ ID NO: 104789 - DNA, 2130 bp, Homo sapiens
cacaagcacaccattttattcctttctttaaacaatgagaaaactcaggcttagggaggtcaagtgacttgtccaaggtcacttcctcctctctgagcctcagtttcctcctctataaaataggtgatagtagggttaaaatgaggtgtgttaaacacctggcacaatgcttggcacagacggttctgtaaatgctaattctcttctttttttttttttttttttttttttgtaatttgaggtggggtctggctctgttgcccaggctgaaatgcagtggcttgatctcagctcactttctgggctcaagccatcctcaaaccatcctcccacctcagcctcctgagtagctgagaccacaggcacatgccaccatgcccttcttcactctgcctcagtttccccacacagaagtgagaaagtttctgtggagcactggtcctgagcagtgctagagacatcatcacttacttacgcactagtattttttgagcctctaccgtgtgccaggtgctttgtagaaacagggctgggggacatgcagtggttcacaaaacagacaaaaattcctgtgctccaggagctgatggcctggcaggaagagtcaggttgtaacaaaacgaatgggaaaaatatataggagtcaaatggggatgcgagctatgggaaaaagtcaagcagagaaggagaatggggagtgttgggagcaattttgaatagggtggccaggcaagacctaccaagaaggtgactctaggcaaagatgtgaaggaagtgaagggctgagccaggtgagtatgtggaggggaaaatctccaggtagaagtgacagcctgtgcaaaggccctgaggtgtgtttgacccagacccttggggagcacccagtctgatggaggaggctgatgtccgccagggacagtgagcaacttttgagacataatgcagaatacaggagaatagtgtcaaagccagagagagggtgccaggctgcagctgtggccgagcaaagacgtgatcttccacgggtcctcccttctcacccttagcaacaacctccttcgtggggtggctgtaggcctcccaggggtgggcgtgattcccagaacaatagcagagcctgggccaggccagagaagccaagacaaacacagtcaggctctgtgaacttcctcaagccccatggctgagaggctgcctgctcgctggccatggcttccagccctggccacagaccaggtttgtggctgacgtgggggctgggcccacaggcagcagatggacctcatcctgccaaggccctgctctcgtgtctagtccagcaaggaggagttggagggtaatggagggagagccccagcctgagaggctcaggatctgagttcaagtcactttgcctctctaggttgcagtttccttttttgtaattttcactattccaggaagttgaaactaggctgccattaatccattcaacaaatagtgataacggtggcgaaagcgcagtagcctgtgagtgccgggcagcattctcagtgctgctaggtagctcattgaatcctcctcatggtttggagtatgtgcagttattagtcccattttacagatggggaaattcaggttcaaggaggctcattaccttgcccagcatcccacagcttgtcagtggctgtgctgggatttggacccaggcggccccactcccgacctgggtgccccacactcttccgcctcttgtgcccacccccgtgccagcctgaggatgcagtaagtagggcgtgtggcaggcatgtccctgctgtcacagagtggggtctgggaagggggcagagatccagacactcacacaggaagtgcaagccctgcagacgcacaggggaggaggccccggagtgagcatggacattcactgaggctggggctcttcgctgttggcctccggagcagctctttttgcctggttaaaaacaaagcagggggtagtcagagccaggtccttttagctctggatcccccagactgcatgactttgaacaaggccctttcactttctcagcctcaccttccccttatgtgaaatgagttagtgaagcccctcaccaacagccagggcgctgaggatccttagggcct

SEQ ID NO: 104790 - DNA, 1024 bp, Homo sapiens
ggggcatggtgaggatgaagtgggcttgtgcctgggacgttcctactcagccagtgccctgcctgaaacactaggatcgaactgtccattcagccaggcaccttcgaactcctcccaggcataatctctgtctggaaactccttgtgttgaataagatgggaaaatccatccatgagaactgaagccacaaacagcgcttgcaggacaagaggagagaaggtctttgggaggagatggccacatcgtttctagtccccacctcacacctgatcttggcctgtctggaacatgcagtgtgacccagggaaggccatgggtctcccagaggcccggtgaagcggggagcctttcctattcccagttaagggcctttgagaggcctcattttcttccctgaaggtctcgtccttccagcaaaatcagtgtcaacaacaggccctctttctggagcacctactgagtggcagtgttacaagcatcatcctattgaatcctcagctcaccccttgttgaggggcttctattactcttatctgaattctactcatgaggaaacaggtccagagaggttaagcaatgtgcctaagatcacacagcaaatgaggggacggagctgggatttgaacccttgcttatctgatccctaaccataggaatcataccaacattgtagttagttgttaactaatatgacctgcatgcaatgggcacatgccatggttggcaaccactgggctgaggcttctacacacgcacttgatagcttactctctgattttgctttttccacctctacgccctggaatgtcagttccacgaaggcagggatttgttttctgtcttatccaccactgtattttgtgcttagatggtgcctgggacaaactatttataggatgtttttcatttaatctcagtaaatctgtgaggtgggctggcgctgtggctcatgcctataatcccagcactttgggaggctgaggcaggtggatcatttgaggccaggagtttgagaccagcctg

SEQ ID NO: 104791 - DNA, 1054 bp, Homo sapiens
aaaatacaagaattagctgggcatggtggtgggcacccgtaatcccagctactcgagaggctgagccaggagaatcacttgaacccaggaggcggaggttgcagtgagccgagatcgtgccattgcactccagcctgggtgacagcgaggctccgtctcaaatttaaaaaaaaaaaaaaaaaaaaaaagaaatctgtgaggtaggtacctgtatatacccagattacagatgaggcagctgagacccagagtggttaagcaatgtgccaaaggccgcacagcaagtaagacagcaaacctggctccagaactcctgatcctgaccagtgctcccctctgcctctctgagaggatgctcagacttagcagcagcaagtgatgcccatggcctcctgaatccctctcgcccttgcaggtcgtctacttcacagccacttttccattcgccatgctcctggtgctgctggtccgagggctgacgctgccgggcgcgggcgcaggcatcaagttctatctgtatcctgacatcacccgccttgaggacccacaggtactgtggggctgggacacaccatcctccctcccatccagggctgggccggcacaggacagggcaggatgtagaggccactggcagcacatcttccgtggttcttcagtgcacaggtctagctgggccaccgccccctggtacttttccaccgggcctgtggcgggtgtgcctgtccacggtgctgatggacctttctagctgtgtgcatctcttttcatgtcaaggacgtctgagggtggccacttagagaggctgctttaggccctgcaccaagggggagaaatcttctgatgagcaagtctcccgctcggacccagcttctgcccactgcagccacaagggctgctgcatcctggggatgggagagtcggggcctggagagctgcgggcttccttggctgagggtggaattcagagttaatggccttggagggtccacgggcagataccgaaagcacaccttctggcactcagccttgtgaccttggggaggtggagaaa

SEQ ID NO: 104792 - DNA, 1336 bp, Homo sapiens
gggacctccttctgcattctaactcgggggtctgcaaacagtaacaacaatggtggtgacagcagccttgacttacgggcttgccatgtaactggcactgggctgaatcgccactctttgaacctgggaaatagctctatggggtagggcaaaggagcccattttatagatgtgaaaactatctataaactgcaggagtgatatttacttgcccactgtcattccagggttggaatccagatccatctgcttctgaatcctcttaaccctgatgctaggtcgctgggaggtggggtgtttgatttctggggctccttgcagctcagtactgccttgaaaggcaccttggattcgagcataaatgttccatttgcatgtgcaaggtcccgtccccaggccatcgccaggtggacataaccctcgctgcctcctccaggaagccagctctgacagccctcctctctttccttgccacctccctccccctcataggtgtggattgacgctgggactcagatattcttctcttatgccatctgcctgggggctatgacctcgctggggagctacaacaagtacaagtataactcgtacaggcaagtgttgcgccggcgggcctggtggactttagaaatgatgatgatgatgtttaaagaaaaagagaagtagggagcgtggcttccttgtgttgtgaattaacttgctccctgacatatgtgtaacttagggactgtatgctgctgggatgcctgaacagtggtaccagttttgtgtctggcttcgcaattttttccatcctgggcttcatggcacaagagcaaggggtggacattgctgatgtggctgagtcaggtacggtggtatcggtggcagtggtggtgggcactgccacctagtgtgtaagccaagtactgcaggcatgaagccagaccccagggggctttgaggggggacgagcctggtttctaaaatggaccccccccccgccaccaagatatcccccaaatttcaaagagtacaaagccaaattttaaacatttgtattgcaatttggccctgatgggtggcaaaagcatggggggtggttaagttggggaatttttagctaccttagtgtggtcttccccgcccccccgtccttccccagcaaactcctggtttccacaatagaaaccactttcctaactcaggcccaagtcagccaccaatcggcattccatcaccaccttctcagccttggtttctgtattttgcactttgctcccagcgtgctccctctaagcagacgcattcatccatcccaccgatttctcgtgaatgagtcccaactctgtgt

SEQ ID NO: 104793 - DNA, 1828 bp, Homo sapiens
ctacctggaggtggcaaggtcctgggctgaggctccttccaagccgaagggagagcgtgggggttattaacttcagggaccaccatagactagggccagacacagccggaggccctgccattccactgcccttgacctcctgtgccatctgtatttggaacatgaggcgatgtcccagtccctgagtcctagagccctagcactggggggtcagaaggtgcctcagcatcgcgtgtccagatgttcccttctcagatgaggagaccagcaacctgagagcaagggctttgcttgggataggtggggctacaacagggctttctgaacatcctgtccactatttctccacttgtcacacgctggacaggccttctgacacaagggtgtccccctcctgccatccagcccaccctggacacatgcaacaacctctggcccttccagtgtgagaatttggcccttgtgacctcccagagcccctggcccctcctcactgtcttctttgcttggcagagatgcacactgcccagccccatcctgagacccctgacaacactgcaggacccccttggcaaatccacatgtcacccccacacacctctccactgtccctgcttccaaagtggaccctcagatgtactgttccctccactgagcccaaagagcccccaaaagcaggccagagactgaggacacagaatgtaactccagaagtccccacgccccttagggagtttggcaattagagtggtgagggggagccagagatgatttatacctcctctgtagatggcttgctttcagctgagggcttgcaaaccaatcgcaattgagtgggaatctccaggagtatggagtgaatttggcaatgggagatacagatagatacatacaatgtatcttcctccatggacaacgaagtattttcgtagacacatatattgtcaatctcagttgttttttcctcccgtccacttcaaacaccttgtcatttattccccacggtgatgtctgaacagccggcacatcaagggtgattatttctctaataagcttttaacaagcaccatattgagtgaagtgcatttgaacaagataattatttagcctaacagagtgcaaacaagacgtggcatggcacattgtctgctagcagagaggcatccagaggttctcggagtggctggattatgtctcctggacttctctctcttgagttcaccatgcacttttagagaaagacgctcagaccctctcccagaggctcgcttgagaaaggcaaaactaaaatacagaaacgagcgaattgagaatcttcacaacgtccctggtgggttgggggttgtgggggcccattttgcatctgtcttgcagctggctggactcgattcctcattcagtgtggaccagtcagggccaacgctgatgttctgtagggaccagtggggccccggtctgggtggaaacgccgcggcttttgactccaacttcaactttgattcaaaagtcatctcaccgggtcctggggtccatatttttctgaacctggccctggttcttttgggcatgttctgagcagttttgggcttggtaacccccgctcctgatgggggtctccagcatctcagcgagcaaccactctgtcgctgcccaaggatatattttggtcaggttttctctggattgtaaaaggacacacccttccctggcacactgggggtgttaacaccgtataatgtggtttctggttccaatttattgtaaagttgggttttgctttttgtttttcattcttgagccattcgtctggtttctaatccctgctgaa

SEQ ID NO: 104794 - DNA, 1019 bp, Homo sapiens
atagaaactttccctttgcaaaggagactgggcggtcaggtcaccaccacgctcccccgcctccttccagcaaaggctgtccactcaatggctttgctttggggtgggaggatcctccctttcctttgtctctgcagaccaagccctgggctcagtctgcatcctaccccaaataaccacgccccgatggatgctggtgtgtgaggaggccacgtgtgctgtgtaggagacagatgctaaaaccgggcccctcctgagccccagcgtgtcccacccaaaggcgagacaggcctggtctctttccccaggccagagttcagacctggctccctgctgtatttgggtctgagtgtctttgtgtgagcccagggttcccagtggcttggtggctgatgtctcctcccctgtgcccctccccgttttctttcctttctaggtcctggcctggccttcattgcctacccaaaagctgtgacaatgatgccgctgcccacattttggtccattcttttttttattatgcttctcttgcttggactggatagccaggtgcgtataagggatggccctggggcgactgcccctgtggggaacctgactctgggaaagactccttattccacctgggaggtggtcaacccccttcccccctccagtcagacttccagtgcttcagctgtgagggttcctccaggacaccaggaatagaaaaagctctgcgtccccagaaagtgcatttgaacaagataattatttagcctaatggagtgcaaacaagacgtggcatggcacattatctgctagcagaggggcatccagaggttctcggagtgggtgggttatgacagggacaaccagggtttgtggttacagtcaagccacaaatgacgaattggaggtcatgactcaataagtcatgatgtgctccagtggagcgtcggcggggcacaggaggacatggcagatgggcgattcggagaagggacccacatttctgtgtgagctgatcattgtctggg

SEQ ID NO: 104795 - DNA, 1081 bp, Homo sapiens
ccttatcttccacgaggatggagatcagtgagggaggttgtcatggcaacacatatatgcccctgaatgtgccaggacagagggtcagcattggcttcagaggcgcagttgttctcaagctcagctttggaggatggggaaaggcattctggtggcaggaacagcctgagagaagatgcagaggtgtggaatatttggccagctcggtgtggaccaccgaatgttgcgttgtctggctccgaggagtggcaggcgggactccccaggcacagtcagggaggccaggcttccacacttggacttgatctcacaggccaattctggacacaaggatggtcacgtctgctcctgcattgtgtgttcctgggcccttccctccgagcagcaggcaagggtggcctgagcgtcagccgctcaccagctctctctcttcccctcctcagtttgttgaagttgaaggacagatcacatccttggttgatctttacccatccttcctaaggaagggttatcgtcgggaaatcttcatcgccttcgtgtgtagcatcagctacctgctggggctgacgatggtgacggaggtaggtggctctctcagctgtgtttcaggcttggtgctccagtgccctcctcaaggccatagtggaggcagcagctgggtgagagggccaggtaggggcttcatctcccagccccacccaattcaggggtcctgcttggaccaacactgggggtagcacgagggggctcaggagcccacagctgacccaaactacccaattattttgcctgttgctgtggcaacactgtgaccacccgctgccctctgtcctgggaagaggatcttcagctgaaatccatttcacaacatctctgttcacccctgactgtgtgcccttctcaggcctgggggtggggtggagacattctcaagggtaaacgcaggcctcccaggaaataccacagcaccacgtagaggtgcaccaccttgcaggtcacctgccacaggaccgagtcctggtgggtatgggttgatagggggcacatacactattcagagggtgagcaggggccaggagga

SEQ ID NO: 104796 - DNA, 1644 bp, Homo sapiens
cagttctccgaaaacccaattcagggcttcacttcaccatttttccttaccagaagtaaaagtgtttttctggaggtatttgtaagaacccccaccccagaagtcagattttagggccactcactgagcagctgggtgaccctggagtcttctctgtcagctgcacttggtgtgaagcacctccttgggaagcaggctcccgtggacccatcattttgctttcatttatctgtatgtgtgtttttaattacatttgtcaaacatgaagttgagcatctttttgtatatttatctggtcatcagagtctttgtccatttttctcttgggtttttttaatcttattgatatgccagagctctttgtatatgaaagaaattggagaccaggtaggaaatcgaccttctgtggtttttttcttcacagggtggcatgtatgtgtttcagctctttgactactatgcagctagcggtgtatgccttttgtgggttgcattctttgaatgttttgttattgcctggatatatggtgagtacagattttttcatgtcctttctcaaggctctcctttgggcttctctacttagaagcttcagaagcagagaatactaacagaaattcaatttgagttgaacagtaggccctccctacctagactacacaaataatctcactgtagccacactgaagatcctcctggtgctaaaggtgtgaggtgtgactggatgttttcacagtttcagaacttggttgtgcaggacctggaatactccttttttatctccttgaggccttgggtttgagtttgggctgtgcctaagattgcacacctagggtttggagtgtgcctcagattgccagaaaaatacaagatgcagagttatatttgaatttcatgtaaatgtctgtttttgccacacttgtatatccatggtgtggagatgcagaggcctggatcaggtcccagagaccccactcatggcccctgagctgctgctggccttgaacgctgtgtcagaaaatgtccccctctgtctcttgcaggaggtgataacctttatgatggtattgaggacatgattggctatcggcccgggccctggatgaagtacagctgggctgtgatcactccagttctctgtgttgtgagttccatttctgtggctctggctggtggcctcttctccctggggcttgacattttcacccgctaaaccatctttcatgcagcatctgttcagcgtgggcttataataaacccagcttcagcgctgcctgggagaggggaggaaggctgctccagggagttagcttgagttgagttttgaaggataagtaggaatttgtcaggagtagaaaacaagaagggcatttctggcagaggagccagcctgtgcggggccaaggcatcctaaaagaagagggtgtatctggagcatgttgagaaatccaggggatccagaattgaaagcacattctttccccaaaccttccagagcgcatgagctctgtttgggtcactggggaagtagaggggcctttgggatatctagtagagaggtcatagacattggaaatggggtgtttccatggagaggtgggggtagtagcttagagaggggaagtcctgggttctcccaaggat

SEQ ID NO: 104797 - DNA, 1053 bp, Homo sapiens
ttcttcccacgaggatgctctcgcccaccatgttggagttggccttggcacctgcccatgcagtctgcttcatggtcgcactccagggtgccagtgagtggaattcctccatggcaaagccgtcagggtttgcaatcacttgtgatcattggagcttattgccagggagaccacatccatcctgccattcacggctccactatggggagcacaaatggcccaatattccttggatttaggagacaggtgctgaggacaaataggccctcccctccgtgacctgctatcaggccagactaagtcaatgttgctgttaactcatgatatgacctcaagcaagtcacttccctctgtgagcctcagtttccccacttgtaaaaccaggagactgtgaaggaggaccccggtggcagctgacgaccttagactgttactgttatttaatatgcatatgaagccttttcctctgaagtgcagactttctcccacaaaaataagtaatggtaagagccagtaaccacaacaattggtgagtttatctttggagatgagtttagttggcccacctgtgttctcatcctggtttaatgtttgcttgtgggcagctcttctcagcactctgaccctcagtttccttatctctctccctgaggagctggatacgtcagagataggctgcattcccaggtggtgagatgaggtcaccctcatggagaggaatgggaaacaggcaggcactggctcaagctcctcctgcttgggagggcccagggcagcatctcttgggactcactcatctgagccacagccctacacgtagggacgggaacaacagcagggccagacgtgcagttggtgcccagtaaaagatgcctgcaggctagtgctctcccttgcccatcaccgactctgctttagaaagatgcatcttcctgtcaaatcccagttactaggtgttgaagagttaggccattttcacattatggaacaatcagaggccaccctgggccctcctcagagatgctgtcattctgactagaagcagaagccccg

SEQ ID NO: 104798 - DNA, 1159 bp, Homo sapiens
cactcgctttctggaaggagaggtatgggtggtgcctgggcaagtaaggcagacccagtggagccaagttaggatgagaagatgtgggggaaagagggccaggcagaggaaacagcccatgccaagacccagagttcagtgacagaggagctagaaggaattcttcagggtggctggagtgtggacacggagggagagttgaggcagatgagggaggaaggggtacagcttctgctgacactcccggctgcaccgaggagtttgggctgcatctgctggcactgggagccacagaagggttttgagcagggaaacgacttactgtgtttttaccggggcgggggggatccttatggcagcagagaggggtgtgagttctgagccagtcctttcccaaggagagagacccttccctcaggttgaggccagtcctagtcccagaagccccccaccccccgatgcccaggacccctctcctgactgcccccatctctccgcagggatgtttcatcttctcgctcgtcaagtacgtacccctgacctacaacaaaacatacgtgtaccccaactgggccattgggctgggctggagcctggccctttcctccatgctctgcgttcccttggtcatcgtcatccgcctctgccagactgaggggccgttccttgtggtaagtgcttgggcccagggccaggggaggtgggaggcgcgaggccaaaggtgattgttgtcagtttgctgcgtgatctcaggcaagtcacctgccctctctgagccatagttccctcacccatccagtggttcagcttatgggcagcagagtgcattgtgggaagacgggaagcaagtagagttcacatgggagaaggctttatggagacattggaagccgggctgtggggtgaggaggaacttgccagatggagaatgtgagagggaaggtgttcctggtgttggcagagttggggtgggcagtgaggctggagaggtgactgtagctttggatgccaagctaagagctggggctttatcctgggaccagtggggccatgttcctgaagcggtgggacaaagccaggagcctagggaggaagcctgagccccacccagatgccttcttttattgaggagccaaatttaggatcatcccagcccatg

SEQ ID NO: 104799 - DNA, 1835 bp, Homo sapiens
gagaatcacagggaggcatattttagttccatagaagaaaaaaagcacatgaaggttgagtcccccatccctgtaggaacgtaagcaggggtttggccaaggaaggaaaccaccaacaggaattccgccttgagtcagggcctagtggcaccttaggagcgccttagttcaattccattatttccaaaaaggacaaaaacaggagatcagagagggtgtgagtttaccaaaaaccaaacagcacatgagccaattcaggaggaggcagatggccctggcgaaggggagaccaggccgcctgacgtttcccccctcactcctgtcatccttctccagagagtcaagtacctgctgaccccaagggaacccaaccgctgggctgtggagcgcgagggagccacaccttacaactctcgcaccgtcatgaacggcgctctcgtgaaaccgacccacatcattgtggagaccatgatgtgagctctctcgggtcgacggggccggcggctttcctgctgtttactaacattagattctcataggaccaggtttacagagctttatatttgcactaggatttttttttttttgtaattgtcacagaaaatgtaattgtgggtatgtgtgcgtgcgtgtgtgtgtgtgtgtgtatcgtgtgtgtgtgttttgttttgatttgggggatattttgtacaaaaagaaaacccacgggaagatgtccgtggagaggcagagctttcatactgaattagatgtattttatgggaatttggtaaatttttctttgtatttttttttttacatataagtatatatacacttagagattgtcatatacttttaccacttgaattgatcttcttgccagcaatagatctcattttcaaaagcaattcttcggtgctgtgtagctggcagaaagttctgtccagtaaacgcaggatggaattttcctgggactctacacccatcttaaggtggtataccttccaaatcctggttcagatggaagaaatagcaggagagaggacccattagctggcagacccagggggaagaaaggagggctgtgaggagatacctcattaaacttggcttagtgaagaagagagatgccaaaggaatgaaccaacccttcacataaaggagactggctgaagctgaatgaggaggccctatagcagaagtctgattctaagagcagtagaaacttgtaccagaagcaaaatcccacttttaattttgagatggtgagtggatagtcagtagaccgtcagaaccactggccagagagggagctgctagagatccaagaaggctggcaggagtgaggctcacaactcagcctcgcaagaggtggcagaggcacaggaggccacagtccttcctggggcattccaggcagagaaggagcagaggctctcccggcaggagctggggtctcagggctcagatgagtctgttgcatttgaatggggtcatagcaggttctggtcattccccaagcaacatctcagcatctcttaaagttgcctgcaggaatgaagcatgacatacctgttgagggactaggggagtggtggggaggtgagtggaccaaaggatataggccccaggcatgcagatgggcccggtgtcggggaggggtgctttctttcctcatctccccactccccactctcagcctgggagactcctgccaagccctcattaaagatgccaccctgggctgccctggcacctagcaaggcacaccaagaacagcttttgagtctgtatcctccactgggggaagtgctcccagttcagaacaagggcagcccgtggtgctgacctag

SEQ ID NO: 104800 - DNA, 1119 bp, Homo sapiens
ctgtttttctatgtatttatggttgccgtttgtgtctgatttgattttactgttttttccctgattttatggagtagcattgtgacctgttttcctttgtcttatataactttagtaaactaaccactgtcaatgattgagggcaggtggcacgtggggaagaggggacttggcacgcagtggctacctgggcatttgtggtcatttcagtttccatctccccagcgggggctccctgggtgaaaggccacagtattttgggttggtaggcaaattgcaacattctggacatggcctgaggaaggcctcttcttataagattctcagaccaaattctagaccaaagacacaggcagaccaagtccccaggccccgcctggaaggaagtcgttcctcaactctccccaaggcacctgtctccaatcagagccctctcgcccagccagccctggctctgtgtgcagagcatagctctgcgagtacctgtgtaataatgctcaaccttcatgtctccgtataaacgaaactttccatgagagctcatgactctggtccacctgtctatagagaatgggcaaagtccttcacctgctttctgcttgggatgggtcagaaatgctgatgcccgcacatagcccagccagccagatctggaaaggaagcgagggggttgtttaaatcaattttttaagatgaagaagtgggagacactgcgttgagatgggccatgctagggccacagagatttcctgacggtcagggagagaagggcctccagggtcccctaacccaacgcccttgttgtaaatgaggtaactgaggctcagggaggcactgtgagccaggaatggattttcttgaaacagctctagctgcaggttctccgaggtaggtgcagggaatggtgagtgtctaaccagggctacatccagcaacatcctcaaggtcttcctgacaaccaaagacaagcctttatggaaaaggaaatgcgctcccctccatgttcagggatgaggggagcagcagcagccacactcccaccatcctcacagaattcctggacccatgcggtggctccgtgagctgggtgactccagcctcacctgcacaccccagccc

SEQ ID NO: 104801 - DNA, 1422 bp, Homo sapiens
ttgagatccctgtttgtgaaagagggaactgaggtgcagagaagccagaggtgtgccagatccttaggcaggatttagatgaagtcgccctggctccagactgaccccgaggctctgcggggagtttccaggcagcaggaagtggccttggatgctctccttccaggacagcataacccctgggccatgtgcagctccttcactgccccctggatccccagcatacccccaaagacagtggggaaacacaaggggagagcacagcatggcccctccagcccacttcagggcactcttgtatcacccgggtaccgccacactggtcccccacccagccagcatctcccagcacagcccctctccctggggaaatgctctgggtagccagtctaaaggcagaggcacctaactgctccccgcagcccaccccacccaagattcagacacaagccaggaaaggacccaagagaaaatccttcaaggtggcctgaggtcccatccctccctcagacccatgtggtcccaggccaggctgcctgggacacggtaaataccactgtgtgcaaaaatcgaagtacaaaaccacaagactaaacaaaacaaacccagagagccaaacttgtagaggtgggcagtccagaaagcagggggcagccctccccctttccttctctccctgatcctcagaatatatattgttgtaataggaagcatttttgcattgttctcttgtgggtgtcactacagacatgttctggcgtgttctccgagggatggagcatcctgttatatatttgacttcaaattgagatgttggcttcattttttttttttacccaattaatctcccaatccctagcaactgtgactctgtatttagcacaagagaaagctgagaatgtgggtcttgcctccttccagaaatatgtctggctcatcaggacatttttttaaaacttcaaaatatttttaagatattttaaacttttataaaaaaaaaatcaaccaacaagagacttttctgaggaggaacatttgtatttgaacaagatccttggtgtgtagttcagtcttgcagtatacaagcttttgtgtataaatgttttatgatatgattccctgtattttgcaggggtttttttctcttttgctttttagataaatatgtatatcaatattttaaattcatctttgctttttttagaggagtttgtaatcaccttataacatgaaaataaacatttcctttttaacatccaacatgtgtgggttgtgttctggtgaggtatttccccctcaacgtttgccaaacgctttacattttataaagggcttcccgtccaatcccaggacgctcctcaaaggtaggtattttcccaggttagaggttcccacatggaggctcacagaggaagcagcttg

SEQ ID NO: 104802 - DNA, 1006 bp, Homo sapiens
gggtggggcaggacacttgctggggctgtctgtctgaccctggccactgtcctgtagcaggatggctgagcctcccccagggctgtccagcacaggcaggcagaacaggcgggtctggaggttccgagggcagtgctcagccttgtagggggaaggctggtcctatctgggtgtgagcgaagccttttgcccaatctcaggatctgcacagctgcctggtgggagtgagtgtccgacccagaggggtgagagcccaaggcccatgggcaaggtggtggtgaggagttcctgtgctggcacagctgggcaggagactggttctcggcaggaggagaaactctggtttgggggtctgactggtgagcccctggggctctgggaatgtgtgggatgggggatcacagctgccacattcctgggtgtgctgaggctgggacccaggggaggggcagacacgattgttccatctgtctctccagcctcagcctgggctcaccctattcctccaaagagggagcttggggcctggaccagaacatactgcattcactgccctggggttgcctcactggtttcttcccacgctcttgacatatctttgcaccacagctccaagggcaaggactgtggtcccagtggacagaggaggaaaccaaggctcagggagggcagtggccgagctgggattgacaccccgatgacttttactgcagagcccccagccctgcttctgagggcccagtggactttgattcccacctcccttcccatggcaaggagcagagccaggtcacctctggacccagccttagcgacccaggaaaaataacactcataatcataatagctggctgttgtcgagagcttcctctgggccaggctcttttctaagctttctgtgcattttctcatttaatcctcataactacactgccacttgggtactgttattctctccattttgcagttggggaaactgaggcagagagctgctaagtgacttgtt

SEQ ID NO: 104803 - DNA, 1051 bp, Homo sapiens
aggtgacgggttgataggtgcagcaaaccagcatagcacacatttacctatgtaacaaacctgcacatcctgcacatgtacctggaacttaaaaaagaaaaaaaagaaataggaggagaaatcacaggaaactggctatctggtctgaaatcccctccaaactgtgtggcctctggtgagttcctgaactattcctcagttttgttatctgtgaaatagggatggtgatactaaaaatacctccctgataaggttgttgtgcagattaaatgagtcaatacatgtaaagctcttggtgcctgactcacaggaggtgctatgtaagtgtttgccactatgattagttgtattaatatcgtggaaatgggaggggcacctgaggaaccacggctgcagggaaagcagtgccagctgatctgaaggcctccttggttgctgttgtcttggtggtgcccagggtgtgttccccactgcaccctacggcctctgagtgaatctcagcatgaccttgtgcgggaggctgggtgaggactgtaagagctgtcgcaggcaggaaccaagctcagccaagcttattcaccaagaggtggcaggagctcagccccagcctggcctccaggcccccagccagcgctccctggggagaggagggagagggctggtgcacttcccaggaacctgccggcctttggagggggccaggcacaacttggtctggtgagggaggagatgctgagccaaaccactggggtgcaggaaggaactattactacttatctttctttttattatctaaaattataaagaaaggaagctttactggtatttagtatatggattgacaatggtacatatgttcagtttacaagtgcgtacacattttgggggcatatgttcccaaatagttttatcaataggagtgagagatcacaaaagttctgaggtccctgtgcaagggtaatcgccctggtgccagtgggctctctgggggacatttgcatgcaattatgcactgacaatcactctgcaattactgcaggacccagcagag

SEQ ID NO: 104804 - DNA, 1034 bp, Homo sapiens
ttttgttggtagtataaattactttccttgttacattgtaggctctttgaggcagagagtatgtctaattcatgtttatgttctgctcttcagcgttatttctacagcatttcactgtagaaataagttgtgatgatgaaatgagtgcagtgctagtcagagagaaggtgcttaataatgcaagtttaatctgaaactaaaagatgcagactttattaatttattttgctttatcactttctccttgcctaaggaaagcctcgagtgttgaaagtcagagtaaaaatgcatttgcagcagaggtagaatgaaacatgacttagcttaatttgtgtactggattctacatttaaacatttagttacttaaacatttagttttttagccatatttgtccatttagcggaacttgaaatattcctttggaaattataataatttagcaatccagtcacctgcaggaatttaatatttttgtttacttactgctttcattctagttggtagatcttaaggctgaactcttccgaaagcaagaagaattcaaacaagaaaaacttctaaaagattctggagtttttggaaaaccaaaaacaactaacaaggtaaaaaataagatctaattatctccattggttccaaacatgggagaattataccatatttaagtgttttaaaattgtcagtggtatctgtacacataaatgttaaggaaaaatctctatcttgtatttaacatctgcatgaaatgttattaaaatagaaattagtaagattatataaaagtacatagtaatgtgctaattctttagcacttcttttggaaaaatgtggattgtttacatttcataaacagatggaaggttatctggttctataagtgttaggtatccaaatagagataaacaattagataatataggaatatagcggaaaatatcagggtgtataagagctgtgaatttttccagttttataggtaatagtgtctactatttgtattactaattctctgtaatatgtacattttcatt

SEQ ID NO: 104805 - DNA, 1050 bp, Homo sapiens
ccgaggcaggcagatcacttgaccccaggagttcgagacccgcctgagcaacatggcaaaaccccgtctctacaaaaaaaaattagtcaggcatggtggtgcgcacctgtattcccagctacttgggaagctgaggtgggaggatcacttgagcccaggatgttgaggctgcagtgagctgagatcgcaccaccacactccagcctgggtgacagagtgagatcctgtctcaaagaaaaaaaaaaaagttatttatataattgagggctctttttttagctcctgcttgccatgtatagtcagtatctttgtaggacacagcttatctagttatctccattgattcataagaactcatgatctcctttgtttttttttttcctgatgcacaagtagagattttttggcaatcatgtggttctgttttgtcttctaaaattattctccagaaaccaagtatctggagcaaacagaatgtaggcgtttcaaatcgagctgagaaggatgctgaacagaagattgaagaacagaagactttagacaaagcaaggtaaagttataagctctggtaaatatagttagctttgaggctacccaggcagagaaatggaagttcaaattttgtcctttttgatttacaaattttatttttaacatccttctagcccaatgctctaagtactctaaaaataatataatttgcagatatatctgtagtcttataaaaaggtaaaacatagtcacagtttataagatgaaacattcttgctgtcagcctttgttagacactaagattatcaatacatttttaagaggttttcccatggtgtgggctaggtgggatgacactagaatttagaaaccctaaacttcccccccaccttttattttgaaaaacttcaagggtacatagaacattctaatattcttcacctaaattccccagttaacatcttgtcacatgtgctttccctctctctctcttacacacacacacgcgtgtgtagagagactttaagcttcatactttccctgtaagtcgttcagcct

SEQ ID NO: 104806 - DNA, 4370 bp, Homo sapiens
atgcagttttgcttccgtatgatgtaattggttggatgagttgcataaaatcagactgttgtgttatcttaaaatgacattctaagatggttttgctcactcaggtagtgtattgatgaggcaatagaaaactttaggctttttcaagatttttttgtgtagtatatgtcagttcccaaggtagctgtgtgtctttgtaaacatttggggagtggaggcattggctgatgagctgtcaggggtgatggggccaccaggcaatgaatgtgactgcttcttgtccattccatgtgtgattttcctttttgatgtctgaaaactgatttttatgtcctagatgaagaagtagaggatatgtaccttgtggatttcacacagaagatcatagacaagcgcaaagaaatggaggcatctggtgcccatagagattctcaaaaggcaggagaaagggacgacgatgaggaaaaccttcctgagggagagatccctcctccccaagaccccagtgaagaatggttggtaacatcatggattagctcagaggaacatcctcagacttgcgctgacattttgggagtgattttgttgggttgttatcgagccatttctctttattcttcctgggtgttcttttgagacttccctttaagttaggttggattaggttattatagttgtaaaaacagtagctcaaatgaagacataattacaataattacaataattacatataattacaaatactgactgggcttctgctgtgtgcccagctctgtgccaggccgaaggaaacccagtgcctggcagacttggcttgcctggctcactaacatgaaacagtgagggcagagcgccttccttttgtacctgtgctgctgccttacccgtgttcttgttctgacatggtggagagctgtcatctaggagaaggaagccggcagaggtggcacagtgtgttttactccgcctgtgacattgtttggcactgtggtgtggactcgtgggccttggatggttccatctgcaccttttactggctgtatgatcttaatcaggttccttagtctttgaggctcaggatcttccattataaaatagagattataatgcctcattcccatggccctttgctttaacacccccccgccccccttcaagaagtaagtgttccaggctacacaagaaagtgcagcctgtggagtataagcaggcattttgtaaacttttattattgtcattttcctgaattttgcctatatgtagatgaatgatagaagaaccaaactcgtcttttccttaaagagactttgtatcaataagtagagagaccagaatgggaattctgttacaatgatttttttctacctaagatattattgtttggaaactgttcagcagtgcttgaaattgctgagagctgtactgatgctctgacaatttcctgggaacccatcctcttgcctttgggattcttcttatcctcctttcaaggctcaaatgtcctccttgtggtgggcatttgttaggaactgctcaggactctttgtagcaggcgttcatcttttgtcagcctttggccttgtgggcagtcattgatgagctgaagagagcagtcccagctactgtggatggcagagaaactgcatcttcattctactgagggtgtccatgttggtttagaaataacattctcattgggataaaacaggtatctttttacctactgtcttaaaaacttagatctaaatagtttgataccatttggaacaggtgtcagcctgcaagctataagaaaccaaaagagaagaacatgcagtctcttcttttggtgtctttcttcatcatttctttctttcttttttatttatttgtttttgaggcagggtctccacactccgtcacccaggtgggagtgcagtggcatgatcatggctcatcacagcctcgacctcctgggctgaagcaatcctcctgcctcagtttttaattttttttgtagaaacaaggtctcactatgttgcctaggctcttcttgaactcctgggcttgagcaatcctcctgcctgggcctcccaaagtgctggtattacaggcgtgagccaccacgcctggcctatcatttctaatgtctaagtgattgctccctcatctgaagtcaggtagcacttaatatacttcctgctcttcgggtattaccttttatttattactgacacatactaggcctcattatcagaaaaagattttagcaaacttttggtagtctttacgtacccagtgttgttaataagcgtttcatgggtgtgtgccttaacttccctagacccttggaagatggcatggctgttagccctcttgtattactctccttgcctggggaaagctttgtttgcctgcaggggttgctcagtgggtgattgctgattagatggagccgtggctgactactgtcttgcctcttctatttaatgagatctgtatgttttggaggccttctccagaaacagaatggtctatgattgcttttcatagcagaaatctcatctcctttgaaaggtctaatgtctttttaaaaatttttgcttattaatgcctgtgtgattacaagcaatttgctagtgatttgaagagtttggagggcaattgaaggtgtcacatgccaccatatggtgaaggaagacgctctgcaagcagttctgacacatttttttgtttttaaattaagctccagaattgtaattgcttgtaaaatccttttgatagttaaattccaggtggtagaaaatctttccgtaaagatactgtaaataattacacagaccatctggctagatggttttcttcccccatccatttggggggaaaaaaaggaagaaagaaactgcttgctgcagttggaggttttatttcttgtgataatcagcttcagtactagagtaaacactcagtttttaaatcacaactaacaattgaaatcagcattgcttgagaggaaaaaaaattgctaacaaaagcaaagccacatacctgccaaatctgaccttgaattggtctgccagctagtacttattggaccttactgtgtattcggtaccctgctaaaggctctaggaggttctctgcccataatttaaaaagtaaaatatctgttgcgtcataatacaaatgagatgtttttcatgaacatctgtccgtattttccattgtaggaagtcagaatatttcactttgccttgctatctgcctggcttagctgtctgaccactgtctagtttgagcaaagatgaggagagaggtatggtgtttggcttcctcctaattaagaagagtccaactctgaaaaatactgtgcatttcttacattaagagtttgctaatacattgggtagaattataccaattagaggaaataagagaaagaataaaaagtcagacttgaagactgtgaggaaatgagcaagttgagaatctcaggcacaaggcaaagttattaagatactgataaaatgtctggaattgtctcaactaggttaaagtaagttcgtagatgctgcagcaaaattccgtgtgggtgatttatctgtgagatcaaaggcataaatgatcaaaattattgttaacagtttctaaaactaatatttaataaggggcacaatgagcttattgtgtgtcagctttaaaaagcatattcctatcagtggtagtggtctctgaggttgggggctcttcttggtagtgaggcctatcttcccccttcactgttcacctactccctgacttaggggcttgtacatgtgtacaagtccttcttcacatctttttgctttcatttcagggtggattacgtggactctttggggcgttcccggcgctgtatgagaaaggatttgccagatctgctggagatggataaaaatcttcaggggagactgtaagtgtgtgtggtatacagagctctgccaaggtctgaaatgcagccacagggattgttttgtgaggggaggctgttttataattaatgatctctgttgctccagtaaggagatattgattgattgattgattgattgaagcactttttagtggttagcatgcacatacacacataatccacacttggggaacaacctgactggtggatgagtagagctgtctcttttacttggaaggatgtctgacaacagagtaacagaataaacccaaacgaaaccagcaaaccaggctttgtggagacaagtggtttgagaatatacacttgattatcccacaaacaagtggctctagggagagaacttactcactttttctttatgtatcattgcatttttgaagtaagggccttataactagatttttcagcagggcctaag

SEQ ID NO: 104807 - DNA, 1036 bp, Homo sapiens
tctgccctagatggtcatctagtcccaggcttcctccaggcttgctgtttctgccatttcctagagtatttttctcttctgcatagtcaaagcttgctcccctgctcacctgttcatgatccagcctaggggtaggcagggagactgggaaggggagccaccttcctttttagagatgtgagtgggaagttacatacagcctatgcatttacatcctgctggccagagctcagtcctgtgggccacacctcactgtaggagaagctgggaaatggcctctccagcaaggtggccacatgctcagctgcaaccggggggcattctgttacccaaaggaaaaggaggagtgtgggtatgaagggacgtatagctctccagctctcacaaagcttatgtgaagccatgggccatttcctaatgtctgaacaaaacagaccagaaacatttaggaatttgaaaaccatctgtttagtttcagataaatgctcgctctataacatgttaagctgtgcagattgtttctcaaattttgctccatctcctgaacatctgtcatgtccagaaaatgtgaagcgccaccacagtgttttttaaaaatccatttttcttttacattttaaaaatgtgaccaaaattgaacagcctacaccagaccccagctgttcatccccttggctctgcttgcttcgcctgagattgtgatgttagttgagtgatttggggatttctggtcctgcaattgccagtttggagaagcagagtggcatagtgaggggcacagagactaaaatccatccagcccagcccaggactccagcccgtatcactttctacctgtgtaccatttctgagcttaattttccccctctataaaatggggataatatggaagtattgaatttattaggattgttacaagaattaaatgacctgttgtatacaaaagacttaatccactgcctgggacatgttaggtacttcataaatactgatggttacttttactttcaggattagcatgttctgtatttttaaa

SEQ ID NO: 104808 - DNA, 1040 bp, Homo sapiens
aagatgatagccttctcaccactgggtgggcacacgagctcgtggctgtgagcctgccctgtaaacatggaaggtgggcaccaggcaggccatcctggaatggcgaacttggggtggctccagagggtttgaaaagggaaagggagcattgtctagtggaaaagaagacgtaggtgtgttggctggagtggttgtcaggataaaaggtggtcgaagagatggttggacagctgcactcactcacaagtgtggtcagaagccttgggccagcagcccttcctggtaagtgggctggttagggttgttggagttgggcaacaggaacaactcgctgactctgcatcaagatgctggagatggccatcagcatctaagtctccctggggttgacctttgctacgtgctgtggattcttgagtctttcacggaggctcacactctcataaagtcccttgggaattacaagaaacaaatcatttttgtgtagcataagatgtgactagttttaatttgatatattattaaagactgctatcaggttcattttgttcagaaaaatgaaactttcaggatctggttacaaaactctgccagtgtatttacaggtttttctagccatttttttgcttattaaattgttctttatgcttcctttcttcaaccagtggtctatttttggtataagttaagaaggtaagaataaaacacaatgtagaaatatgtcagggtaaacattactgtagtattaaagtggaaaaatatttattatagtccattgattttcaggcacattttccaactttaacatctctgaaattgtaatatgtcttacagtcaatggcagcttacattcatttttttcttataagatggtgcatcttttgatcactaatgtcttggatttgatgaaatttggcaaattatattagtgattgagcttagtaaatgcattgtcctcattctttcctgtctgccctcagatgtacacgttggataattccatgcccatcttggcattgcgaccaggagcttctgcatcc

SEQ ID NO: 104809 - DNA, 1048 bp, Homo sapiens
aactaatgatgtctgcagcgaccctatttccaaataaggccacgttccggggtcttggggtttaggacttctacatatgtatttgggggacatgtgttcagcccacaataccacacatgatgacacatttcctttgccccctgtcatctctcctgtggtcacttacggagccctcccgccccaccgcaggcatttgctatggtcagtgttgggggtgcgagtgtagcagcatttgggttagggctaatccagcccaaaatagaagccagggaagccaacctccagcatgtcactgggtccccaaggaggtcagagtctcccttcgctgccctcaggaggagaagcacttgtgtccttgtctgtccaggctcccagaacactgatgggacagcgtgcagtgcaccctgggccctgagcactgcccccgaccctgcctcccctgcagtgttcccaactctgtcctgagcctggaggattctgaatcagtcaagaaagccgagtcagaagatatccaaggaagcagctcctcattggccctggaagactatgtggagaaggagttatctctggaggctgagaagtaggtgaccacatcagctgccagaatgggcgtggctcacagcaggccacctcggggctatttggccttgggcaagtcactacccccaggcgtggcctgggtcatgtccaaccatcgctgacatctagcccatgtaatcaacacaatattgggcgggcatgcaggctgccctggagctgctcgcagtggtctgggtggtagagatggaggccttttgtagactttgcagcagaaccccacagcccagacccattagtctgagaagggtggagactgccccgctgtctccttgcaagaaacttgctgcacctgttaaaggccacttacttgctggtgctggtaaccatgaaatgaatcacacattcggcatggcgtggaaatcacatatttctcatgaagatagaaaagcaaaattaggagcatgtagaaaggtcgcaggtgccaccggggccctctggttggaacagc

SEQ ID NO: 104810 - DNA, 1102 bp, Homo sapiens
gtttggaatggaatgctcattaggagaacctcagaagattctacccgcccggggcagcagctcatgagtgcttgtgcattgcagacagagcagttaaggattctgctccgccagcccagggttgttacagagctgcttatggttgaaatgcagctcgaattacatgcccaggagtttgtgtttgggccacgttgtgcagcatgcgtatgaggagagggagcaggaagacccaggagagtgaatgtgttggctaactggtgatggttgtttgtgaaatgactcattttgggcaaggattgcatggagtgatgtgtggaaggagagagagggggaccaggtaccactgctggcctcagtggactgagagtctgggggtaggaagaggacttagacccaagtcactgaaatgcaaggtagaaaaggcccaggacccaaagagtaggagtccagaggcgggcaggatgtcttcatggacaaagtggcacttgagtagacattgcaggaaaagtaggcttttgacatggaggcaggagaaagaggagagaacgtacaagaaataagactccaatgaaaatgtcttccttcattcagaaggtacctcaatacctttattctggaaaataggtcacatcatctgcagacagggaggaggattatatggaggagatggggttgaaaggcttgaggactaaacacaaataccatctctctctcatttctgagtgtaacagtaggacattgtgagtgagcctagccagttccctcactcagtccgctagcgttcccggagtatctgctggttgtctgtgctgttctaggtagtagaggtactcaaatccctgccctctggagtttttaggctggctgaggagaaagatggatagagaggcaattagagcctagggtgataaagtgataaagcttggttagtggtatatccagttggctatggagtgggcagtaggggagccttcagtatctgtaggacatttgaggtgggtctctttttttttttttttttttgagatggagcctcattctgttgcctgtgctggagtgcaatggcatgatcttgactcactgcaacctctgcctcccaggt

SEQ ID NO: 104811 - DNA, 1036 bp, Homo sapiens
ggcgtgagccactgcgcccagctcccagggcgcttttctaacttcctttgaaactcacagcaaccctgtgagttggaaggacgggattcctatcccaaccagacaagtgaagaaactgaggctgacaaaagcgaagtggcttgtccagggttgcatagctaggggagctgggatttgaacctgaatgtcctgaccctttcagctgtaacatttctcacatcttaataggcattaaaaaaaaaaaaaatatatatatatatatatatatatatatatatatatatatatatatatatatataatgcaggtttccaggcccttcccctgagactcggattcactgggtgtggggtgttgctgcacaatctgcatttgtaacagactcccccaggcactcccagtttcccccttagagaaacactgccctgtaccgtgtggcttcttaactagctgcgtggaaaagtcacctccctttggtcagatccattccaggaatcttggggccaagctgaaggcagaggagaaatagccttgggacccgactgacactgctgtgtttgtgcaaaggaagggatagggagaagggtcccttggggacagccagaccagacaggcagaggtaggttgcggtgctgaatatcttgcctgtcagtcagctttggcataaaaccctggctgcatagttcactgacagtgtgactttgggctagtcacttcatgtctctgtgcctcagttttctcatctatgaaatggagctgataattcctatctcatagacttgttaggaaagctaaattggacaatgtctagaaggagctagcccagtgttgtgctcgaatcataagccccagtctctcctcaatagactgcactcaaatcttttttgttcctggaaagtcttgccctcatctctcctcttaactaaatgctgctggtctggtcaggtgcagtagcccatggctggtgtcccgttaccttctaaggtgtgcaaggaagtccctatgcctcggttctggagtagcagggaaaggtggc

SEQ ID NO: 104812 - DNA, 1080 bp, Homo sapiens
tgtttcttggggctttggcttctgttctgctccattcatcctatcccattaggtccctttgggccatagcagaactgcagaactacctgttctttgtcacaatcatgtttagactgttttgattcattcatgaatcaaggatgcattgattcagtaagcttttgccctgtgttccaggccttttgctgaatatagaaaacatgtttgagaaacaaatacaattacgacatggtccttgacttcaaactaagaggaatctactagtccagtcttttctaggttctgtgaccagagtcataggcagagccgcaaaaccaaatgtcctccctgttttgttttataggtggatcgaggccatggaagatgcgagtgtgttatagcagttatcaagcatgtggacttgtaacaaattcttaggtcaatatgtgaatgcttttagaagctaagctgtggctcaactcatccggacacacacctggattcagcaatgaggcctgaccttttttgctataaccgccccaccactcccctgcccttgccaacatcttcatgaatggaatccttaagggatatttatggacctctccttttctgtgttttccacccctacccccacccgccacccagtaataaactatttccttaccccgcagtgagttaaaatttagtaagatgaagatgtggaaaccaatgaaaagtacatttagaaatgcaggctttttagtagaaagaagctcttacagtttttactcatgataaatcttatcacctttcaaaaattgattgtggtgcctcaggtgaaatgagaagctatcagtaacagctactctcatcgaaagcactttattattttacggagctgcaacctccaattttgtgttttctaagtgatttacttaagtcaataacagatggaatcctgtggactaatgtgccaccagttttctaacaagggtgtacataaaatggatttgtgcagacctggctgtggcttgctggtgtgcaagcacacatcactttagaggggctgcgccccaccagataggaaggggaggattttctcctccagtcgaccttgtg

SEQ ID NO: 104813 - DNA, 1223 bp, Homo sapiens
ctgggcgggctcccttcctccttatcctcctcctcctcccgcctgcagtcccttcttccttctctgccgggattttcacccctccgcttctagtccgcctttggcggccgtcgcagcccaaccgccgttttttctgaaggggagggtaaaagaaaaggaggaaggcgggtgcgaggcgcgacctcgtgagcgacggatgggctggctaattggcgcccagataggagggccggggcctgtggcaccgcccccctaagctttgctgattggctgaggcggaagagggtggtccttatggggcgcgggagccctggcggggcgggagtagaggccggggcgaagagtggggccgggtcggcgggggcggggccgggggcggggcgcgaggggcgcggccgggtggagaggccggcgcctggtcttgggtcagcaggtgggctgcttccctccgcctggaacgcgtctcgaatgagtactgaggaacaatagtaataaaggtgatgaagcatttcgagtccacgatgcgctctcgtgggaagaggttttcggaaccaggacacttttcagggctcctgctcgttatttcgcagcggccttggcgaatcccctaatgaggctcaattttatcgactgtaaatggggggcatgcgcattcttgccaggccggacctcccttctgagcattgtttgtggggctctactcagaaaatggaggcaacgctactttgcgagcttcagagtcacttgaaaatggtgttattgttaaaaatgggattacagccaccaggagaggcaagcgttaagggtatttggggtttgagagagcacaattcgggagtgattctcttctcattcgttcgctgaatacatgttgacttagttttttaggcactggggacacatctggagaaccagctgtacaagacccctgccctcactagagttgggggctggggggtgaatagacaaataattccagagagtcataagttctgtgaaagaaaagaagccaaatgacctgctgaagaagacctgaggcgttaatttagatggaatggtcagggtggcctctctgagtaagtgatgtttgaacagaggaacccaagggaggaatggcattccagacaggacatcccgtgtaacggccctggaggaagagcatttgatgtgatcgagaactggctgcttgtggctggagagttggttggaactagtaattgtcc

SEQ ID NO: 104814 - DNA, 1322 bp, Homo sapiens
taacttaatggatacatttgtgctcctgttacacattgtaaaagatatgttcttccttattcgttggaggtttgcttgccttcaacttaatatgccagaggctgagattctctgtcattctctcccatcctgccactctttccccatatcccactattgctacccgaggtagcagtcctactccccttgctcacttcaggtcctgagtgctagagagtaaagcagcaggagctctataccaaaaggaagaactgcccaagaacaacagctcaactagcacagctcaacaatgatgaggagtgggaatgactagagggatgaaagccagatcagggcattggcgtaggcatttgttaaaggtacaataaatgcagatgcagacccctggtacctggaagtcttagaatagaaggatgggaggtgaattgttaaggacagaaagggaataggctagctcagacacttaactgttttttctgtgttacccttggactccagttggcctgtaatgatgaaagtcagcctcagaggcaagtgtgattttttaggggcaataaaaagtacctccttcactgtaataagaggcctgaagtcctttaataggaggtgaaactttctattccataattattaacagttacctcaaagattctaatccctgaaatgttaacatgtagatggagaggaatttcattccaagtgcccaagtgtaaaagaatatttcccccctgtttgcgttagtgagaggtgtgagaaaaggtcttggggcctggaaaatggggtgactgctgctgaaaagtgaagagaaatgagaggctggtagggctagactcaagcctgaaggcttcctggttttacagggagctgctttatttacctttgttgttcatatgttgataaaagctatgcaggggaaaaagtttcctacctgactgcccacccatgttccttaaaaagaaagattcacgtatggccaggcgtggtggctcacccctgtaatcccagcactttgggaggccaaggcaggcggatcatgaggtcaggagttcaagaccagcctggccaacatagtgaaaccccatctctactaacaatacaaaaaattagctgggcgtggtggcaggcgcctgtaatcccagctactcgggaggctgaggcaggagaatcacttgaacccgggaggtggaggctgcagtgaaccaagatcacgccactgcactccagcctgggcgacagtgcgagacttcatctcaaaaaaaaaaaaaaaaacaactgaggctggatggctcttgagaagttacacaatactagcgggcttcatg

SEQ ID NO: 104815 - DNA, 1061 bp, Homo sapiens
tttacatgtgtgttctgtgtgttcagttagtgaaaattcatcaaactgttcatttacgatttgtgcctttttttgttttttgagatggagtctccctctgccgcccaggccggagtgcagtggtacgatcttggttcactgcaatctccgcctcccaggttcaaaggattctcgtgccacagcctcccgagtagctgggactacaggcgtgtgccaccatgcccagctaattttttgtattttagtagagacaggttttcaccatgttgcccaggctggtcttgaactcctgagctcaggcagtccagccatcccggcctcctaaagtgctaggattacaggcaggagccaccgagcctggctggtttgtgcccttttgtatctgcgtgttgtagttaagtaaaaagttttacttagtaaaattgttctcactattttaattaatgtgattattgtgtaggttaagttttaagggaagaatgtgttcaaagttctaaaagaactgccatggtactacctgggtggagcagcctcagaaatttctgttagcaatactgaaacataagtcacatattacgacttagtggttgtgtatatcagttattaaatgatctagcttattgatgtaagcaatttttgttcccttagataattctttcctgtcacttttttttttcattctctccttgacttccttttttctgggaaattattttgaagggcactgtgatctagagggaatgttgcgattttagagtcaaagaggcctcagttggaatcctagctccatcgcttagtagctggatgatttgaaacgagttacaagtgctgagtctcagttttttccatcttcattggtgagctaatattacatactcagaaggtatgctaaggattaaatcatgcctagtttgatttaaagcacattgtggatgtcaagagaatttatcctgctttccttccatccatctaccctggctcttactgatagatatgaagaaagtccacatcacccttacacttgggctcttggtaggataagaaaaaatcatccacagtat

SEQ ID NO: 104816 - DNA, 1048 bp, Homo sapiens
gcttctttgttgttggtggggtgatattgatccacttggatttgaaagaatttcttataaaacctgtcacataaggccaaccaagtatgatttactactatcattctatggtctgtattacaattttttatttttttagagataaggtctcacgatgttgcccaggctggatatgaaatagtttttatatactgtgccctgttgtcatttgtgtgctatcgaggaaaaacacactactttaagaatctgccttcatctctagactttactattgctaccacttcctaactggcctcccatctacagtctctgtcttttctatcatttccacactgcagtctaaatttttttttttaagatccagatttgagtgcatcatttttctgccaaactcctgataattctctgttgtctacagtgtcagcctctctccttccctggtctctgtaataattccacaccacattgccattcctcaaatatgccactcttcctcatacctgccagttttgtatgagctgtcctctctgcttagaactctcttgtcatccatctgtctttccttgctacatttccattcttccttcaagacctagtttaaataattcctctcctgtaacgttttcattggttctcacaggcagagagcaatgtgtcttcccctgggacactcatagcatttgctttgcatagatacttcagtttccttcataagttcatcaaggacaaggactgtttattctcctctttctcctccttgttgttgttaattctcagcagtcagttcattgcctagttcatagcagttacttaataagaactgatggaggtggttggacttgattagtaaaatcaccagaggaagatcttctgtagcactttttttttttaacttaaggtactcagtattatacttcttttggcagctaatcaggttctttcccctaaacattattgtgggggtggggggcaatctttgaaggttaacaagctgaatgggtgaagtactagcctttaggactcaggtttctgtaccaagagcgagttt

SEQ ID NO: 104817 - DNA, 2294 bp, Homo sapiens
cagagcaagactccgtctcaaaaaatatatatatataaaattgtgctagtgaagatagtttttcaaactacatctagacacaacccactgttccttggagcctcttattctagtgggacatctcctaattgataaccattttctggtggtactttttcaaagatgtatgaccttctcactgtgtgatctttctgtctctaggaccgcctatggctgcggtagcagtgagagaagctctcaggtgagagtcttataccctgatgttaccttttttgtctgggtgcattttggttaaatgtccacgctgccccacttccttacattacttgaagattctgttttacttcttacattgtgatatcctggaagaaaaagcctttgtcttccttttttatatgagaataggctatatggtttgtgacttattttcaaaagtaatagaaaatattttttgaaactacttctctcctcctctgactggatttaagtctttattgaaagcacttgctttaacatagtttctctttcaatttctctctcactcttagtctcatttttttgtctctgcttgtttttccagaaggtgcacattcctccttgttcatttttaagcagcttccaaagctgctgttgatgatgcctgatgctgctttgaaggcagaaaaccaacagtgagatcaagaattgtaagaattcaagtgtataaagaaaggttgctgctcaattcaagtgtataaagagaggcgtttaagatgatccaggaagttggtgtgggagaacaaggtggggggcacttgtcctatcagagagcaagacttacgctaacactgcagtaaaaagatagtggtggtgaccaagagaaagacacagagaacttagtggaatagaatagagaacctacagttatatccacatatataggaaaaacagatatggcagagatggcatttcagatcagtggggaaaaggatagattttccccatatagataatccattttccagaactatttcttgaatagaaaatggtaaatggattatctacatgggaaaaaaattagttggatccttacttctcatcagattcaagaatcaatttgcagatggattgaggagttacatatgaggggaaaactggaacatttctaagaaaatatttacagttacattcctgggataggacaggattttcataaatgaaagtacaaactgtaaaagaaaatagggataaatttagccttattaaatttaaggacttctgttcatcaaaagacaccttaaagaaagtaaacagatgaaccacagagtgggtgaagatatttataacttatcaacaaaaaattaatgtccagaatacttagcttttctaaacttaaacagatttactgctgcttctctgtgacttcatatctgtagtcacctgttgttagatttatcttgggatccccagccctacctgaagttgattgatcctgcaaatttaaagtgaattattacagaaataattctgtactaggcctctattaaatcagattgtcatctataaaatccacttttactcataatttgatgtatcaagccacctcttttagggaacccaatagaaagatacacctttctagtactctgtttctatactattcaataatattttcctaacaatattcctgtaataattcaaattcacatatttcttacattgaactatagttaataacagaggagaaattctgttgacatctaaaagtgataaaaattattagttgcagccacatgtttagatttattttttaatgtacagtacctattggctatccatttctttaaaaattcttattttctgttttgaggaagaatcagactctagacttttacatgcaatacttgtatttttaacaagtcagttgacttttctggtagacttaaagacgccttttccttccatctccattagttgtaaccaaactatagcaagaaaaaaagaccaaaaggtatctttgtgtttttttcttgtagaaacaagtaaaagttaagtttttaccatctattaaaacaataaacttatctcctcagtttcagacctaatcatattttgtgaaaatgagtaactgatactggtggtctcatgtcattgtagaagttggtgcagtatctgctgtcacagaattttgactccttgaagacaggagccaggtctttcatatttgtcagtcacagtttcatcctcctgtttctttctcttagcattctggcaataaaatatgaattagaattatcataatagaggtggctatc

SEQ ID NO: 104818 - DNA, 1077 bp, Homo sapiens
ttaaggacattggaataaaagttgttatattcagcaaatactgaattttatcaaatgctatttttaaaaatttttttaatttttaattttgtgaatacatagtaggtgtatatatttgtagggtgcatgagatattttggtacaagtatacaatgcataataattacatcagggtaaatgggatatccattacctcaagcattcatcatttctttgtgttatgaacattccagttgtactccctcagttatactgaaatgtacaacttattgcggactgtaattacgctgtagtgctatcaaatattagatcttatttattgtatctaactatattttgtacccattaaccatccccgccactacccttcctagcctcggataaccatcattccattctctatctccatgagttcgattgtcagatgctctttttttttatgatctgagatgatcatatgatttctcttttttgatcaggtaatgtgaattagcttgactttgtaatattaaacccatcttgtattctgcagttaatctcaacttgataggttaatctggattatactctttatacacacacacacacacacacacacacacacacattcttagtttgctaacattttgtttagggattttgcatctgtgttcatgagtgagattaacttttaatttttcttaaatttatgctagcctcataaaatgagttgggagaaggttcccttttctcctccctcctataataatgtatataaaatgagaattatttggtccttaaatgcttatagaacacaccagtaaaactgttggtgcctggaaaaatttttaactactgatagaatttctttaatggttaagactattcggattttttagttgtgattgactcagttttaataagttgtaccttcttcaaagaatttgttcattttgtctgagttttcaaatttattggcatctagtttttagaacatccttgttttgtatttttttattattatatttttttatttttgagatggagtttcactcctgttgccaaggttggagtgcaatggcgcgatcttggctcact

SEQ ID NO: 104819 - DNA, 1059 bp, Homo sapiens
ccacatctatccctaggcaaccactgatcttctaattgttttagatggatttgcgttttctagaattttctattaaagaaatcatgtgtccactttttttgtcttgcttctttcatttagcgaagttatttgagactcatccgtattgttgcatatatcagtatttaattcctttttacgttgtatccattgtatagatatgcttaatccattcacctgttgatggacatttgggttacttccagtttttgactattacaactaaagttgctgtgaacatttgtgtatgtctttgtgagaacatatgcttttctttttcttgggtagatagctaggagtggaattgctggatcatatggtggtttttttttttaaagagactgccaaattgttttccaaagtcattgtatgagttcatattcctgcttgcagtgcaggagagttctagttgccctacatccttgccaactcttaatattgtcagtctttttactcttaggcattctaatagatgtgtactagctcttaattgtaattttaatttgcatttctctgatgactaataatgttgaacatcttttcatgtgattatttgccatccatacatcatctttgatgaagtgttttatcaaatcttttgcctattattaaaattgagttatttcttttcttgagttttgggagttctttatatattctggataagatacatgtcctgtatgagctatatggtttgcaaatgtttttctcccaatctatggcttatattttcattatcttggcagagtctcttgaagaatagatttttttattttgatagtggttgttttaaatttttatgaatcatgcttttaatgtcatattttaaaatcttcgcctaatccaaggtcacatttttctcctgtgttttcactaaaagttttatagctctaggttttacatctgtgattacctttttgttacgttttaatttaatcacaatgtaatcagaggatctgatctttatgatactgattctttgaaattggcttaatttatttttagtttatgttttcttcc

SEQ ID NO: 104820 - DNA, 1126 bp, Homo sapiens
atggacatctttatatatgcctccttgggctcatatgtgggagtatctctgtagactagaagtagaatttgaaattaaaagctatctgggtcaaagtgtgtcttctaagggtttttcttttttttcccaacagttttttaacagtcacataacttcatatgcaagaagtagcaccattaactagatcagttattaattcagcaggtatgcatcgagtacatactgtgagaaccttcctcttaggggtttccaattccttcagactcagtgccccctttttaaacagtatttttttaaagacccttttactgtaccaaggtgatactcatagaaaataaaagcattcatatgcaaataacttacaaaaatcaatatataataataattatattcaggagaaataaaaggaaagcagcctattatgaaataatgtgtatttcatgtaaatgcttaggaataactaccaaagatgatatgacaagtcacatacttcttaagtaagtacatacttaaataagggtactaagaagatacaattgttttgtagatgaaatgtagagtcagctggaataaatgttaaatggaattaatgttagaataagtgagactagacttacttatgataaaaacggttgacaggaggagttattaagaaggagaaaattgaggaaggatgatgtccttgcaaaagatccataccttatgtggaagtgttgtgccaaaatgatttcttacggtatgtcttgccacagagtaatgacattctgtcatagagaacatctcctttcttgaaatctgtgtctgaggtatacctttagtgtctgatactttaaaaaagaccttggaaagcatatccttttattggtcacagaaaatagagaattagaaaatgaaagcattttgtctaccagaataaaaaatcaaaaattagcatctgctatgggagaagataacatcttattcagggtcacaggttgagcattgcacttgatttcttcagggaaattgttaataggagtgccacccaaacgtgaacgtaattctaagtgtagtgtgtttccatgtaatcagctgcccaccaggatgattcaggttagctttgtaattgcagaagcagcctagtttt

SEQ ID NO: 104821 - DNA, 1770 bp, Homo sapiens
gtgcatatcatctggttgtaatcacagtgtgcatataactttgtgtcttgtgtttttataaaatgttattacacagaataaatatcatcttttccccaggttgccacataacctgctttgatcattatttttctgtatcccggaaacatagcataatttactaacccgtctcctagtttgggacatataaattgcttttgatctttctgtattataaattaatagtatattcatgtgaggatgaaaagatgcacagatggacagacagatgtatatatagacagacaggtaaactttacagtggaagaactggagaagtagctctgcagcttggaacaacacccagaatcacactgcagagccagtctcgtgaagctatggctgtacagccagtaccacaaagcttggagatggacctccagcttccagtgccaagtctctcagaccagtgaatcttattgaccccctgctctcctccaagggaagcaggactgcaaatatctggtattgtctgtttttacaggtagagagaggcactgcctcacccaaaccactgggagaaggaattcttatatttcctagaaaaataatttaggaccacacactgataaagccatttctatatttaggataatttatataacgtgggttcccagaagtataattatcaggccagagggcaggagcaaattctgatgatgaaggaccagatctcttgacctcaatggtttagtcttggaactttttgcttcctttattaatctttccttttacacatacgtaaagcacatttattggctgtacttattcacttagtgaatagagtgttttgtttcttagaactttaaatagttgttgaggtgaagggacttatagtcaaaggagaatcatcatctcttttttttcccctcttgattaattttttttctcttttagatagcggtgcctgggtttgtgctagaatctgaaaatggatgacatattcatccattcatcacatatggtgaatttatttcaccataaattgttttatgttagtgcacatgcaaacttctgtttgtatgtgtggagtggaaatttcatcatttatagcagtgtgaatttattctcaaatgttttctttcagcctccttctccaccctatgtaaaagtaaatatccgtaatacctcttttctcctactcttcccctaggcttttgttttgtttttgctgattggtcagcattcacttcatatcagttgttgaggtataaaaaccaagtaatgagtccccatgtccatcagggggctacagcctgccttagtggcaggtgctcttgtctcaaagccagagaacctaggtgttagtttcagcctcaccactaatgcactgtgacttcaggagctccctcccctcagtggctttggggaaggggtgggacttagagttgaagtcattctgtggacctattacagtgttcttcatttgctctgactacatttgcgtatcttcctgccagaatgggaggcttctgagtccagaactcaatcttgtattcatgtgcccggtgcgtgttgggtggatatggttaaatgagcccagttttgttgttcttgtgggtcttttctatgtaacacagtccatatattcttgcctacactttaagtgaaagaggaacttgtaaagacctcctatctttaagaatattagggccaggcatggtagctcacacctgtaattccagtgctttgagaggcccaggtggaaggatcacatgagttcaggtatca

SEQ ID NO: 104822 - DNA, 1065 bp, Homo sapiens
actgggtgtggtggctcacgacctgtaatcccaacgctttgggaagctgagggaggcagatcacatgaggtcaggagcttgagaccagcctggccaacatggtgaaaccccatctctactaaaaatacaaaattagcagggtgtggtggcaggcacctgtaatcccagctactcgagaggtggagataagagaatcgcttgaacctgggagatggaggttgcagtgagccgagattgcactccagcctgggcgacaagagcaagactccatctcaaaaaaaaaaaaaaaaaaaaaaaaaaaaattactgggtgtggtggcacatacctgtagtcctggctactctgagaggctgaggcaggaggatcacttgagcccaggaggtcaaggctgcagtgagccatgattgcaccactggcactgcagcctgagtgacagagccagaccttgtctttatttaataaaaagaagaatattagattactgcaccgttaggttgaagatgctatatgcagaacatggtgtttctgggctctccaggtctttcctcctctccttgtaggtttaaaaatgttttgagttggttggactccatggtaacattcttgtgaactttcagttgaggaaaggtgatctttaaggggaaaggggtggagggagagagagtttaacagtggcagcaatctaggtgaagggagaactttgtaaagcagagtacatcttccctagaagcaattagtcatattattagacaaactgtttcagcagctggcaaaacagcaggaacatgtcgattttgcttccttggttacaggcagtgatagtgtacttgaccttccgcagagctgggtcacagagagggcatctttaaacagccctgtctggtttgggtgaatggaatctgcactggcagggtttgaaagcaaatgcctgtgagttccctcaaccaacctctggccttttgggttggactctctttggcctgggaggttgctgaggaaaaatataaataaagctgcagggagccattggcatggtaagtgtgagtgtcctaaagaaaacaaga

SEQ ID NO: 104823 - DNA, 1051 bp, Homo sapiens
aatttagcgctaagttttacctttttaaaatctctattgccaactgtaaaattcaaaactggctaatgaattctgatataaatgatgctggtttataatatttaggtttcattccctcattagctttactgtaaagaagagctggatatatatgtcatcaagagaagtagttctttactaacactgttattgtaaggttccagtcctttgaggactggaactgcacataaaagtcagcagcctcctgtggattcttctcgctgatgcaagttgctgcacaaagggggttaatctctttgcccattggcccttcaacacacttactatttaatggtcctttgaaataaactaaaggagggtatgtggtacatttcagttcaagctggaggtgtcccctgcctaacaccctttaccctacttaagggttttacattgttcatgatttcactgaagtgttgagaagtactgagttcctgtttgagatttgtaacactagatctgcacaatgttttttcacagagtgtaactctgttatcctattagtaacccatgagaatttttgtagccaaaatccagaataagttatagatttggaaactcttaatattgcacatttaattcaatgaaatgagcatctttttctcttttttaatcccttttttcttttttttttttctttttcttttttttttttttggagatagggtcttgctatctcaaaggctggagcacagtggtgccatcatagcttactgtcactgtagcctcaaactcctgagctcaagtgctccttccgcctcagcctcctaagcagctgggactgcaggcatgcgacaccacgcctggataatgtttttaatttttagtagggatggggtcttgcaatgctgtccaggctggtactcaaactcctggcctcaagtgatcttcctacctcgccctcccaaactgctgtgattatagacatgagccgctgcacctggcctgtgagcatcttcttcaacctagatgttcatttttcagcaagtgattccatgtaaacgtcagaaat

SEQ ID NO: 104824 - DNA, 1049 bp, Homo sapiens
cttcctcagcagcctcataaacccccctgtgtcggtggaagccagtactccttggtttatataatgaactgccagggcaggtgttgtgctgtacctccagggtgtgtaattagcagacaggcacaagagtagagtaaagcaaagcaaagtctaggcagagtcccaggatcaaaggcttaagacagagactgcttattcatcccctaaggtattcattccctaagtgttcattcactaagcattcattgtgggcctaatatgtgcctggccttgggaataaacagagaaataggaaatgtggtgttctgtggagagtactaaggtgcagggactgtgggaacccagaggagggcatttgtattaacctgaggggtgtcaggaaaggctggccagaggagcatggcttttattaaattatttagtgtttaataaaacatttgtgtgttctgcaagcgtggttacctttacaaaggatgtgaaatggaacagatgattttaccctctaagtatgagtttggagaccaagccttggaaggcctgtgtctaaagatatttcacacccagcttgcccatggttttaattgagtcctttggactggcagttttcctgtcaaggtaaaatgccctaaccaaggtataacacacacctgggtgttgtcaggcatttatacagtgtaaactaagtgatcctgtcctttgcaacttgagcaggttgaaagggtagaaaataggataaggcagaagccaagactgacattaggcactgaggtgtgggcaggaaaaaatagaaaggaaatgcttcaactagtcagaaatgcatctaatatttttatatcctttttaccaaactgactttttattgctgtgctgatgagtctcaataaaatatttctgggaaaaaaggccaagcatggtggctcacgtctgtagtcctagccctttgggaggccaagacaggcggatcacctgaggtcaggagttcgacaccagcctggccaacatggtgaaaccccgtctctactaaaaatacaaaaattagccgggcatgg

SEQ ID NO: 104825 - DNA, 1075 bp, Homo sapiens
tccatcccattggggctgagaaattaccaggacgcttttataagtactaatcccagtaggtttcagtgtaatgttggttttgtttgtcatcccctgctgtgttgtgagagcctttctcgggaaaccatattaaaggaatgttttacaggtggctttggagacagggataacattcaaagatcatctttaaaatgttgttttggtaggtttttactttattaaagtgtgcagagcacaactgcaaattcctttggtttcttcttacattttcaacatttgaaacagctgttttaagattgtattttcctggggggcatcctgtagcaacatctcattgattgctttgtcatcatccttctgggtccatacctcagaaccatacaagttcatcactccaggccacagtgaaagcaagaggcgtggtcttcaggccacctctgggcatcattctgaacccccttgtgatccagcccacttctcacccacaggtaacacgtacacagacctctcggccggaatctccagggatgaccagcccctccccacgcatccagataatctccaccgactctgctgtagcctcacctcagcgcattcaggtacctgcaacctgccaatggcaaccctgcctttccagaagaactctttccaaaaacaaaccttcctaagggtttcactaaagagttgtgccttttgggcatgaaatacagtacaacttcatcaattctttaaaaaaaataaagaaaaaatgcttacatttatttaaccaacttacatttaaagcaaaagcctaaactgttgtttcaaaccattgagataaagtaccattttattacttatttgcttctaaattgagaggcagtatgtcttagtactgtaattaagagcaagggcccctacttgaagtcaaatccagtgccccacttagctttgttgaccttggtcaattaactttttaatgcctcactttcttcatttggaaaatagacataatagtagtatttgcctcacgaagttattatgaagaatcaaagggatattgcttataaagtgcttagaatggtacctggcacat

SEQ ID NO: 104826 - DNA, 1059 bp, Homo sapiens
agtgagactgaagaagatgtctggcccaaaaattcaagtgctggcctgcttgtactggggatccatagaaggttagtgaggcagacaggaaggaatggagaagtattttacaagaacacagtaccaggaatgccaggggcacaggcctgtgttctgtgatggctgcttggttccactttcttctgtggtcacaaaattcacaggaactttgggcactgtagtcctggtttttgtttgttttgttttttaaaaaggaggttggaccaagcctcttaggaagacagccccaagcaagcatctacagaagatcagaagctccagtttcccttccatgctggtgacaccatttatctgccaatggtgcctgcctctgctcccgccctttgtcctggtaaacccaacccatcctatcccttctctgaagccctcacctaccccagtaggcagatagacagtgctgcttgtgattctgattgccctttcctacagattaatcacttgttgcatactcatataattcactctttacaggcctgtcttccccatcagaatgtcagagcaaaaaccatgtcttaccatctatctctgtattcctgtcttcttgctcagcaaggaaaggctctctacaaacttctgaacaaatgagtgaagcatgaacgtaacaaaagggccatagaatctgcttggcttccccatttgtcagtcttcttctgagcttaaaggaaaggcctagtcacaggctcttggtgccattgtctcctgatattagtgtcactcaaagggatagagaactcaaggaaatatactgcaaagaaaggaaaaacaatattatagaaggcactttaccacaactattcttaaaagaaaaagactgagttattccagatgcacacttgggaaatggttttgcatactagagcttagaacagtgggattctctgtagccaccataaatggtaatcctgtgaaatgtatcctccttggcaatgtagctatgaaattggattatacaaacaagacagaatcagaagagcatgtccatggtcagtctcagctgga

SEQ ID NO: 104827 - DNA, 1085 bp, Homo sapiens
aggtgatccacctcccttggcctcccaaagtgctgggattacaggcatgagccactgcatccagcctctttttccatttttaaattgggttgtctttttattattgagttgttagcgttccttagacattctggctactaaaccattatcagacatgattcgcaaatattttctctcattctgtgagttgtccttttgttttatgggcttttactttcttgacaatttcttttgaagcacaacagttttaatgaagtctagtttatctgtttttgttctgtcattttgtcacatatctagatttgtgtaaataccaccacaccaagatacagaactgttaaatcactaaaaagatcttcctcgtgttgcccctttgtagtcacacttccctctcctcgaagctgtttttgaaccagcattataacttcattggcctgagagtcatttgcgtatctgtgttcatttttaatgtcagtattttttgtttaataggctgaaacaagccagggagctctgggcacactggcaaatgtagtgacctcccttgccaacctaagtgaatctttgaacaacggtgacacttcagaaatccagccagaggaccagtctgcaagtgagataactcggtacgagcccatgaggatggagtctcccctcctcgcctggacaccctccctctattgtgagggtggaaaacagcattttggtacctgtgctgtatttaactaaggatgataaaattgttacaatgaccctgctcatctgtcttctttgaaattttaactgtgggaacatagacccacctatgttatacagtataaaacaatcaaaacttcttttcattcccaaccatggaaaaggaaattgagtaaatcagtagacataggaggaaaactctagtggacagcggttatttgtattaattactgtttaataatgcgtctgcatattaagagttcattccctttcctacttctattttaacctatttttctcatctatatttttcttttttctttttttttttttttaatagagatggagtctcaccatgttgcctaggctggtctagaactcttgggctc

SEQ ID NO: 104828 - DNA, 1090 bp, Homo sapiens
aatgtgaatcagctgtttcctcaaacatggatttacaatctcacacaagccacagtgccaattggcacattgagtagtacagaacctggtgtcatctctacaggaaaccccccccccttttcttgctttcttgagtaccacttgtgtatgtttctcctctaaataccagcatcggctctgccagtgtgccaagtgctgtgcagctggtgcagctgccaccgtgccatcaggtggctggcagtctggttgaaagataagtaaccatataaaaatggaaatacaatgagagtcattgcatattgcagagtaaccatccttaggtaatatgtggaaaacactagaatggagggcagggttgtctagtagttgacactattgtctttggggcaaacagacctggttgtcgggccataagaatagtgcttgtcagctgtgtggccttgtgcaagtcactttacctctctgagcctccagtttctcattgtagaatcctcgcgtgggtttcagatctataaagctcttaacccagtgcctggcatgcaagggactcagcagaaggcagtgtggttctgtgggtcaggtggtgtgggatgtgtcctgagtagttgttagaatggtcacctccctccatgattaaaggaaaggcagtcagaattgtcccattctccagggagaattagacaggtagtgactgctaaacaagtattaggagtttcattgttagctctttgggagaatggcctaccccttgctactatctggtaggtggtgtaacctcaggctttttttttttttttttttttttttaaataacaccacagtccacagttaatagtactgataggtacctgagattttttaaatgaggttaaaacattgttacccactgccctgagtgtactttttctagttgggtaatttggaacctcctccacagagtttctcagtccgggctagataaaatgtgctaccacatttaaagtggtttcatttacatttcatgtactgtttttcataagttagtgttcagggcagtgatcatagtaaaatactagatgtgcatctggggcatttgggaatgacccagtgc

SEQ ID NO: 104829 - DNA, 1023 bp, Homo sapiens
catctgcagctggaaaatgaagctcttgttcaccttgagattactgatttttcattaaaaagtgaaatggtcccatttctttccatatgtggcccctcaaataagctggttttattgttcttaccagcctttctcaggatctgtgatgttggtttctagataaactttctggtgaccggataaagcaagtcatggagcacatctggaagctgcaggagttctgtaacagcatggcgaagctggatatagatggctatgagtatgcataccttaaagctatagttctctttagccccggtaagatatgcggtggggatgcatgacccctttccacctgtatctactgatgtttctgaacgtgaacatgttgtcatcattggtgtagaaagagccctgcagattgtatgtgacctagtgttcttatgataggtgttttgctagataaatacataaacgcttttaaattcttgcctttacagccccaaagaaatatgctgcagtgcctgatgatgtcacgcactgaatagatttaatctgtgtcctaattaaaccattggccaaacaagactacaccatacaaaagtgtgctgccacccgatgtcctttcttttttttccggccctttgccagtttccaagttttgttagcgcatataatccagtacacattgaagttccacttgtttgcccacagactgtgtatagcactgcagagcatgctaaaaggtatgttcgcaggagatgaagaggcagcaatcacgatgcctgggctggcctcactccccttattaactgttctctcaagtcctctggaaaagtcacttaggctaattgttcacctcacagtaaggggttggacacagcttaacctttttgtcttccttcccagcccttcactcacaaacaacaaaatagctaataaaattgggacaaattatataattatttagaaagtaaatgacaatttgtaattttatgtgatagtttttaaaactatgtgttttctagggtagtaggaagccag

SEQ ID NO: 104830 - DNA, 1074 bp, Homo sapiens
tctcactatgttgcccagggtggtttcaaactcctgggctcaaacaatcctgctgcctcagtgtcccaaagtgttggaattacaggtgtgagtcaccacgccctgcccctggatagtgctttttaaaaagttttctttttcctttttcctttctagaacattctaaatttttctagagtgaatactgcttatttttaaaatgggaaaatgtattcatactatgcaggtagcattccagcaccagcatccattcactcagccacaatgagtcgctgtgctccaatcttgcagggcacacgaaggtgtaagggacctgccatctcagctgggccttaggggctggctaagatttctatcagcagagatacaaagaatggggagggatgggaggcatttcaggaggaataatcaatatgagaaaaggcacaaggatggggaagagtaaaaaatggatattccagacagtaaatatcaagataaagaaaaaatgaatatgcaaacaggatgtaaaacactctaggcccttttctttgagaactatctcgagtgaatttctgagccctataagaaagcctcccttatcattttgggctccaagtaacctgtcgtcaccctacccaaccctgggtccctgactggacaggagtgactcatgatgttttcagacacattgtatctactttccaaggccacagaatcactgctgtcaaagtgattctcgagtgtgctgtggctctgccagtagccccagagggccatttccagccatcttttggccatgggaactgtgggggagcaggcctgtggcctcctaggaggacaacctgactgtatacctggctggatgtataaattctgggtgtggatgcattccctgacagtcccattctctatgtattgaggctgaagttattctagattcatgatgaagtcttcaatgattccagtagaaaatggatcttgcttttgtaaaagccacatctgggcaacagaagtgcgccaaaaggagaagcaggctcttgtctaccagcaggaccagccagccataagacacccccagtcacaccagagaaa

SEQ ID NO: 104831 - DNA, 2053 bp, Homo sapiens
agggtacaggagacaatcatttatgtttaagaaaagaaggcatcattcctaattgtgtgcacatgttgtggagttgagctgaattctgtgaatggaaacgtggctcatttgcatcatgcagtaagtgggagtgtggtagcacagtcggtggtgacccagttcagaagcttctagccatagagcagacacttgtcaggttccctgactacttggtcctggtctctgatgggcatctgcagactcctctagaacctggggttctcctttgatgactggttatctgaattggattgcaactagtcagacattaactgccaaatgagatgtacagttcctccagcaagtgaaaacatccccaagtcacatccgccgctcgtggcagatggagccttgtgaccaaaaagtgcaaggtgggcattttgagctcttgacagtacttccaatacaattgggggtgcttgtgtgtttgtccagatggaggagtgtggccttggagtgtgagcgttaccttcccagggctttccactccaaatgcccccttgaaaagggctcgtgtttctgcagctccatcataactgtgaggctggattggggctgggcaggagcctgctgccgcctggcgagagtggttagggcctggtaaagctggatggaaggtttcaggacaatttcttcctgttgaccttaaataccagagattttaaaaatgtgtatagactcagcatctctgttggcaagtctgttaatgttaccagcacactgtgcactttggttcccccaggtgtgtgccagccgaccaccccggagcattttaaatgcaggctgcttgctccttaaaaacaaccctcaatttccagggtgatagtctttctcctcataaattgtagcaaccagagtttacagcaagaacagtatgcgcttaaaaggaagttatgtctaacttcaaacacccgtaaattcccacggatgtgaatatatagcaagcttttcctgtttgagaacagtggcatgtggaagacccggtcaattgctttgtcttttgctttttaaatagtccagattaagaaaatacaccctgttgggttaaatttgcctctcttgatttgttaatcagatgatatccaaaaagatccctggacactcccctgactcacaggtgctctgatctggctcaggctggcgccacatgtgctccacaggggtgcagtctggccagctacagacgcccctgtggtgccacattggacagaatggaagctgctgcaggctcaaggcagaacaggatgcttgatcctgaagggttagcagcactttacgcaagtcagtgttagtagggtaagtgggaacagtgtttccaacttctaaattcttgtttggatttaattatatcattttataattcttgccttggcagcaaattttggagagtagtgggagtggccattataaaatgatggaaaggatttaattttgccagcttaaagtaatttttacttttctaaccctgatgtgttttcagtttcaaaattaagacaaaaaaccagctgagacaatggaattagggcaggtttgtttcatttctgcttgtgaaggcttttagtagcaggcatcctgcagctcagtggtgcctctaacacagattgttgcctgccttccgtcgttttgatccttgagagtgaccatgagggccatgttgcagttccctgggaatacaagcataacagctttcagatcccagttcttggtgttggtgaaaaggtctccaccagcccctcctctcattcccaggtcattcagtggcagccagtaggctgcttagactcaggctggataaggaagtgttgggctgtggtgaaacaaccttgcagaaaacgtgattttgcttggaaaggtgctgattctaacctggtcctgctctttaagtccccttgctggtgatggctgattccagggactgttttgggctttgaacacctcttggttggtttctgagatcctcttggccttactttgaagtggccttttctttaaggatcatgtccacgtaacctgt

SEQ ID NO: 104832 - DNA, 1334 bp, Homo sapiens
ctggctactgaactccatggagccacgttcatgctccctcttctactggcctggctgctcctccctcaatgaggagaggcagctggctcagagaggtgggacagacacatgctgtcatcagttaagtgagctcttttccagaagtatctcagataatgttgggttaagacagatagatgttgaaaatggtggagatcattacacattagcataaaacaggacaggaagagattttttgaaagaccaaattagttgagcaagtaatacttttcaagttactcctggaaggtgtttttaaggaagtgtgttacctaccatactctcctaatttgacatttctgtgtcctgaggagttacatttattgtctaacccttgccataaggctgtggtttgaggttcttttgctgttctgggctttatatttaatttcaggtgtagtcacttctaagatgtgtaattgccctcaagagggactgatttttagcttgtcattgtcagtattgaatgtggactcttctgaggcagttaggacaccagccatggtgttaacagtggatgcgttaggctccttaatctcaaggcaatatccacgctacacacatacttattagctgtcttacttgtttgggggatagttacggcaaggagcaaaaaattctaaggactctagctgtttctagtgcttttactttcatagtcctttgaggacatttcctgcagagcactcttgctcacagcccgccctctgcagggcttccagcccctggccgcaatcagcagttcatgccacatgtgtacatccatgttctgggacctgatctcattggagtccagaagcttgttgcccactttccagtgtaaatgactttatgtgcaatggggtcataggtaacattttaactcttttcttagtccaggtcataggaagtctcatcatctgacagccacttttctcccagggaaggcggtgcccactgggccctgggaatgcctgagccagcagagcagatgccccacgtgcttcctttatccagcttccattctctcagttatgaggctctttgaaaatgtcttaactttgatgtaaatttttaaagccaacccctcatcaagacagggttggtttgggtcttttgtacacagggtctggaccttctcattgtgtgcctcccaccagcgtgcacttcgtatgtccagccctgggtcccttcagcagcattgtgcgtgtacaggtttctaggctgtaagactgaatgaatgtacatgtgtttatatcctctccatatgtacagtgtatatagtgtgtgtatgtgtacatagatgtatattatgt

SEQ ID NO: 104833 - DNA, 1405 bp, Homo sapiens
accgttctgaatctctgaccgtgacgcctgtctctgggctactcaacagagctgaatagctgggaaggctgatggctcaacccaactgccaagttccttccaggtagggccatgaataggtgcatgaaaaggttaaaaattcccacttagttttggatattaagataaactgtcttccagcttcctggctcttgtccgaacctagagaatatacggaaatgtcaccctgtcagaacctcttctgcctggaattcttccttttgcagagtggagattctgacttcatggcccttcccaggcaggctcacccaaaggaaaatggagtgaagaaaatcaccagcaaatcttccctgccgagggaccttggaacacccatatcagtttacattagcaactttatgaaaaactctctttaaaggaaagtttggatacatgtctgtatacataatatacatctatgtacacatacacacactatatacactgtacatatggagaggatataaacacatgtacattcattcagtcttacagcctagaaacctgtacacgcacaatgctgctgaagggacccagggctggacatacgaagtgcacgctggtgggaggcacacaatgagaaggtccagaccctgtgtacaaaagacccaaaccaaccctgtcttgatgaggggttggctttaaaaatttacatcaaagttaagacattttcaaagagcctcataactgagagaatggaagctggataaaggaagcacgtggggcatctgctctgctggctcaggcattcccagggcccagtgggcaccgccttccctgggagaaaagtggctgtcagatgatgagacttcctatgacctggactaagaaaagagttaaaatgttacctatgaccccattgcacataaagtcatttacactggaaagtgggcaacaagcttctggactccaatgagatcaggtcccagaacatggatgtacacatgtggcatgaactgctgattgcggccaggggctggaagccctgcagagggcgggctgtgagcaagagtgctctgcaggaaatgtcctcaaaggactatgaaagtaaaagcactagaaacagctagagtccttagaattttttgctccttgccgtaactatcccccaaacaagtaagacagctaataagtatgtgtgtagcgtggatattgccttgagattaaggagcctaacgcatccactgttaacaccatggctggtgtcctaactgcctcagaagagtccacattcaatactgacaatgacaagctaaaaatcagtccctcttgagggcaattacacatcttagaagtgactacacctgaaattaaatataaagcccagaacagcaaaagaacctcaaaccacagccttatggcaagg

SEQ ID NO: 104834 - DNA, 1053 bp, Homo sapiens
aactagttttataactgaaaagctgcacatttttcacagtacaagccgtagtttttacctgtagtttggacttctctgttagaatgtaactgcattaccagcccttttaaaggcatctatctatcaaaggaaaatttgggtgttagattttcttgggaccgtttctgtaacctttgcccttcacaatatagaaaatattggttttgccattacattttaatgccaggtttaaaacctgttgaaagctgcagctttatacagctttcttctccctgtgaaatcactttgtttatgtgatggcatttaaaaaatagcatgttctttttaaactgaattttatatctaatcaatgtcttcagtcttgaagaagaatttgcattgttgtgtttgtatatagagtattgcagtgcatgaattagctttatgcattttattaaatgctgtttcaatgtggcattattgttgtggcttaatactactacctaaatgaggtttatactattaaaagtgaattaaagactaacatgcatcctgctcttcatttttcttcatgatagtagtaatgcctggcccccaaacaatgcagcgctctcttgtgttatggacatgaagcatcctggtggtcctgtctctacagctctctggctcctaccttagccttagcggccaagagggattgggccctctgtggtccactggacttattaatacctttagtgggaaaccctggcaggacagtctttacatccacccagcaaggcagctccttggtgtggaggtagggaagccacacacatgtttctggagcagagcacagttaggctgctggaacattcagatgccattacagacaggccttaaattggcaagcttattctctaaggatacgtgctatcaagggcaaaaacaagctccaaaagtttcagaagttagaacatattcattatgtcatctgacctctcatgttccaggtgaaaattctgaggtccaaagtctgatgcatgacagaactcactggcaggcagatagggcctcactccgtcacccaggctg

SEQ ID NO: 104835 - DNA, 1013 bp, Homo sapiens
gcagggccccaatgtctccactaggtggtgtctcctcatttcctccatggcctacaaacctccctgctaatgcacacagtggctgggccatgggttggcagtggctgactggtcagcaggtacgtgcctgagtgaggctggcctgtcagccactggggctcctccatctctggcccatggctaggccccccagcaggcaagggtaatcaactgtacttaaaaaagtgagcactgcacgaagggttgcctttggatttctgaaaaatacccccaaggaactgaacggaggggtgtacacactgccaaccacagacagtgctagccagactcaaccacagcagcccttatgttctccagagtagagcccagaggaagattcaaagccagcggagaccagtaaagggtcgcaggaccaaaacaggtgtcaacaggctgtggccttaacctctcaggcccaaagcctttctgctacacaggccttcctcttcactaggaccagatacacgccaagctgctattaggaagcgttttattgaccagcagagcagggatattcatttagcagctcagcttcagaccctcctctcccacatccttttacacaggtgtgtaaagtccttttaatgcaaaaggatttccagagtctccagggacagaaccaggggcttccctgggccaaagtaatcccattccaatctccccactggtcagacaccatcaccccagcccacagtgaccgtgggccttagtcctgggcatcggctttcagagcggctttgtacttccccctcatctccttgggtaatggcaccaggctggggcagggcacctgcccttccacttcacagatgcactcccgcaggcagtactttcgagggccgaagttggctgggtgagaaagctgctttttctcctcctcctcttccctgagggtttccctgccaaagagcacagacggcaaccaagcattggcaactttgagtggcaggcacagggcagtttctcagccgaga

SEQ ID NO: 104836 - DNA, 1099 bp, Homo sapiens
gcagataggctgaccgcactgtgtaggcttgctgctgtggtgtgaggggacaacagcaggccttctttcagcgctctcctcaggggccagcagggagacagcgataggctttgacagtgaggatcaggttagaaggcaggagatccaggtgtccctggtggatggtggggttgtctcggctgagaaactgccctgtgcctgccactcaaagttgccaatgcttggttgccgtctgtgctctttggcagggaaaccctcagggaagaggaggaggagaaaaagcagctttctcacccagccaacttcggccctcgaaagtactgcctgcgggagtgcatctgtgaagtggaagggcaggtgccctgccccagcctggtgccattacccaaggagatgagggggaagtacaaagccgctctgaaagccgatgcccaggactaaggcccacggtcactgtgggctggggtgatggtgtctgaccagtggggagattggaatgggattactttggcccagggaagcccctggttctgtccctggagactctggaaatccttttgcattaaaaggactttacacacctgtgtaaaaggatgtgggagaggagggtctgaagctgagctgctaaatgaatatccctgctctgctggtcaataaaacgcttcctaatagcagcttggcgtgtatctggtcctagtgaagaggaaggcctgtgtagcagaaaggctttgggcctgagaggttaaggccacagcctgttgacacctgttttggtcctgcgaccctttactggtctccgctggctttgaatcttcctctgggctctactctggagaacataagggctgctgtggttgagtctggctagcactgtctgtggttggcagtgtgtacacccctccgttcagttccttgggggtatttttcagaaatccaaaggcaacccttcgtgcagtgctcacttttttaagtacagttgattacccttgcctgctggggggcctagccatgggccagagatggaggagccccagtggctgacaggccagcctcactcaggcacgtacctgctgaccagtcagccactgccaacccatgg

SEQ ID NO: 104837 - DNA, 1050 bp, Homo sapiens
ttttttttcctctggagtataaatctgtttaaatcttctaagtttaaaggtgttcctccactcctcaattgtaaaactgttcccccatgtgtgaatacattggtctcattattttaaaattgtggtataacctagatacggtgcacacctgtaagtatacagctccatgaactgccactcatgtttacaccttgtcttcacgacacaaatcacgacgtagtacctttcatggtttcattttcagtggtgctttggcattggtgttaggttagcttgcagtacaggttgggatacagatttctttcccctcagatgcctgcccaggggtccccacgccattcagggaatcttctaagaggatccctgcgagttttttctcagcctttttgggtcctctgagaatctgatgaaaatgctgggctttctccctagaaaaatacccacgcataaaatttcaggctaaaaactctgtttcataggcttcatttcttcccttttgcaggaagtttgtgtttttcaacatacctcagattcaatacaaaaacccttgggtgcagatcatgatgtttaagaacatgacgccgtcacccttcctgcgattctacttaggtgagtggggccctcgccatggtccaggggctgtcccagacatgcctggagagactgcgtccttcctatgggagcgtcaggatgagctgcagtgtgcgctgtcatggtgtgtctgtgactcctggcacctttggcttccccataccgaggcactcagcagccactgaggtctggactctttccctctccagcctcacctcttcttaccctctgcctcacaccatgggggtaatttttccaaagtcccttgtcacaccaggctgtgatgcctttgctcaagattgttcctggcctggaatcccatttctacctgcgtttgcttatttaactgaaaaaaaaaaaaaaaaaattcttcagggctcagtatgggcaccacttctaggaagccttccctgcatcctagagtgacctcccacatgcccccagaacccctctgtctcg

SEQ ID NO: 104838 - DNA, 1050 bp, Homo sapiens
gaaaaatggacaatacgttcaataggacgttatcagctgacttggtatccaaactgagctttcctgattatttcttattgcaatgtctgacttttagcctatgtaaaaatattttcccgtgggtggatggggaaatgactaatttacaggacgcgacaacctaaaccttccaaggggaaggcgtcctaaagcgaagctgcacacaccggttctcgccgcgccgggtcgaaggccgcctacaagtcccagagtgctccgcggcgtgcgctgcccgccgggaagcgtctcctgtgcgtctgcgcgggaagtggaacctggctctggggagaagccgcgtgagatccgcgcgggtgctagctagtcctttctcgtcgctgctcggctcgcggcccgtggggtcggccccgccaccgttgccgccatgcccatgaagggccgcttccccatccgccgcaccctgcaatatctgagccaggggaacgtggtgttcaaggactccgtgaaggtcatgacagtgaattacaacacgcatggggagctgggcgagggcgccaggtcagtcgcagccccggccgcctggcgagccgtaacctgctagtcgtgccagcctgctggtaacgtgaggtcccgagtcgctctgggcggccgttcatccccggggcgggccccccaggtcggcgctgttacccccattttacagaggtccagactgaggcggacggcggggcccccgccgggccggctgcagtcgtgacgaggtttggggggcggaggacaagaaccccactcctggatctccttcctccggcgcggtgggcgaggctgacccgagggaggccaccagttcccttggcccctctggccagcaaggcaagcgctggggaggggcagccgcagatcctttcggggtgacgggggtgacaccccaggacgaatctgaggataaaatgagagaaataacagcggcgaacactgatcatatctcgcacagttctgaatgcttctcgcgctttcttttttctgatgcctagagaaaccccagcttatccc

SEQ ID NO: 104839 - DNA, 1089 bp, Homo sapiens
attcttccacgattatcttctcctgtaaatacatcacaggagttagaattctctacccatcagctgtaccatgtcgcagaattcatgcaggcacaaagttggagttacagagatgggttgacagcaggcaaacttggcctatgtattataaccacaacttcaagttcttacctcatgtgaatattcaccctttctttagtcttccaaggcaaacagccccgtctcatcaccagatgagcaaggtcttgatatggcatagcagatctccctagacacagatcatgagaaaagatggaagagacttagggattcaggcatcagatgaagttggcttttcccttttatgccttgtttgtatttaccctgtctaatacactaaggatacttactcattgtacttgcagctcaatatgtctttgctgttcagatactaaaatgtacctctgagtcattgtgagctgtgtggtaggttggacattggcatagttggtgatgggactcaaaatgaaaaggtggtctctttaccaggtcacagactgtagcagattgtgcttgttatctgacaatgactgtcactttgagggtcgttgatttgcatgcactactctggggccttgtattggagccttttttaaaaaaaataaaatctgagatagaggttgggggtgtgtgtgtctgtgtgcacatgtgttacaagtgagaatcatcagatgacatcccttctcctttcttgatgacaaccatctgagtatcagaatagttccagcacctgtgttgtttgtctggttaaggcctctggaaaaaatgaaggtcactgggttctgaacaggggatagatacgggttccagttctgcccttattcccagttattcctgcagtgctggttaaatgaacagttttacagaagtatagtgcagatcccttaatgatcctatcatcccagtttcacactggaagaaactgaggctcagagattgaggaaccttgtgactgccatctgtgccagtcaccacctctgcatgaccacatttccctccattagcactaccagcatgcctgtgaggtagttactcagctgttcatctgac

SEQ ID NO: 104840 - DNA, 1037 bp, Homo sapiens
tccctgttgcgtctgcaaatcgaaacatcacttccacttgattcattcattccaagagatggacactgcattatatctgaaagtctgaaatgccacctttagagaattaactgcctttgtgaggccttacacctttagcgtccttctacactatgctgtccaatctgcaccatgaaacttaggtcacgtgtctctggtttctccttagtgctggggagacaacctacagtctggaacatgccagtgaccttcgagtggaagtgcagaaagtgtatgagctgatagacgctttaaggtaaggtccattaagtggtatcctgcccgctggtggaatggagaagatgctgttctaatgaaatggcgaaagcagacctgcactcactcagacttctggtgatggggcagtgggtgaggaggagggcaaggaaggggccagctctggcacttaatgcatctcagtgacttttgtttcgttaaggatttctaatgtttgctattattaaagaaagaggagctggttattgacacctatcacctgccagtcactggctgttttctctagaatagctcatttattctactgaagttaccctgtgaggtagggattaacatcctgtgtcaaaggtgaggaatcatgtcacagatagcaaaaattgtggagtgaagatagaaactcaggttctttctttgtgtctgtgctcaagtccacagctgctttttaactgtggactggccattggggttaaattagccagtgactcagagggagaataagatgaggtgcctttgtccatccagacatacagcaggagttcgtagttgcagggcctggtacaaaatgaaaatgcatgtcccctgttcaaaagttattaagaataaagacactaacagcagagcattaaaccaagcacagggctcttttaagtgccagtcctttccagttgcataggttgctcacctgtgaagctggctctgcatgtgtagtcagtcactccataacagtgttgtgcgccctttgctaaggcctgtgtacagcc

SEQ ID NO: 104841 - DNA, 1029 bp, Homo sapiens
tgacagaacaaaattccttctcaaaaaaaaacaaaacgaaacatctgatcagaagctccattctcactttctttccttcctacaaaattttctgcttggaaagtatgcctataaatcaggaaattgataacaacaattaatgtgttagaaaagtgaacattttaaatatagctccattgatggagcctagcttctgggtaggtgtttctatatcttgagcataccacttacctctttgtttttgttcttagaaattacgactttgcatggagaaagttgaccagaaagctccagaatacatcaggatggcagcatcattaaagtaagctattcatctatgtttttctaatccagtggtgactgttttctggcattttaggtcaattctccagtagccaaaaatgaaaatcttaacttcaaccgtgctttttttctgagaccagctgaagttggtttttttccacttttggctattatgaagagaatcatcttcatgtctgtcttttagtggggtacaggctaccatcacatgagcttgtagaaagacagccacattcagttgaccttggctattctgactgagcaggtttgggaagggcctcagacaataggtactgctgctgagtgcagcatctggacagagcagaggaagggcagtgggtctcatgctcatgtctgggtagatgccacttgagtgtcacattgaggtgtcagggcttaaagcaggcatgaccattagagcaggggctggcagactgcagcccgtgggccaaatgtatcctgacatctgctttttttttttttttttccgagacggagtctcactctgttgccaggctggagtgcagtggcgtgatctcggctcactgtgacctccacctcccaggttcaagcaattctcctgcctcagcctcccaagtagctgggactacaggcacgcaccaccacgctcagctaatttttttatatttttagtagagacggggtttcaccatgttggccaggatggtcttgatctcttgacctcgt

SEQ ID NO: 104842 - DNA, 1374 bp, Homo sapiens
ggaggcagaggttacagtgagccgagattgcaccactgcactccagcctgggtgacagagcgagactctgtctcaaaaaaaaaaaataataataatactatacatatgtaattatgagatacatatgaaagccaatccaaaacatgaaggagaaattttggacacatgaattcttattagctttgtttcatgattgcccatgtgagattactggggtgattttctgattaagttgccagttgcagcaactgaagacagtcacaaattgtagaaggtcaagtgaatggcaaattttagaagttaatatttatttatgatagcttgtttgtgataccttgtttcatgattgccaatgtgagattactagggtgattttctgattaagttgccagttgcagtaactgaaatcacaaattgtaggtcaaatgaatggcaaattttagcagttaatatttatggtcacccctaagaattctaaattaaagtttaattagatgttagagtatgattagggaagaaaagacatgtggatggttaagagtatagcatgtgtggccaggtgcggtggctcacctgtaaacccagcactttgggaggccaaggcaggtagatcacatgaggccaggaatttgagaccagtttggccaatgtggtgagaccctgtctctactaaaaatacaaaaattagcctggcatggtggcacatgtgtgtaatccaagttacttgggaggctgaggcatgggaattgcttgaacctgggaggtggagattgcagtgagcctggagatttcgccactgcattccagtctgggcgacagagcgagactctgtctcaaaaataaataaagagtatagcatgtggagatgctgatcgaaggatacaaaatttcagccgggaggaataagtcaagagatctgttgtataaggtggtgatttatagttttttgtttgtttgtttttctgagacagccttcctctgtcacccaggctcaagtgtgctgctgtgatcttggctcactgcaacctttgcctctgggttcaattcttgtgcctcagccacctgagtagctgggaccacaggcgtgcaccaccatgcccagctaatttttgtatttttagtagagacagggtttcaccatgttggtcagactggtcttgaactcctggcctcaagtgatccatgctcctcagcctcccaaagtgctgggattacaggcatgagccaccgcacctggcctgattatagttaataaaaatatctcgtattcttgaaaatcagtgagagtagactttgtattgtcaccacaaaaagtggtaagtatatgaagtaatgcatatggtaattagcttgtttagccatttcccagtgtat

SEQ ID NO: 104843 - DNA, 1049 bp, Homo sapiens
tttgtaatatagtgtttgtgtgcttgctcctgcattttacttgagatctaaatatttctggtgcatttttaaacaaacgataattatttcgtcaactcttgttttttgagatttcttttgactgtttactgggtgttcttcatggctcatttgtattatttgttccatttttcaaggtcttgtccagaaggctaaaaaagcaaaggacaggttgttgaaacgagaaggggatgatcgagcagagtcagggacccaaggatatgagtctttcagctatggaggggttgatccttacatgtgggaaccccaggagcttggtaagaaaattcatttattcattcagcaagtggttattgagcatctgctatgttctaggtaaagttttaagagttggctgaggaggcatcagtaaaccataatggtctaagcttctcatggaccttatgcccttgctgggggaagaaaatggaagagaaccagctgagcatccactttgtgttaggcactacattaagtgccttatacccatggtcttgttagatcttcactgcacctcatgagaacctgcccagggacaaacagtgagtaaactgcagaagtagggtatgaatccatatctctctgacgtcagcccaggcatagagtccattaatgattctttcctctcacataggacattacctgcccagtgacaggcactggtttatgcagcttacttttttgaataattatagtaacatctacctactttcatgtttttgggatgataaaaattctctaacatttattatgatgattgtacaactctgaaaatcctaagctgggcgcggtggctcacacctgtaatcccagcactttgggaggccgaggcgggcagatcacgaggtcaggagatccagaccacggtgaaaccccgtctctactaaaaatacaaaaaattagccgggcgtggtggcgggcgcctgtagtcccagctgctcaggaggctgaggcaggagaatggcgtgaacccaggaagcagagcttgcagtgagctgagatcgtgccac

SEQ ID NO: 104844 - DNA, 1022 bp, Homo sapiens
aactagctgggtgtggtggcatactcctgtagtcccagcttcttaggaggctgaggcaggaggatcacttgaaccgagaaggtcgaggctgttgtgagcaattatagctcactgggtgacagagcaagatgctgtctcttaaaaaggaaaatatagtacgcccattagagataagtgctctacaaatataaaatagattttttctttttgactagtaggtttctattgtttctctttaactgatgttaggatttttgattttttgtatgtttttatggcagatactatatctttttcatctttgcatttctaacacaggtgtcttacaagtatcaagaacttactatatgtggttgaataaacaatcaaggtaaagagcatcaagtaaaaacttctgcttgttgataagtacttcagacattcccccagtggctgaagtggcatatgaattatgaagttggatcatttggaatgaatgtaagagaattgccaaggtattgtttgcttatttcaagaatctgtgcttcccacttcattgagtttttgttctccagtgatgttttcacattttaggttttgcagcttgcttggtctaaggatttgagaaagagtttgttttctcaaacttgcactgaataaacattaagtaccccattgaactgtgaaaagaatgaagaaaatcctcaattgctaccagtttgcctgaattggcttttttcccttcttcttttctttcttagggctcctcctactccagagaggaaacctcatccagggccatgaagccacttcctcaccatctgtgtgctgcttaagctaatgctgcgggaaccatggttccttgggaggaatcaagctgactcttggcatgagattcctgccttcctagggttgagagcggcactgccatggcttctctggacgacccaggggaagtgagggagggcttcctctgccctctgtgcctgaaggatctgcagtctttctatcagcttcactcacattacgaggaagaacactca

SEQ ID NO: 104845 - DNA, 1034 bp, Homo sapiens
ttccttagctctttactcccatcccttacacttaacagaggaaaggatctgtaaggcgcgtacccctctactgcccactgtcgacgaaaacagcctcgccctgcaccgccaccgccacgcataaggcggtgtgtgggcagctcggacgtggcacctgccctcagctgctcaatcccgggcgccgcgacggtcacgtgcacagcggcaggcctttttgccccgcccccgcggcccggctcctgcgtgggcccggccccgcccacagcccgcgcagtcccgcgagcctggcctcggcggccccagcttctaaggagctcgtgagggccaggctgcgcctgcgtcgggcggctggtgggcggggcgagggccgctggggccgcgaagtggggcggccgggtgggctacaagccgggtctgggctgaggggcgcggcttcgcggtggaccccagcccggcaacgggaaggcgagctctcctccaccgtccaaagtaaactttgccgctccttccgcggcgctcccgagtcctcgccgccgccgggccgccgcagtccgcgaagagccgtcctgcgtcagggcctccttccctgccccggcgcggggccactgcgccatggacgccacagcactggagcgggacgctgtgcagttcgcccgtctggcggttcagcgcgaccacgaaggccgctactccgaggcggtgttttattacaaggtagggccgggcccggcgcttcggtcggagttgctcagtcggagtgcggcccgggcctgcggccgaggggcgggatccgggtgcggaggctagcggccccggctttgcttttccctcgtccgcctcccggccctcctcttgttgggagcggcaagcccgagtgcagaggccgacgctgaggctgcggggaggctgggtcgcggcttgcagccgccgctcctccacctgtagtcctgactggcaaatgcccaccgttgagccgctttggggggcaggtgttagatatgggtagttagtagccaattcttgctgtcacttga

SEQ ID NO: 104846 - DNA, 1146 bp, Homo sapiens
aaaaagagaagggaggaaggctgggcatggtggctcacacctgtaatcccatcactttgggaggctgaaactggcagattgcttgagcctgggagttcaagaccagcctgggcaacatggcaaaaccccatctctacaaaaaaaaaaaaagagagaaaaattagccaggcatggtggtacactcctgtagtcccagctactcaggaggctgaggtgggagaatctcttgagcccgaggaggtagaggctgcagtcagctgtgattgtgccactgcactctagcctgggtaacagagcaagagcctgtctaaaaaaaaaaaaagaagggaggaaatttgtccttttttaaggatttttttaaccttgctaagttttttaaatgaagaatacagggttttggtaaaaaatgtcttaaatagtgaaaatagtgtgttttctggctgtatttagataatactccttctgcgtatttttttttctatcctagttcagtcaaagagtgctgatcctttgaagtcaaaacatcagttggacttagagcgtgctcatttccttgttacacaagcttttgatgaagatgaaaaagagaatgttgaagatgctatagaattgtacacagaagctgtggatctctgtctgaaaacagtgtgtatagctacaaattacgtttgatgagttatgccaaaccatttcttctcttgctagtgaattttacataacaccttgaataaaagaattttaacagaataaaaaaaattattttaaatgtaacaactactcctcaatataagatgatgagtagaaagctaataatgggtttttgcatcttattaaaattttgaaagtattgagtcttaaattacaagaactatttttaacatttctgttcttacaactaaaataaacttacagaattcattatcacaaatctattaatttagaataaacttccccttttttcagtttcgtgcactaaaaaataagctagtggtttggatgagccttacttatttgcagtgtaaaatctgtatgctgagtggcttttactgctccctgctgagccttggttgggactcttagcttcaagggacatctagtgcataagagagcagtgtatttgacaggaggatgaggtaaagtagttga

SEQ ID NO: 104847 - DNA, 1037 bp, Homo sapiens
tagtagttgatattgaatactaatgttggtattttaatatttatttttcttacaaaagcataatttaccctcaaaacaaggatggtgaaccagaatacaatccatgtgggaagtatatggtaaaacttcacctcaatggtgtcccaagaaaggtgaataatgtctctccccactcccatcccttgtctctctccgttccctacctttgaatcttgagtgaaatcattaagaaatgtcatctgtttgaacattttaaaagttagagtctgtgatattatatattactaccagtagcatcatgtgttaatcattaaaaattaattaaaaccatggcaagtataaacttgttttttaaatggttttgagaaaatgtatacagtttcaaaaagtaacgttcaactaaggattgctaatgcttaaaataaattttcatctgatagttcatctgattgttttgattaaaaggaaatcagacaaactaaatctgttaggtcagaagagtgtatatgtagtcataacttaagtgtaagaagcctttgaaattatttccttttaaatatatatgcataattttaattcacacaaatttctttaaggaaagactctgaactctgttataagggccttgcattgttaaggttctccaccacctgtccatgttgagatccatgcagcaacatcagcatcacctggaagtttgttagttttgcagaatttcaggcttcaccctagacctgctgaatcagaatctgcgtttcacctagatcccctgtgatccagcctgaaaatcattgctctgtagttcagtaatactcaaattttagtatgcacagaatcacctggcaggtgattatctgttattaaaacacaggtttctggacctcacgcccagagtttctgattctggaggtctgagatgagatcaaaatttgcatttctaacaagattccaggtgatgctgatgttgttgtctagaatactctctgagagccattttacctgatttacttaaaaagtaaagaaaattattgagaata

SEQ ID NO: 104848 - DNA, 1050 bp, Homo sapiens
aacttaaaaaaagagaaatgtgataatttattttatatactgtgcattagaaatgtacttctttttgaaaattcttcaggggtaggaacagcccattttcatgtaagccattagactaaaagataaaatggtgtgatcttagattacaaatgtgttttactttaattaattgtctttggggttcattccagatttcacaaaggagatgtcctcatcactgcgtcaactggaatgatgacagaagctgaaggagagaagtggggtctggttcccacacacgcatatgctgttttggatattagagagttcaaggttttgccttaaatctttttcttttatttttcttgttggataagacatttcagggatcccagataatttatcagacttctgaatactgacaaatcaaggtttaagtggagtttataaaccatttcacctacattaacttgatctctaccgttgaaaattatgaaattaaaaggtgggaaaggaaatcatagggatggcacagatactgatgacagaacagaaatgctgttacacctctttgtcttttccataaaaccagcagttttgaggcggaatacatagcttccaagattccaagcttcttcttcgtgtttggatcaatcacagtgttaagctctaaagcagtggtcgccaacctttttggcatcagggatccgttttgtggaagacagtttttccacagactggggggtgggtgggagcatggtttcaggataaaactgttttacctcagatcatcaggcattagattctcataaggggaacacagcttagatcttttgcatgcacagttcacaatagggttcacactcctatgagaatctaatgccaccactgatctgacagggggcagagctcaggctgtaatgctcacttgcccactgctcacctcctgctatgcggcccagttcctaacaggccatggaccagtacctgtctgtggcccgggggttggggacccctgctctaaagcatagtagacactgaataaatacttatgaaagtgggccaggcatg

SEQ ID NO: 104849 - DNA, 1047 bp, Homo sapiens
atagttagaacattgtgaaagacatacgtaaacaccagcctgtttaatttacataggtgccctgagaatagtgttttctcagataaatgaatattttcctctaaggaaatttgtattttataattatacacttaaaatcttgttcaaaagtcatctctgaagaaaagtatgagggagtttgtgcttttcagtgagggtttgggggttgatcgtgtatagtttagatcttaatattaacattgaaatatgctgaagggaatttggaaatgttgaatcattagtcttgattctgtaaaggttaaccataatcttaatagcctccgaatcttaatatacattcatacattgtggtcatctattaaaatgacaatttaattcagaaaaacaatgtttcttatagcactaaatagctgaaaacaatgctcttaaaattagagattttttgtggagagatttagagcatttttttggagagatttaaaaagaaaataaatagcattttgaacccattttctaaccacattggattctttgtgattttaggatgattttgcgaataatcgagaatttatcacaatggttgtatacaagactgatgggaaaaaagtttattacccaggtatgtttagtagcccagcaaacattaaaataaacatacataagattttatttatatgattaagttgaaaaatgacacattttatgtagataatatagagaaataattatgttgatagactaatagaaaccactcaagcagatgggtattcatgctgttctgtgttttgttttgatttgttttaatttggagactccaaggggggatttccatattctcgcacatggctgtcagaattttatttctgaaacttaaatgatgtcttttactctaatcaaatgtattctgtggttttccttgaacttctggataaaatctaagctctttagcatgatatataaggctttttattcccaccttaatctacctgcccccctttatttcatgccccagcttctcacagttgacatagttgctactccagaata

SEQ ID NO: 104850 - DNA, 1667 bp, Homo sapiens
tctaacctgggcagcagagtgagactctgtctcaaaaaaaataaaatatttcccggggagcccatggtaaaaatacagtctctcttaaagtaagtttaatctggtgttaatctttaaggcttcaactgaaaaatataaatggtgtgttatgatcaaaaatagagtgtgtatgtttctactgaaacttcagaaacataaacttagtatgacatctgcacttcagataaagttattttaaatcacgtttgagaatatatattaatacagtaattctgttcattttaaatgctaggcaatatagcgttggatttgaggttgtaacagtttctactctaggagatcctggtccccatggctttctgaggaaatctagtggtgactataggtaatgttggcatttttattgtatctattttatactttactttttgtggcatcatcttctataaaccttattctcattttctctaaatataggtgtgggttttgctacctggaattagaaaatataccttctgggatcttcaatatcattcctagtacctttttgcctaaacaagaaggaccttttttcttggactttaatagtattatccccatcaagatcacacaacttcagtgatggagaaatctcaagttactggcttttatacttaccaaacatcagttcttcaaataaggacgcaaatcttcaggacagtaagcagaacaatcagaatggaattaaatctctaaaaacgtgttacagtggaatctggtgcttgtcagggtgtttggtaagaactgtatatagtcagaattacctaaatcacctagaggtaccgtttacatggttttgtgtatatagagttggcttgcattttaggggccattttgtataaaaagtgcatatgattaaaattagactcagtcatcactgtgagatgcctttgctaagaggataaaggaactgagaccagatgagaaaaagaaaggatatagattccttgagtggaatagtgggctagattaatataccgaaatatttccattgtttcccttttttgcagagcatgtggaagttaaacctgcttgattctactatacatcttgggcaactagttaccaaatgaattgtgccaccataactgattttaattttgcattatttatgattttaaaatatttgttgcccaggtgttatgaaagaataaagcttttaagtatagactaccttagcatgaagatgctcatgcctaagaatgaaaattgttgaggttatctcccattcaatcatgtagcaagaacttaaagaaattcactactgcagtttttatttttaaaaaacagtaattgagatattgaagacattacaatttagtttgtgtggtctttttttaaattgctgtatcgttcagtctcttgtggcaatagcactttgaagaaaatagagaatttaatatatggtgattgggatatgtagcattcaaaaaaagtgaattgccaagatactggtgtcatgtaaattcccactttacataaaaacccatcaggacagaatgatgctcaatattttaaaattctaaaaatagggtgggatttttcattgtctctactttataattatcaaaacttattttgtattgctactaccttaaattgaaataaaatgtttatacttacggata

SEQ ID NO: 104851 - DNA, 1075 bp, Homo sapiens
gacagggcagaaggggcagagaataaaacaagtgacaaagccaacaacaaccggggcctcagcagtagcagtggcagtggtggcagcagtaagagccaaagcagcacctcccctgagggccaggccttggagaaccggatgaagcagctctccctacagtgctcaaagggaagagatggaattattgctgacataaaaatggtgcagattggctgattcatcctgggccctggccgatgtgcatatcaacatttatacatggaactggagaacattgtgccaataatcatttaatatatgccaaatcttacacgtctactctaaactgctctaatgaagtttcagtgaccttgagggctaaagattgttcttctgggtaagagctcttgggctggtttttcagagcagagttcttgttgtgggtagactgtgactaggttcacagcctttgtggaacattccgtataacggcattgtggaagcaataactagttcctatgaaagaaccagagctgggaagatggctgggaagccaggccaaagtgggggcaacagcttgcttctctttctcttctcaccctcagtttgtatgggaaaatggagatgtcctctccactttatcccacgatatctaaatgaaaaagaaagaaaacccacacacaaagcaaaaactcaagtattaagagcacatatttttgacccagtggaggcttaaaaaaaaaaaaatccaagaacacaattcattttcaccacctctggtgttcagagggggcttttaaaaaagcgtgtatgctgggatacccattaaaaccattttctagaaggctaccatgagctgcactttttggggtgggaaaggtgaatgccagtggggatgcggggggatgagggtaggagggacttatagaaggggatttgtggctgtgggggagaaggttctacagcataagccttatcctgccagccaaggggatttattctaagagaagtgcatgtgaagaatggttgccactgttattagattgacaagatgttaatttctctgtaggttgtaactttaaaaataaatgaaatt

SEQ ID NO: 104852 - DNA, 1389 bp, Homo sapiens
tgacagcacaaccacagagacctggtaatgcagcatgggggccctgagacctggcagaggtatggaatggcacaacagtcaggctacagaggcagtgtggcatctgggacggggtgagaaggctgctactcacctcgttctacttcacattcaggggaggaggccccgctgcattcacttcgagggcccaacactgggaacatcatcccaaactctgacagggacacagggctgggcagatccaggctgccaggcctcacaaccgcagggaactggtcaggcatctcagacgggcttgttggtcctgaactaaagctggacacggactgggtttccgagtcatcttcagacacaaagttgctacagctgtcatcttcaaaggcctccgaggccactaagttgagagagaacaccagtcacatgggttctgtcacctcctcaaacaccacaagtgcttgctgctggcaggcagctagacacagcatgggggactaaagagtctctacctctgtgagtgcctaatgaaggaatgtgacttcccaagcctgaatgaccagcctctaaagcagctggaagggaagcagctggcagcaggatcccatggatattaagcgcccttccaataaccttataaccctgccaagaaatcagtgtcaccagacaccacctaaaaatggaagattaattcagccacaaattaggacctttactccacctcagtcccccaaatacatcctcatgtgcacaggaagaggttctagtcctctgtaacatatcccaaacaaagccagctggactcaggcttctttcttagggcaatagaagcaagagctgctagaagaaacaggccagcatggaacatctgttgggacctttgttatctccaggtaacttctgatctcataaagaacacactcaaaggctacccacatcaccatttgctgcaaaagaacagaaatcctttacaatgctctgtagccacattatttggtagaccaaagtaacaaggcccagacacatgttattcccatggtttcaaagcctctttggcctttagcggttttccctcagcctgcccacaatcccactccttattagaactttcctactccatttttccccccctttctctttaaaaacagccttgtagcattccataaaggtttcttataaatgataaatactgtaatgttggggacagaaaatgggctcagacctgaattgaatccctaactccactacttgctgtgtgaccttggtcaagttactttacctctgtaagcttcatgatcctctccatgcagggtttgagatgatgtatatattaaagtacctcatacatagtagttgttcaaatgatagtttccttttcctttaccttgaacctag

SEQ ID NO: 104853 - DNA, 1045 bp, Homo sapiens
ggctcaggtttgctccctggcagatcctccacagatgtgctgctgccctcagcaccaacaccgcatccccgaggccccatggcactggagcgccgccgctcgtggatctcatctgagatcatctccaggttcttcagggccatcttgtactcgccttttgccagggtcagtttggcctgcaggtcatccacagtctttttcagttgctgatcaagagaacaggagactaagtgaagactaccctgctagccttaagatgctttctgaatgacaggttcaagtacattttctgcccatcattctacttcaaggaattttccaagacatgactgaagacctaattaccattgtaactgctattcattcaccagacaaaatcagccaccaccatccccagatcccatccaggtgacaacctctaatatccaaaaactctcactggtggaacaaaccccatcagggaagcaaaaatgggcatcagacacaccaaagtcccacagtctagacatctggttcccagtacagtggttctcaaagttgagcttgcatcaaaatccccttgggtgttaagactcagctcactagactccaacctcagagtttctaattcagtcggtctagagtgggacctggtctatcaggtctccaggtgatgctgatgctgctggtcctaagagcatgctgtgagaaccactggcctagtacaacagagaaggtgactgaatggcagttacagaggttcagagaccactgaagacccaaccgagacaattttgaggtctgaaaactcagtaaagcctgtctctccactttccccttatagcaagtggcccatgtgatactctgctaccccagaaaagtgaagctttgagtgcagaaaaatctcatcagtgacgaagcccaaagctacacatacctcgagctgcacatagtactttgccttgagttcaaaataaggcctgcagaagacaggaaggaaagccatcagagtaatataatacagtgaccacagtcaactccacaagatgaacaagaggcatcagct

SEQ ID NO: 104854 - DNA, 1035 bp, Homo sapiens
actaaaatacaaaaattagccgggcatggtggcgggcacctataatcccagctactcgggaggctgagacacgagaatcacttgaacgtgggagacggaggttgcagtgagctgagattatgccactgcactccagcctgggcgacagagcaagactccatctcaaaaaaaaaaaaaaaagaagtgtcttagtgttatggagccctgcctggtcttactatctttttaagtagtaggccattttggttccgtattatgggcatttcagtctgtccccttagtaactatcacaaatttattttaagtcctaacttaatcaggttttattttgacagggttctccaaagtcatgttcagcctgcttttgtttcataggtattaaaaccaggcaaaagtgtcttgtttcgtgactacggactgtatgatcatgccatgcttaggtttaaagccagcagcaaacttggagaaaacttttatgttagacaagatgggaccagatcatatttttttactgatggtaagatgaatggaatccagtctttaaatgttttattctttgtttctgtttatttgattgcattatcactgcaaggctgcttggagaaggcttgcgacatgtgcacgagaccctgaaacaagccctctactgcacaatatttacccagcacctggaaggcacagacctggcccctgcccttgaagagctcacaagccttctctggtgtcagtgactcccctaatgagcttgggttaatggacagcctctgacatgccatgtggattccctactaggaattgtgctggaataagagggagggcaagtcagaaacttcttgtccagttaaaaataaagcaaatttgacagtataatgccttgagattactttcccatggcacaaagtcaggaaacctttttctgtagaattgattggatctgttttggggtttggtttttttgttgtttttgagacagagtctaattctgtcacccaggctggagtgcagtggtgtgatcttggctcactgcagcctcca

SEQ ID NO: 104855 - DNA, 1008 bp, Homo sapiens
atgctcagttttgagtacgtgatactcttattgtctcctcagttaaaaatgatttattaaaatgaagtcttgctcctgtagcagtagtgaatattacatgctttatagtgagtgatttattaatcagttttatctggtaacagtgataatttctatgtatacaagtggaaattggatcgccttttgatgttgtatttttctatatgtatcagcctagtggttgcattaaaattcatttgtatttcttccccctgtagcaaaatcctttatatgatacagaaagatgcaaggtattccagtgtgatctgactaaagatgatcttctggatcatgtaccgccagagtctgtggatgttgttatgttgatatttgtgctgtcagctgttcatcctgataagatgcaccttgtcttacaaaacatttacaaggttagtgatttggggcctgcacttgagggttggacagtctggattcttttacttaccttccctcatgaggctcatgtactgtctagattcacatagtctctccattctcactaggtaggctgtgtagtgagtgtatagaaaggggtcctctggcataaaacatccaccctaaattctgatttgtgcagtgccatggctgctcttcagagcttcgccagccctgggacaaggatgattttgcagttacctgggatccatggagtcctgctataaggtgagaggagttatggtttagtggtcaagagtacacagtttggccaggtgtggtgtttcatgcctgtaatcccaacactttgggatgccaaggcaggtgaatcacttgaggtcaggagtttgaaaccagcctggccaacatagcaagaccttgtctaaaaaaagctaatgtatgatcattggcagatcacttaaccctgttgagtattggtttccgtgtctcatgtgagaataataatcacattcctttgtcccacagttgggtgaagatacaatgagaaaatgtatggttaagcagtcaaatgct

SEQ ID NO: 104856 - DNA, 1035 bp, Homo sapiens
atagttaatgttagtaactatttaccatggctgttttctacatggcctatcatttgacccttataccggctctgtgaagtgtaagtattagtattgtactcatttgtccccaaggtaaaattgaggcacagagctgtttaagtgatttacccaaggatagaatgcaggggaggagttgagatttgggtgctggcagtttaactccagagccgagttagccattgtgctgtttttttcctccacaccaaattgttaatgttggatgacaaatgaagtaccagtattagcttttgcttattagttctcttgttgatcgtctgctccatggggtcggagacctctcatattctggaccttttagtttggtttatttcttcattatgcaaatgtgatatactataactttgagctgtctttccccagtttgaagatcaaaagttaacaatgcttgaagctggctgtggggttggaaactgtttattcccacttttagaagaagatccgaatatctttgcctatgcctgtgatttttctccaagagccattgaatatgttaaggttggtgcaccatctatgtattctgctgtgtttctgttttcttgccgatcttgtttgatctgccttttttattcatttgcccaattctagtcttccctggagctaaccagctatagtcaccatacatgtagttgtcctgcttacatacatatacagtgcatgtagaaacacagctttattcaagaaaagcaggaaaaaataccataataacatccatataattaacatcttttgctttacaatttttctttgctgaactattttaaagtatattacaaatgtcaagacatttcactcctaaatgtttgcatacatctccccttaaaaaaggcctttttctacacaaccacaataagtttatcatatttcacaaaaataactataatctggcctgccatgttggttcgcacttgtaatcccatcagtttgggagcctgaggctggtggatagcttgcacccagtagttcaagaccagc

SEQ ID NO: 104857 - DNA, 1061 bp, Homo sapiens
ataaaagtatggtgcatgagatagtctggccactgaaatgaatgtaagcccactgaaggtagggactgtgtgtttgtcttctttgtgacctctcatatagcgggaaggatttttttttgtacagtctgcatctcataaacatttggtgaattgaacctggcgtcttgaactgtaaccactaaccagaatctaattcttttctctgcgaagccccctgtgctgtttgaggcgtgaaactcacctcaggaaatgtatctgatccattagcgtggattcatattatttggtgatggagaatcttcagctgtgttaagtgttaccgtcagtttcagagatggcttctttgcaaaggaaagggctgcaggcaaggattctcacctctgaagaagaggagaaactgaaaagagaccaaactttggtgtctgattttaaacagcagaaattggaacaagaggctcagaaaaattgggatcttttttacaaaagaaatagcactaatttcttcaaagacagacactggaccaccagagagtttgaggagctaagatcatgtagagaggtaagctaatattacgccttatctgagctgttcttcatttaaaatgtgaagagggtgccatggctcatgcctgtaatcccagtacttggggaggccaaggcaggcggatcacgaagtcaagagatcgagaccatcctggccaacatgatgaaaccccgtctttactaaaaatacaaaaattagctgggtgtggtggtgctcgcctgtagtcccagctacttggaaggctgaggcaggagaatcgcttgaacccgggaggcggagatagcagtgagccgagattgtgccactgcactccagcctggtgacagaacgagactctgtctcaaaagaaaaaaaaatgtgaagaggtgtgctgtattgcattcctagggagagtgcgaagtagagaatttaagaagcctatcaaaatgctttgcgttttaggagagaaatatactgtttggtcttaacaccaaagttttagcagtttctggtttggttaacatataggagagagaac

SEQ ID NO: 104858 - DNA, 1007 bp, Homo sapiens
aagggaaccgtggggagcgctgacttacaacgaatagtgtggaaggaggcccgcggccgcttctcgaagctctccccgagcctcaggcaatgttcctcgcggtccagcagcgggtttgcggtcccattcatggccccgcacctgcctcgcacccagatcggcgctctcccggtgcagccgcgatccgagcttctggcgctggcgtctgggaggactgtgcttccgggccaccgctctggaagacaaggagagccgagccggcacccacccgggtccagaagcaagttctctcctctgcgtgggggtgagagaggaatctgaggaggcaaggccgtgggacttccggcgtcgggtaggaacttccgggttcctagcggaagtggcgggggcggtgccatggcaaaagaactcccggataatccgaattcgtggtcctcagaattggtttagggttgtttcgcggttcttcccgtattctgcctccgaggcccagtggggctggctgtggggtgagtgcgcctggccctagccctgcaggtgaatttaggaactgatgacggtgagccctgagcgtggctgactaaattaacgcgggtcggctagccatcatggacgccctcctcagggtctaggggcccatgcagcctagtctatcctgagggtcctgagatggatcctcgggacctcagccacgcgtcattgggtctctttctccactttgcccggtgatggcggtgcgagggtctcagtccctgcaaagtgacgctccctctggttcctatgacagcctcttgtgagtgtgatcaggaaatgagcccacccaggcttagcttcatttcccccgaaaaaacggaggtccgacccttgggaaacgatgacctcacttgtatctgacaattgaccacccgcttccagctaaggccattgtggtttttaagtcacccctttcgcgggcaccgaaaattgaggaatattttcttcgcaaggtttcccagtcagttcttgag

SEQ ID NO: 104859 - DNA, 1021 bp, Homo sapiens
tcacttataatacagtaattattataatacagtaattaaattgtaaagattgtcacaacctgatgttttttatgcttcgttaagccatttttttttcattcattcattccacagaaaataaaaataggtaccatttattgagggggtatcatgtcccaggcactctgctagatgctttatatgcattgttttatctaacaagtaatttttagaaaggtgttattattattttttacttcttttgttaaaaatatggaattgttcatgagtttgtgtgtcatccttgcacaggggccatgctaatcttctctgtatcattccaattttagtatatgtgctgccgaagtgagtacgaaaggtgctattatctaaaaaaaaaaaaaaaaaaaaaaaggtacggagactgagggttagagagcttgacctaccccggagagtgtgctgcagagtccttgctcctgtcctgccactctatttatttgtattcattacctacagtgaaccaggtgctaccgatattcctccaatatctgatggttgtggtatattcccttactactcagtgtgatatgggaactaacagtatcatattacctagatgatatgcagaatctcaacacctatgagatctgaatctgcagagatcaccaggtgatttgtgcataagcaaaagttttagaagcactaggctagtccatttacaaaagaaattgttaactgatagaatattctcagcttgggatggaattctgcttgtctgccagcaagagctggcatgtgatgaaatgaacaagcagtatatagataatggaaaaaattttcaagctgggcaatattttaggagctactttatttaggaactcatgcactcatgattataattacataatgatgttttggtcagtagtgacctacatatatgacagtggtcccttaagattctaatggagcatgtatggaaacctgatatacggcacttgatattggcattgcagatcaagtagggggaatgactgatatt

SEQ ID NO: 104860 - DNA, 3473 bp, Homo sapiens
ttcgaaacctactttttggtgcacaaacatgccgcaagactgagctactttggcgtggagtccattgcaagaggaaaatgttatggatcagtgactgtagtaggagtttgaggctctggaactctcacatattcaagtctttaacttagtggtgatgggtgattttctcgtgtcatttttgaacaatctcatctttcaaagtttaagtagacctgtagaagagctaacagaattatatttctatttagttaaaattgttaatgaaaaacagataaatgtgccctggtctaagttactcaaaggccatatcttcaccaggccagagattcagttttaaacctcagcagccatcagtttggccaagtggttggtaccagtggaatgaagtctttgatgggtaggagagagagggaaaacctcaaactacatcatagaagtatgttaaaaccactttaaattgttgacacaaagtggtaaggaagttttgtctgactcagcctgacaagcctggatagaaatggacctcagaatacagaatggagtccttgagtgtcagttggtgaggaccatggagtcctgccagctcaacctgtcatttacagactaagaaagggaagtacacacctggcttgtggccagtctcctgccccctctctgggctttcctcactgttctctcccttgaatctcatttgtaggaatcaagagattcctatacatgggacttttagatgtacattggcacttggattagattccaaaagacaaaagtgttgggtgcttctagcttgaattcagtccctaaatacatgaggctgggtgagcagatgaaaccggtagccactgtgctgatgcatgtgactccattcagttggggattttggttccatgtggatccatactaagtattcttcagtcagtggattttagcaaggggaggtaggagtggaagagaggtgtgaagaaacctctccgaacaaatgaaccagcagtaagtttctaaaaatcagaatctagatagaagttctgcaatatgaaatgagcacattctttgataaggcgtatctattcatgcttttgtaccactgttttgtacctgactccctgaccgatttgtattttttatatacaactagaaggaagtcacaagattgccttctacagtgtgccatttccaaatggatctgttgttggaggaaactggttgctagtcaatgttctatatttaatgaatgtgtgataaatcatcctgtaatcagtatggagtaacctgtttttgtagtttggatgaatatgtcctgagaaatttccatccactttggttcagcggacatcaaggtagtaataataatttttcctccacaggtccctccactcatatggcctctccctccccagctagtggaggggaagcagtctggacttagaaaggaaataggtggtctgtcataggggctttcattagagttaaacttcatagagtcaactgtttcatcatcatagtgagcccagagagccactgcccagcagcatgctcacaccacctaccctagtgtaggtaataggtctacgctaggaccccgtgctgggctctcagcccatcatgagattttggtggatttaatggcaggtaggaacttatttatagtggattgataattgctttataattccttggtaatgacagctcagggaaggtttcacaaggtcatgatcaggagacttgaattgttactggatgtaggaattgtttcactgctcttaacttgctcaaactggggcaggttccaggaacttgaactaaaaatatctatttaagcctctctctctttctctcctccccaacttttttctgaaagccttgatttctgtagacagaactatggtttttggcatgttgggtcaagacgtgtttctataggaaatgcttgcacgtggcactggcttggtgagtcaagcttcctgagcttcagaccgtttgtcctgtcatctgtcctgcccaacactgtatggtttttctctagcacggcttcaattttgttctctgcacaaagcctttggtggttctgccctctgccctccagctttacccaccagagtaagcaatcttttctttttagaaatcaagaatttggcttcacagatggcttctcacagatgccctcctgccagccaaaccggacttgttcttcctgcctctgtgccttctctcattctccttctctccctccataccccacttttgaggttctgtgggtaccatctttgtggactcttgtcttttttttcaacccacatggagtgccctgtgtgtacatactgaccttttttttttttttttttttttgcttgaactctggtcggtatgagctccttaaaagcaggtactgggctggctgtggtgactcatgcctgtaatcccagcactttgggaggctgaggtgggaggattgcttgagtccaggagtttgagaccagcctgggcaacatggcgagaccctgtttctacaaaaagaaaaagggaaaaaaaaagcagggactgtcattctcatctcctccctggggtatccacaggaatggacattcaaatggttgtagcctggtggggtagaaggcagagaagactacccagccagtgaagtgcagaggatagacataggaaaacattccaggcatttggagacagctgaaagtatccatgctgactttcatgatttagaagtctttaactgaattattaaaattgccttttttttgtgctgtacaatgtctactgtactgtgggtcatttagatgagatgaaaaacttaattaaatctgaagtgtcagaggcgcttagtaagccttagtaaagttgtgattgaagaaacttaatacaaatgaactagaggtttgtaatcatgccactcactaacgattttatttctgtagcagaatcattttttctatgtaaggtgttaatgtgtgtgtatgtgctttggttgtaggaaaacttgaaaattccaaaatccttattttcctatttgagaggctggttcagcagggtgtgtgtgtgtgtgtgtgtgtgtgtgtatgaatggtatatttattacattattttgaaagagaattagtgtgttatgtggataatgttatatacagccaaagtggatgtttctatttggcaaggaaggtaggatttctgaaactcaggccttaaccaataggttggaagacaagaccaattgaagagttaggaaatgtgagtttttgttacttctgttattccagtcttggtttcattgtctcattctttatttttaaaatcttgtgcctaaaagtttttttgcttaattatgaagtagacatgcatgtttacatttatgtaaaatatttgctgtgtaaagtattttttgtttattctcttaaaagatcactatatttaaataaaagtgaaggtcagcaacacatttcttgtcttggtgggtttcattt

SEQ ID NO: 104861 - DNA, 1015 bp, Homo sapiens
ttgaaaggtcaagaatccacttctgtgatatcacatactctcagtccagctgaggctaaatattcctgctttacactcccaccgttgccttctaatttaaattcttgcctcctcttgcccaaacaactgcctggccaccctaagtggtgccttttgccatcatacatgagtgcctggagggcagaagttgtgattcatttgttatatcaccacagtgcctggcttggtttgtgctttcacgtggtgtagatgcttaatattatacattatttattaattgaatgacattctttattgaatgacattctttattgaatgacattctttatctacaaggtttgagatttgtattttttaatcttaaaactaggaggttttgagtttctgttgcttctacattttacttgtctttgttagaacaacattctgttctttcatctgtgtgaaaaaatgaagctattgacctatgaatggaacctatacttaactgtttttgtagagatgacatatctgccactgatttcttcatacagcaaacatttattgactaagtactgtatactaaggattgtgctacataacctgtaggagagagggatgtaaagaaggagtgaggtttagtcttgatcttcacgttgatcagtcctggaaggtgagggtaagacttacagaaaaagactcatctattataactctcacaatagatgtagtagcacagaaggggtgactggttctctttgaggacagagaagattgcctgtagaggtaatgttagttcatgtggttccctcaaggtaggtaaaggcatggtgagctgtgagactggtaggtaggttgaggggaggttgtgggaaatctaaaaagagtttgaatttttttttttttttaacagtaggcaatgggggagactaaaggtttttctaaacaggtgggcgatgtaattagatttgtacttcagaaagatgatgcgaggcatggttgtacatgccagtaatcccagctacgaagggggctg

SEQ ID NO: 104862 - DNA, 1039 bp, Homo sapiens
gaggccttggagctcatgaaccagaaccttgacatctatgaacagcaagtgatgactgcagcccaaaaggcaagaatgctcctcggaacctgagtttctctcatacagagcagattgctctttaccccttgatcagtggttgggtaatcccaggcttcctaccaccctctgaaaaagcatccaggtagttaacctgagttgagttagtcagttgaattaggagccttacccctcagagagtggtccgtggaccggcatcccctgggagcttgttagaaatacaaaatcttgggcggcaccccagacctactgaatcagaatgtgcattgcagcaggatccccaggtgatgctttcacatggcaagtatgagaagcccaggactagatccccagttctcaagtgtggttgtacataagaatcacgaggtaagtggtaaacactatggctgcccgggtcctggagagtccgttgtaattggtgtggaaggggtgtggactggcactgggattgttttaaggctccccagtgcagtctaatgtgcagaaaaatttgaagatgactgggcgtgatgacctctctgagtcattcgaagcttcactgaagtagtaagcatctgcaagaatgccgtttgctcccttcagactgtttgaggctcgtttccggtctctatgtcggactacgatcagtctgagaccttcgcccagatagaactgaccccaaactgacaaagggaaggtcagtgccagcctttgtgaaggcttcctggttggcctgaatttcctgctcccttcaggaagggtggggacaaaggagaggcccccctgggggcaaagagggaaatatcagaggttgcctaagaaaatgccctgctggaaaacacaaacccgaagggaagtttgggctgtaactctggtggcagggtgaccaagcgcagctgcttgaggaagccctgctgtgcctcaacaggatgtaaactcattgtgagcaacactttcctgctctctgtgaacttaaagggcagaaccagcaggtcctgcc

SEQ ID NO: 104863 - DNA, 1069 bp, Homo sapiens
ctcactgcaagctccgcctactgggttcacgccattctcctgcctcagcctcccgagtagctgggactacaggcatccaccaccacgcccggctaattttttgtatttttagttgagatggggtttcaccgtgttagccagggtggtctcaatctcctgacctcatgatccacccgcctcagcctcccacagtgctgggattacaggcaaaaacctcatttatttacacctttttttcctctaggtgctccagcgcctgagttgtatggccatcaggggagatatgttcttggtggccaatcttgggacaaaggagccttgtcatagcagtgacccaaggtgcccaaaagatgggagataccagttcaacacaaatgtcgtgttcagcaataatggaacccttgttgaccgctaccgtaaacacaacctctactttgaggcagcattcgatgttcctcttaaagtggatctcatcacctttgataccccctttgctggcaggtttggcatcttcacatgctttgatatattgttctttgaccctgccatcagagtcctcagagactacaaggtgaagcatgttgtgtacccaactgcctggatgaaccagctcccactcttggcagcaattgagattcagaaagcttttgctgttgcctttggcatcaacgttctggcagctaatgtccaccacccagttctggggatgacaggaagtggcatacacacccctctggagtccttttggtaccatgacatggaaaatcccaaaagtcaccttataattgcccaggtggccaaaaatccagtgggtctcattggtgcagagaatgcaacaggtgaaacggacccatcccatagtaagtttttaaaaattttgtcaggcgatccgtactgtgagaaggatgctcaggaagtccactgtgatgaggccaccaagtggaacgtgaatgctcctcccacatttcactctgagatgatgtatgacaatttcaccctggtccctgtctggggaaaggaaggctatctccacgtctgttccaatggcctctgctgttatttactttac

SEQ ID NO: 104864 - DNA, 3119 bp, Homo sapiens
gtgaaactggaaactttatgacattgtaaattatcagctggtttttctgaatataaagtgtgaaaacacagaacagtattttgatctatttgataattttgtgggttttttgaagaattaatgagcatgtacatagaaatagtgactgcttgaatactgtatttacttgcactctttcagtacatcaagattcctgtatattttagagtataataaaacacagatgtgagttgtatttaatgaataatgtatttgtatctgtgcatattatctacaaatctataaagtttctagggcattgactactagattttaagcattttttctaaaatatttacagaaattataaatctaatcccccatcttttctttataatataaagaagtcataatgaacccttcctaattattagtagtaggaaggtgaatatgcattttaatgacagtggactacattttctattgtaccttttgaaaaaaaaaaaaatcaagcagattctaaaagtatacatatgtgtgctttctctttccttttaggaattctcttctgaattccctgagggaattttctagaatctcagaattgaaagagacctgaggttcatccagtctctaacctcttaacaaatgcaggagtcccttctacaagggtgatctttccaccttgaacacttccaagtgactctacctcaccaagcagtccattcagttgttgagcagctctaactgttagaaaggtcttccttagatggagttgaagcctccctcccggtaacttctgtctttgggcctgggtctgtcctccaagagaaccctgagaatgttggaaggatgaatctcgcacattctgccatgtcttctcttttacaggctgtttgacttctctgctgaagtgatttccagaaggactcatttgacacactattagatttaccacatctaatgaaatccaaggtgtagctataaagtgacaagctgtttttaatttatcacatacaccagaacttctatcctgcatcacttatatgtaaatgatgctgttaccaaaaacattaaggtagttcttgcgaatgccaccccactaagaaaactatttcattacttttgtaatccatctgtgagagtctgccccccagcttaaccacttcctttggtctgcacccaatgaagggaaaccccaaagtactgtctcaaatggtatttgaactacgccagtattgttggaataagtacattaattacttgaatgaatgaacacagcaccgtagaaatttcctttatggttacaccttgtatgtctaaagcattcaggccctgttctgtagtgtttcttatcctcacacagagtagaaaagcctgtttgctttatttaacttatacataaaagatgacatctgaaatatctgatgtgtattataataccagcttctgctctagaactactttgggtgaaatggtggtaatagcaaatgacctcctttaacaagacactcatctcaaacaatgccatttagttcaggagatctctaagtgtagctgtaaattttggggttaatttggcttatattggaccttttaaaagaaataaagttttttaatgcaataaatcaagtgtctgtctcttttacatgcaaacttcttttcccttaaactgtctagcattgaattgacaagttttttttccttttctaataaaaaaatgactttttagcaaagttgttttagacttaaatgaacctatctatatgggattttcaaatatatttattcaacaaatactgcttgcctgctgtatacttgggagtgggaatgggcagaaaaccaagaaattgtgatcttgtcctttaggagcttacaattaatttcattgtggaaaggtataagtagaaagtaataaaagtgtaattgaggtagagattaattgataaaaggtacagaataagatcacattgggagggaagatcagaacaggcgtcatggaagactaggtgcggacattgagaatcagatttgaacagatggagaagggtgcaaaccctatgtgaaaagaacaaaatcagcagctctttaaatggttggtggagttggtggaggggcgctctgggatagagtagatatattggcacttagcaatcctgagcatggaaagatgatgaaaatatacaagagagctaattggaaacacgtacaagattagataatagaagtgagaacaagtagatataaataggcgatgggaggaacaggtgaagagggctttaataacctttctcaaagtggtctttatgcaggtaataataatagaaaatgcctatgcagcatttatcatgtaccaggcaaggttgtaagtacttgaaataaattatctcttaacccacacaactgttctacgtggtaggtactatttatagcaccatttaacagatgaggaaagggggagatgaagtagtgtttgcccaaggtcacctggctggtaatttgtgaagcctagattcaaatccaggcagtcatgtccattgtcggtgctcttaaccccctaatgactgctgacgtgcaatctggtctttgttgaaattgttgattttgaagttgagacacacactgaatactaaattatgtaagttcccctcattttattctcctagattatttttaggagaaacatgtaaatctgactgcaacaggtgtttattgaacacctgctatgtgccaggaactgtgctaggctcttggcatacagcagtaaagggggaggtaacatagtttgccctcaggagtggatcctaaaagaatgatgtcttcttacatttcagttgctgttgccacctaaccaccccaaatctaagttgtttaatcactcttactcatgcctctgcagattggctgacatcagcttgtgtgggtaactgcttcaagctgggtctctggctgggctttactacctgctgtgagttgtgcttccagttgctcccatctatgttcattcttgggcctgggctaaaatagaaaagttatacagaagtttccacactgatggtagaagcacaagaaggcaagcccaaccacacaagtatggtttgtgccttctgcgtgcatcacatctgccaacactccactgg

SEQ ID NO: 104865 - DNA, 1565 bp, Homo sapiens
aagttgtgagaccttggggaatcattcttctctgggcctgcttcctcttctgttgtctagtctaacatccccttccaccctaggtttctatggctattctttttctacttattagaaacttgcgaatcatgctggttacagcaatttattataagctaagtaatgtaaaatatgtctaaagttgaagtactttaggcttatttccttgtctttggtgaaatacatctcaggatgcttaatttttaaattttatctttaattctaggctataccccagctttggcctgtgctcccaataaggatgtggctgattgcctggctctcattttggccaccatgatgcctgtctcatcaagtagtcctttatcatccttaacattcaatgccattaaccgttataccaacacctcaaaaacagtcagctttgaagctttgcccatcatgaggaatgaacctagctcctattgcagtttcaataacattggaggggaacaggagtacttatacactgacgtggatgagctcaacgactccgattctgagacctactgagaggctgaggaggagggagttctcacagtaaagcttcaaactgtgctttttcaggaaaaaggcactttgatattcacgtagaaattcaacctaagaggaaagatcccacagtgagccaatgttaagagatctgatggcattaggaggaagagttttaaaggcaagttttacaaaaggaacttctagaatcttgaaatagacctgactgaggaaaacacattgatgtcagaattctttgtggaattgtttaatttggttttgcagtgccaggaacaattggggacactgtgcactctaacctgcttacacaagcaacactattgtaacagaagaaataaagacactagatttaaattttatcaataaaattacaactaaatttaaaggcaataaaagtttggtacagtaggcattatgtgcacagcaaattgcaaaaggaccaaataactgaaaggtttttttaataaaatgccattttgtggaaactggagtagattaaatgaaacattacctaaaccaaactgcaatatttctggaaatgaagctgagatttggttttaaatgttgagtttttttgggttttgttttttttttaagaaaacatctgaaagccttccaatgctgtattaaaccatgagagaaagcagatgtatttttacatttttttcttttacagaactatttcaaatttccaatttttatactattagaattaaaaaccagctgactgggtgcaatacgggtgaaaatacttgtgacatagacattgagatggattggggtcaggctgttgccctgttttgaatggtttgggtttaaaatagtactatttttgtttgaaaatgtaaagaatttcctagaaaaaaattcatgaaatcaaaaagtagactatttcaccctattgcagctaagtggtcctggggcatggagtcttcaacctctctatgaatggcacaccttagtcacttatgttacttttgtgtccccaccatgggttgggggattttttgttt

SEQ ID NO: 104866 - DNA, 1067 bp, Homo sapiens
aaaggattgggtgaaggtagggacctgtcgatgggacctatggctgagcttgatgccgagctacacgttgacaaggtgtgacagtgcactgcacagaggttctgctctccctgcccccatctttgttattaggactaggtttctcgagtttgtacctcttggtcttcacaagttgacaaaaatgctctttgacagccaggtgtgtatgtgtatgtgcatgcacatgcacatatgtgtacatgtatcatgttttttcccctagacctctgcatgttgctgcccgaaatgggctaacaatggtggttcaggaacttttgggaaaaggagcaagtgtgcttgcagtagatgaaaatggtaagttggttctatattctcttcccttaacctagagcttttatcttttgatccatatttgaagagaaataaacttggatattttttattggtcaaagaggagagctaaagttaatattgaagagtagtttgtggcaaaggaataagggcaaaagaaataggaaaagttatctaacagatgtacttccgaattcctatatcatctgttacagcaaagttagtatttactgtttatacttgccactttctgttgttttagtagccaaagattttgttctttcagcaaatatgtatcaagatcctagttaagtactaatattcttatttaaagccagtgtttctactcatgcactagatcctgtccccttttgcctacttcataatgtcagtttgacagttctcttttgtgtcctggagtaacatttttcgctctcttcctgtattattcctctcagtatataaacattagttccctcatccttaaaaaataatttataaatctcactgctcctgccagctactgccatatttctctgtccccttttgcagcaaaactactctcttgctgtccgcagttattcctctcattcttccattcttttgttgttgttgttgttgtttgtttttgagacggagtctagctctgttgcccaggctggagtgcagtgccatgatctcggcttactgcaacctccgcctcctgggttcaagcg

SEQ ID NO: 104867 - DNA, 1099 bp, Homo sapiens
cccttgtgaataccaaaaccaacaggcgctcaagtcccttatagaaaatgggatagtatttgcatataacctatgcacattctctgctatactttaaatcatctctggattacttataataaccaatgtaatgtaaatgttatgtaaataattggtatgctgtatttagggtatatgacaagaaaaaaagtctgctctgttttttttttcccccaaatatttttaatttggggttggttgaattgatggatgcagaacccacggatacagagagccaactgtatgtattttgtgcgtgcagttgtatatgcctagaaattttcaggaactactggtggcttaacagctaccaatggttatattccagagaggggatctgggagatgggatgagggagagacttttacatttttcctttaaacacttacatgtacctgtgatttttgccagtatctcctttgaattttaatacctggttctttacacctatttaggtcacgagacatgtgtagaactgcttttagaacaggaagttttccagaaaacggaaggaaatgcttttagtccattgcattgtgccgtgtaagtaaagccagaatgaatcagatttggtttgagtgttttaagaaatacaccattgctgtgagaatgatcaccttgttaccttacacaggataaatgacaacgaaggtgctgctgagatgttaattgatacattaggtgccagcattgtgaacgccacagattcaaaaggaaggtaggaattcaactatgtattaaatagttttagccaggcacagtggctcatgcctataatcctaacaatctgggaggctgaagtgggaggatgacttgaagccaggagtttaagaccagcctggtcaacatagcaagacctgcatctctaccaaaaaaaaaaaaagtgcatgatgatgcatgcctgtgatcccagctgttcaggaggctgaggcaggaggatcacttgagcccaggagtttgaggcaacagtgagctatgattgcaccactgcattccagcctgggtgacagagtgagatcccgtctgggccctaccccccaaaaaggttttattttcaata

SEQ ID NO: 104868 - DNA, 1255 bp, Homo sapiens
tagtttagtctctttgttttttactaccttaaatccttaaccaaaacagttttgaaaactataaaacctttggggtttaacttctctttttcccatttctactcgctaaggcaagtagaaatgagtgtagtgaagtggccagagactagtactcatactagaacaaagaagatactgtattttgccattgatgtttgatttgtttctgtaatgtgacttgacattttacaagtataaggaaaacccaaaatatctaatatagtgggaaaatatctacaattgtgagttgtgtttctgtaaaaaagtcagtgagataaaactgttcagaagcaaagacttactgcttggtttttaaaaaaatatatccctgaagattaaccattggaaaaatcacacagtgagatatttttcctcaggaagagcatttagttgtaaatgtactgctgtaactgtcctttggagagttgctttctattacagtgtttgttatcagatctatatgtagaacattttccctaaagtgagttcctactctatcactgctaaatttagactctaagcacgttttgtgcaagagacagaattttgcaagaactgcatgcctggttgccatttaaagatcataacaaatgtgtctgattttcagcctgtagcaaaattgtggtgatgctgaatttgagctggaaggaatttaatgtgtgttggctatatgcaataagcgactatatagacagcctaaaattaataccatatttatagccaaaagcccgttttataatttggcattctgaaagtagaatatgtaaaatggtttttactttaactagtaattattgtacagctggaaagaaaagtggaagcatgccaacagaacagaaaacaacctcttaaaattaaaatgaaatgatggccaagttttagaaaaacactggctgtagatactaaaagttcacaatttcagtttatatagtcattcaatcacagaacttaagaatacttattattcctttaaaaaatgtgttcatttttatgaagctctaaacatcctcagactagcctctgaaactcaggaggacccagtttaccatcctatctatctttcataaatgatgatagaaagttatgagattgtctgcttgatatcacccagtaatgatttctggaggtcacaaaggggccccactgttcccttttctcagtctgtactcagatggtgagtggttctcaaaccctttggtctcaggaactatggatt

SEQ ID NO: 104869 - DNA, 1063 bp, Homo sapiens
ttagaggcagatgatagggcatgggtgctgggtaggcggtctgcctgtcatgttttactgtgaggaattcacatttattccagctttaacagtcaaaggccgtagaaaccttctttttacctatagttttcattcttgcatattaaattcagtgcaactatcccaaaagtaaattctagaagatgtgcttttagatggacattttctattttatcattatatgtaattactgaaatgtttaaatttcactttacagcaacaaatggtcattcagaatgcttacggctattaataggaaatgcagaaccacagaatgcagtggatattcaagatggaaatggacagtaagtttcgataaataattgttgcatcacagaagggcgtatttcgaaaaccagagtacagtcttaagtgacagcactgaacctattcctgttgttgctcaggacgcctctgatgctatctgttctcaacgggcacacagactgtgtttactcattgctgaacaaaggagcaaatgtagatgccaaagataagtggggaaggacagcgttgcatagaggggtaagcagaaatatgctctttcctttcaaaaagcttttatgacctcatattacctagaactgaactaggttatgtttattttttcttcattaaatgttcgtcaaatagtctttaccatttctttcagtatcttagtttttaaatgctaattttgaacaattacagagtacaacttaatctagagaacaatgttagaacaaaattttaaaactctaaaacttttagtagaattaatgtcaatttgactttttccattatctcacttattttcttatacactttaatcttttttcacctttgaaatatcattattttcattgaataccaagtttctctcttcctgttttcatactatttgcattttagaagggttcttgctttaactgaatttttaaaccacttccaataaaaatacagaattactcataaaatgataaatggctttaattgatggaaggatatggagagtatggtctttaaagtttttaattagctgaaa

SEQ ID NO: 104870 - DNA, 1446 bp, Homo sapiens
gagtgatccttaagaatacatttgaatatatgtcttggattttttttctagtcctttgggaagcttacattttagaagactattgataacacccactgttactcccagagccgcccttcaaagctatcagatgttcaagtggggctgagaaaaatattttaataatacattagaacctctaataaacatatatacactactatatggtttgaacaagaggttaaaatgcattacttgctgttaccttattctgaaaaagagtgaagttatatatcactttgcaaagccaaacttggtggcgcatgcctgtattcccacctaacttgggaggctgaggcaagagggtcacttgagttcagtttcattgcactctaggcaacatgatgaaaccctgttcctaaaatataaaataaaaatcaattttgtacactggatgggatctgtgaaaaataagtacattttaaaaatattaatctatagctagaaaaattataattgcagatcatatgcagaactaatttaaagcttgcatggagtggttgcactctcaataggtaaatattgaactgagacattagccagtcccttagaagtagttaaccaatgccatatagttcagcataaatcctacccacaaaaagaaccacaggttactcttagtgcctatctattcaataaatgcaagccttgtatctatagatgcctttcaaatttggaggtctatagagagcatctataagccatgaaaagaacactgagggttttttttcctggaggtttaccagtcatttcccacagagatgctgtgcttgctgtttgggtattgaacttagatgacacaaacattcatcagtagcgactgtgaactgagtgtaaatgaactgatttgaaaaatgatgggccaaacaagttcttcttgaacatccccaagtgttacgaccctgttttttgttgctaagctgtgagagctgctggcagagtgcagcatacagattggactagggtaggagaggtgatttaagccacaagtttaataactattagtatttaatataactgtgggaacatactgtggaatattcagcacctagcttgcttttgctagttttgtcatcttttaattagaagaaatagtgatagacgttcttttctgtatcatatgcaagatacatttttttctaatgtatttctttaaacttcagactttgtatatattaacaggacctgaattttgcagaggatttaacttacttcaaaagctcttttctttggactacttctacttgtacccttgcccattttatgcatttggacttaacacatgcattctttagatggatcatttttcttgtactgtatgtatatatatatatatcatttgaaattatttcagccataaataacagagtaccctactgaaaatagcttaaggggtttagtgtctca

SEQ ID NO: 104871 - DNA, 2220 bp, Homo sapiens
atcatgttttataagtttgctgagttgccaaataatactctaaggtggatttgaactgggtgggtgggagagaataattgctgtagtatgtctttctgacatttaaaatgcctcttctttttcagttaatggaaacctcaggaacagacatgctgagtgattcagataatagagcaacaataagccctttacacttggctgtgagtactgccttcatagccgacttgatggctgctggtttactgaaaatatctaataacctatttgtgttgactcaaactagtaccataaacttttggtccatgtaatagttatcatggaattaaaactttgagaactttctttaattcagagaattacttaatgtgctgggtttttgtttttgttttttctgtttcttgctttagaaaaaaaaaaaaaagacagacagtgatccttaggcttcccccagggccttctggggagagaaagggagaaaatatggagaatatgcctgtgatggtgaattttaaaatgtgctgccctagtggaatgccttataagttggctaagcagatggtatacacacacattctgtggtatttctacaattttttgcttactttgtgatcttggggtgctaacttgttgtgtgttcactggtcctttagttgctcacactataggatttggctacattgtctgttatgtcccttccactttaagattcctctaaattttttttcagtgtcaatcactaaatggagaaggttagggaagaatgtgacaattttttaagtcaaatgagaatttattaccttaaatttcaagtagatcctaatctagcttcctgtacagaaagaatttatttttgagacaaagcatgttagagttgtagggaagggggtactttgagaatcaggagaccagggtactctcaccaggtgtttgtgagatccatgatttttagtaaaatgcttataaggatgtatccttaatttaatgtggaacactacaagttcagttattcatttgattgtttcttttcatatgtactattattttttatcttaatattctccttgcgggtgttttaacactgacatatatacattaaattttctgccatttctccctactgatacttcctatcatgttctaaataactaagaaagcattcttgaagctttctacttctttgccctttgagtccttggaaacaccatcacctctcccagacatgcatagtaaataagtctgaaaaggcaaagccagcatggaagaaatagccattttactattgatgaaaagaaatgaagactgagcagcattagcagcagcagcagcagcagcattctcattataataatttcactgtcatttcttgagcactttctaggtgccagactatttccgccttgtggagattcaactagtagcatattaaagactcccaaaagccctgcagtctttaggacttagttatcagtttaatgatgttgtttccttagaaattctcatttgtattctaccccacccttcaatttggcaagtttctctttttgtgcttgcaagttaacagtgtgctatacattgattagtgggtcggtctctctctctctctctctctctgcccccccattactatttttttgtcagagattttgtatgtgtatatggtggtaatggtagaaaaaagaaaacatagcataaaacgtaccttcttaaccatttctaattgtacagttcagcagtgttaagtatatttacattactgtacaaccaatctccagaatctttttatcttgtaaaggttaaaactaaaactctgtacccattaaacatctccctgtttctcctttccccagtccctggtaatactagcctaccttctgttcctatgaatttgactaatctagacacctcatttaagtggaatcataacagtatttttttgtgttgtgtgactggcttatttcatctagcaggtttcatccatgttgtagcatgtggctgaatttccttatttttaagctgaataattattgttatgtatatagcacatttttctttatccattcatctgacaatagatgctgggttgctttcttctcttggctattatgaataagtgctgctatgccataggtatactaaatagtgtttttaaactaaaaattgaaataatttagtgattaggcttaatgaaatatgattataccaccacttttgcatttcata

SEQ ID NO: 104872 - DNA, 1014 bp, Homo sapiens
ttctagatagataaatagtaatattgccaatattatgtactcaccaccacgaaaagtttaatcctatccaacattgtttagtagaataggtggtggtatagatagagactgtgtaaaagatagccttcacatatgaaaaaaaaagctgtctgacagacttttgaggtatccactttgaatcaagaagattctcatgaatgtttcatttgcatttttatgatactttagtcagtgtcatttaaatgacatttttatagtgtaatacatttatgatttttatattactcaagtataagaaaaattgtcagtttttaatttcagtctctttttatcattggttaatatgcaggatttaggattttcagtatgttgttgttgttgtatataggtgcctggaatacttattaagaaacgatgcaaatccagggatccgtgataagcaaggatacaacgcagttcattattcagctgcttatggtcaccgtctatgtcttcagctggtaagattcctgaattcttgtgaaagacctaatgggagtttatagtctaataatgtaacaaaaatgagaataaatggatcaaggaacaaattccattttgttttttaacattttcagaatttatatacctcttaaattcacacttgctttagtaagatatatctcattctcttttccttttaaaaaaggagaaaattagatctctgaagagggctactgattaccccatgttcatgtctacactatttacttctcctgcccctttaaattaatattcctcataagtttctaaaaaactataactgtgtcttttgtgagaaataaaagtccctgtgaaaggaatatctcccccatatatttagggaattccaaaaggcacatttatttcacaacccctcctaacaagggagactccacttctgcagaggacgtttttatttctgctgtggtctgattctggaatagaataccaccattcacccaaatttaccaaaccagaaggaaagtcaaggaa

SEQ ID NO: 104873 - DNA, 1344 bp, Homo sapiens
aaagtgtatgagaaggaagggtgtatgtcagaagaaaatgtgtgaatatatgtcaatgcatgtgatagaaccagtgcagaagagaagtaaaaagaattatgcatggtaggaaatcagaaatgaatagaagaaaataaaaactatttgacaccataattactttgaagaacagattgctctcataagcctacttaatggaaagaactaatgacccacaaaaataaaaaaatcactttggctttggaatgcaatatttttatagctaatttgcttttataattatactttaatccagtttatattaatttttagtacttcaggcattctatactacaaataacagagagggcttctgaaaaatgctttgagttgagagggttgaaagtaattcagggttaattacattttttttaatgtttcttctatttttttctcttaccttttgttcttcttctgagacatgaatagaaattgctacctctgtactgtggaacatttttattaatgtaggggaaactttcctaaaatgaaagttttcacatttctgagcagaatatgaaggttatttgaaagtcactcaaaggactgggactgggattgctgctactgcctggaggcgatgaaataactgcattttcatcttatttcatatacttaaaggttctctgccaccttgctttcttcttctagctttatgtccagtcctccgcaagacttagtatatggtagtctaagtctcactgtaaataaagtatttgtaactgggaggagtaagagtcaactatgcttttgtttactagttatgtctctggcttttatctttcttgtattaacttggacccaaaagatctccactgcactacgctgctgccaactgcaattaccagtgcctgtttgctcttgtgggatcaggagcaagtgtgaatgaccttgatgaaagaggctgcacacccctgcactatgcagctacatcagacacagatggcaagtaagtaccataggagtgagagtggaggatcaatatttctataaactggcatcttccatatggatgtttttgttgcaaatttgtgtttcctctttgtattttttgttgattatctttgccctaagtctattttgggaaatagattggtttcatagttattgataaatcatagttattactacctattctcagcaccagccttactagctgatctggtggaagaaagataaaggtcccttcttgtcctatctgccaaaagagcatcttaatatcacttttatgtttttttccacctgacttcttagaggctacagccgtgactatatcatggggaaagggagagaggagatatatga

SEQ ID NO: 104874 - DNA, 1022 bp, Homo sapiens
gcaggagctgtaatcgactgtgaggataagaatggaaatacccctttgcacatagcagcacggtatggccatgagctgctgatcaacactcttattacaagtggtgctgacactgcaaagtaagtacttaccgaggtgttgataactgatacaggcaagcacaaagggaagtgaactgcagttttctagacatttcacgtggaaatgtggattttatcctcaatgttgtattaattgcttgaactttcttttgtattgacaaagtggtaggttaaaatgtttaaatacaattttatttggtaagccagtgtatttttatgtatgttaccccagttctttctcactttgagtaataacgcagttttgatcagagctgttaatttttgtgatctctttatttttaacctagaagtacttaaaagtcccagaaagctgtatgtgccagatgcttttttttaatccaaatactatctgtagataatacttttcaggctgtgctgtgccaagctcagggattccttggaatcctacgaaggagttcttacccccacccccattttggtcagaacagtttgcttgtatttattttataaattaaagttcccattgtaatattttgtttgaaagatgagtcctcctgctaatgctctgcaagaaacaccatacttaaatttatgtttatcattctttgtatcacatttacatgtgttcattaacaagttttaaatcttttttactttctgtaatggtatggtactgcacctatctgttttgtaactttttccaaaaaaattacatgagcttattaatttagccatctagatagaaatttaggccttctttcacatctgtacaagttgctctagttcatttattttatagaattattgtataaagatttcacaatatattcattctccttatttgcaaatacaagttgcttacagtttttcactattacagaattactacaataaatattcttgaacatgttgcattatggaaatgtttcaatggtgggg

SEQ ID NO: 104875 - DNA, 1047 bp, Homo sapiens
agttaaacttaattcatgtaaaatagttataaaaataaagatgcaagagggtattcaaagtaaaactaaggtttacacattatggatatagtagagtgagtaatttttttcttccccccccagagtaaagatgggaaaaccccactacacatgactgctctccacggtagattctcccgatcacaaaccattatccagagtggtaaaaagtatttctgttttttttttggggtttttttttttttttcttaaatgtagtaaaaacatccaccaaatgaatggtattgaggaattgtcatcgcattttgtgtatttttaatacatgatttcagagctcatgaaaataaaatattaaagagtataaaataccacgtagctgtatctttcatacttttgttttttatgttttgtttccctgaactgtgttatttcttcagcagttagtattagcttttttcaatattgctaaatagaaaattactttctaccataatttgtattatatattaatgtgtgtactctgtatatacattatacatgtatcattttcccctgttgagtatctgcaactattttcaggattttaatttcttgagtttgtattcttttgtgtttaaattaatatcaggcaagctaaacttttaaatcaaaagaacttttaggtgtattactttaaatcagtgttttccaaggcatattccaagaaatttatcctcaagataataggtgctatggttttgcaggggaaaagttgaaataggttcatgatccaatattttttgaagcattgcatgcagtcttgatgacagagtatgcacattaaagctctgaagtcttgctctaaagaaacgtgtttaattttgttttaatacagtagtttccaaacttattggaccccagaaccctcttgtcaatttaaaaatctactaaaatcttatgcttaattcacacaattgctttaagtataaaagctataaatccattgcctggcccaataaatgagctatgaatgaaatctagttaaaattgctgtatctattagtttgt

SEQ ID NO: 104876 - DNA, 1117 bp, Homo sapiens
gtcactgcaaaatgaaaaagatgaaaatgtgcatgttactgaatatacctcagaatcttcagtttgtgttcattttttatgattataattaattctatagtaaatcctttacctagaacgcctttaaaaatacattagtttacgtttccctgaaatacctcttttgtattattcagttttgtcatgaagtagacattgtgtatgtgaattatattccctgaatgtataaaatcaatgtaataccaaaatgcttgtcaagggtttattattttaaaccaactttagaattataagccttatctctgtacttatcttgtctccgtttctcactttagtaatttgattgcaaccacaggttgctaaaatagctcacaacattgataattagcaaaactactttaacattcgcatttttttcccttctaatagatgaatgaaccaaatgcctatggaaatacacctcttcatgtagcctgctataatggacaagatgttgtagtgaatgaacttatagactgtggtgctattgtgaatcaaaagaatgaaaaaggatttactcctttgcactttgctgctgcatcaacacatggagcattgtgtttagagcttctagttggcaatggggccgatgtcaatatgaaggtaaggaacaaaatcagaatctataagtatttcatatgtcactgttaaaacaacatcaatggtgaataccattgagcaataaaaaggaatattgataaactcaagaacatggataaatctttaaaatattatgctgagtgaaagccttactcaagagtatgtacattctttccatttatgtaaggttctagaaccaataaaattccatttatatggggttccagaatctataattgaaaaaaatcacaacaattattgccattgtgaggagggatcaactgggaaaggggcatgaagggacgttatgtgatgatggtaatgttttgtattttggcaggggtttatgttatatacatttgtcaaaactgataaggtggttcatttgtatgctttcatagcatataaattttctcttagaaggaaaatactaaacagatgtttaaccctagttaatgttgtgtttagaggtgacatg

SEQ ID NO: 104877 - DNA, 1003 bp, Homo sapiens
ataggaacaaaacctcttattaaatatttcagtcttagactttccagatttgtacttagttcataaaataccaaggcacaaagtggcatcctaaaaaggtactgatgcctgacttcagtagcacccacagttaacctttttttcatgttttgtcctgttatgttaaatgaccttcagtatttagtctagctccttctgttcagcaactgcagaaatttagtgccagagaagttgagataagtaactgtcagaaatgtacattcatagacaattgtgcttcacaattttgatgacactgtgtttacttctattccagatggtcaaactactcttgtctagaggtgccaatattaatgcttttgacaagaaagataggcgtgctatccattgggcagcatatatgggtatgtactttttaaatttagtttttgatattatatatttagaaaagttgtacatttcaagttcttgctgtttgtatagcatttgtctttaagggtactgaaaagctacacagtatctgagtttgatgcccaggtagaacaaccctggtaatgggggaggtttggagtacactgggtccagttcatctaaaagctgtttgaaattaattccatttacccttaaaaaaagagatgtcccagacacaggcctggaatacataatttaggattgatgtttactaaagcccattcttatacccatttttgtttgtatgagaatataaggtaaaagtaacaaagatgcattaagaagcctattattttgggccaaccagtgggttaaatgtgtattaccatgtttgatttctataatagtaaatttatagaaagaaactggggcttggaatacagacttttttgctgtaacataatatatatgttcttgaaaaatcttacagtctgcaaaattgtactctaaaactaatagagctcatgggaataataggcctggggtagaccacccaaaacctatgcaaccgtgtgaccacagcactaacaga

SEQ ID NO: 104878 - DNA, 1048 bp, Homo sapiens
agcgcactacagcccagaactcctgggctcaagcgatcctcccacctcagcctcccgagtagctgggactacaggcacgcgccactgtgcccggcccctgtctcctgataagatgttatcaatgacaatgtgtgcccaaaacttcattagcaatgttaatttcacctggtcctgtgatctcgccctgcctccatttgccttgtaatattttattaccttgtgaagcatgtgatctctgtgactcataccctattcgtacactccctccccttttgaaaatcactaataaaaacttgctggttttgcggcttgggcatgtgatgtctccccagacacccagctttaaaatttctctcttttgtactctttccctttatttctcagaccagccgacacttagggaaaatagaaaaggactcactttgaattattgggggcaggttccccgataatttaccaaaaattaggattatcactgaaagaaaaattttgttgagtttagttctgattatattgcttaatgttgatggcatactgaattccttggaatcctgccatgagtccaatttatagaggtagtgttgtgatgttttccatgcgcttctgggagataaatcccttggacagtagactcttaaattgccttaactttctctctaagcagcactgcaaaaagaaccttgtctatgttgtgtcttttttttttttttaatgaaattgatcctagtgatttttcattttgtcaaatatagcatgtataatacattgagaaatagtatgtttttaatttttatatatgcagtgtaaaaaatctattgcttaaaattgttcaaagagccaggtgtggctctatgactggctcatgtttgtaaccccaacacttcaggaggccaaggaaggaggatcacttgaggccaggagtgtgagaccagcctgggcaacatagcaagaccttgtctctacaaaataactaaaaaattagccaggggtggtggcatgcacctgtagtcctagctactcaggaagcaaaggtgggaggatcacttaa

SEQ ID NO: 104879 - DNA, 1032 bp, Homo sapiens
ccataatttttgtgagtattcatatatgtattctttccatattcctttttaaattgaaatataacttacaattaaaatgcatgaattttttagtgtacacccttaagttttgccaaatgtatacacctgtgtaacctttatcccagtcaagatatagaagatttctgttaccccagcaagttccctcatgtccgttttcagtcttccctgtccccagaggcaaccactgttctgatttctcttagcataatttccgtattctagaactttataaaaatggaatcatacaatatgtattcttgtgtcacgacttcttttgttcaacgtttttgagatttatccatgtttcatgcattattggttcattttcattgctgagtaatagtacagatatactgtttgtttatccatttttctgttgatggacatttgcatttctggtttttggtggttaggaataaaactgctatgagcattcttggatggattttttaaatcttttggataaatcactgttgtggaattgtggagtgataggcctccatatatctttgattagctggctgacttccttagcaattcgatagatgactgggcatttcttcagtcttttgccatccctgttaagtactggtgctatttcccatgtttcaaactgttctgactactttttatttcagaggcctaaaatggtatgggtgattcatggctaatagcattttgttcagtcttccttgatgctctgtatatttatagctattttcactttctaacacttttcatgtacattagtttattgtgctttatagcatacttgaaaagagtggtaggcagatgttatttcccccacccccatctcctttacagataagaacatttagggttagttttataggacttgaatagtatgccttgtaaataatagaattgacatgagaacccagatctctttcggttttggtcgttttcattttcatatgtagtttggcattcatttactgttgcgggaagtcagggaccccaagtggaggg

SEQ ID NO: 104880 - DNA, 1040 bp, Homo sapiens
tttttgtgccagccaccttctgttttttgagacagagtctcactatcttgcccaggctggagtgtgtggtgcaatctcggctcactgcaacctcttcctcccgggttcaagtgattcctgcctcagcctctgagtaattagacttacaggtgcacgcgggccaccacatctggctaatttttgtatttttagtagaggcagggtttcaccatgttggccaggctggtcttgaactcctgtcttcaagcaatctgcccacctcagcctcccaaaagtgctaggattacagtcatgagcccctgtgcccttctattctcctgctaattaatactttgaatcagacttctcagcatccctcatgagacctcatttcttatttacctttgttgattcaggatactgtctgtactaggtgtctgtgttgataccctttgggccttactgccagagctttccgttctactgtgtatagatatgcatgtgcacataaatataaacctgtagaaagaggcacagggcttaaagagaaccattgaagtcctaagcagataagtgggaaaacgaaagacgctagcttctgtgtcactccttcactatctgtagggttccagcttccagctggcaaacatttcaaatgtgtgtactttgtacattccgtcttctacccaaaacaaacgttggcattactgtgattaggcagtttgtgttttaaccatctagggttccacagtgcctggcagatagttgcccaaatatttattacatgggtatgtcatgctctctgactggttctttatttgctgtcttcctttccttcttccatagcctaactgtgagcattgttcaaagctctctaattagctcttgattctttgtgtcctcactgccactgcccacagagaactcagctactctcagcatctcaactactacatttgtggatgtttcttacacctccatttcatttattttctctcatttttcaaggctttaaagtctacctctaacatatttgctattatgtactaggcacatttatt

SEQ ID NO: 104881 - DNA, 2182 bp, Homo sapiens
tgacatgatttggttttatgaaacttctggctaatgtcaaaagtgattattgctacagggaagaaaacttgtagattccagaactatgtaaaatatccttagtcaccccacatggatgattctaatgtttttattactctcttctattttagccatcactggtgcaagctatatttaacggagatcctgatgaagttcgagcactaatatttaagaaagaagatgttaactttcaggtaaaacagttaattcactgatgccagcctttaaaactgctttttaaaattctttcctagaattgtgatttttgtttacaagacataatataactctgtaacagttgttttaaatgagggcaggaaggtattgaggcaaaagggaaaacactggacatatactcagggcagtagcagccagtaggggtcttttgttctcccagctttttactttgaaatttttcaaacatagggaagttaaaaaaacatgctgactacccatatacctttcacttacttttggcattgataacattttgccacatttgctttctgtatttattaatatacaacttttacatatatatgtagtaagttgcagaaatcatgatacttcaccattaaatacttaactgtgcatttcaaatgaggattcttgtaagtgtatatctaaatataagatcagatttgctttttgtaaataatcatggtgagtgttttacaatggtgcttgattaatttttgtcagattaggttttcagtaaagtcattgttggaaaagttttcagacttaacgatacagtagtatattcagtgctgacatgatggacagttttagaaaggtggatatatggataattttctctctctgttatgttttttcagtggccagtatttagtttactaagttgtggctgaaagtacattacgtactctaacaaaattacatccactaatgtatatatttttaccagaaacaaatgtacccctgagttatggagggggtgaaaagtcatatgattcacaaagtcgctgtggcaacaccaaaacagatgacctagaaatgattgtggttttaagaaagcacccattgcaagctcatttttaactctcatctttcctccttttttttttaatataatactgctgtgaccacttaatgttaggtagatacaaaaaagttttaccttatttttaaaataatgaattatctgaatagatttgaatcattggctaaaactgttgttaattttaacattgggtaatgaacagaatgctatcattatatattttttaaaattttttctaagtgaattgccttcaagtttatatttagttggaaacatgcacctaattcaggatttatgtatgtatgtatgtatgtatttatttagagacagagtctggctctgttgcccaggctggagtgtagtggcatgatctccgctcactgcaacctctgcctcccgggttcaagcgattctcctgcctcaacctcccaagtagctgggattacaggcacctgccaccacgcccgattaatttttgtgtttttagtagagacagggtttcattcaccatgttggccaggctggtctcaaactcctgatctcaggtgatcggcccgccttggcctcccaaagtgctgggattacaggcgtgaggcactgtgccgggccatgatttatttgttttaaatgaagtgtctggctactttacccagggtatactgaagagtatgcgtttcttagaaaatagctcaaggggtatagacgcatgaaaaggtggaaaacatgttttccatttaactcctaaggttttcttgttattttggttttattttaatagtactgacaaatactaccttgattagaaagtttgaactataattccatttaccagggctaatttctccatcattacaaagtttattgtagctgacattacttttatgttatatttaatcaatttatcctaaattaaaaaaaaattcagagtcattgagagcatcagctcactcatcagtaggcctttcttgagagtaactctttgacaattgtcttcagtgatacaaaggtttttgacaacaacttttatgattgcttttaggccttttctctcgtgaccctttcttagtagttgagagtgttgccttaaagtcaagatttgttaactttttggccatt

SEQ ID NO: 104882 - DNA, 1926 bp, Homo sapiens
ctaacaccatttctgcctggtgcctgtgcccttttgctggagcagccacagacaactgcctgatggagaaagaatgaacgctctgccttgcttatgctatcgatgggaataaagctaactgtgtttcttctattatatgggaaacctggattaatcaagctgtattctagtaccaagagtcgtattgtctcttgtggtctgactcatcacatgtaaacgtactgcagctttgctattaatgcagagtggtttttttttttttgtttttgttttttgcccctttcccaaacactgaaagaattgttaacctctgagcttcattttcaggatttgtgctgagctctagatcttttttctgtgaatagtatctgcattaaaccagtgatgaagaaatgaagacaaattagaagtggaaacagaatagtgagattttattttttattttcaattataagcaaaacagctactggtaactatatgaccttgcaggcaagagtgggtatcgctgtgatcatctctgtcacagcagttgtttctcatttcattctatattgtgtggtgttgtgtcaccaaaaacaatgattgttttgtgcaagtaaatttcagagatagagcaataagactattttggtagaggaaaaatatttttaaatgagcttggactcagttttagttattgacatgttggtgtgaaatttcttcttaagtattgcagtaatccaacagaaataatagaatttcgttatatttaggaagttacaaattatgtagtcataattttaaacttgtttttccagtagtacttattaactttaaaaaaaaaaaaaacccagctgtgctgttcagagaatgtttgtaagtgttgtacagaagaggaggaaaaactacttgtgctcttccaactgtgacttttatcacatagcttggaatttagtgttttaaaagatcgaatgagtcgagtgtgtattgttgttttggaggaggtagaagatgaatctcctgcattcatttctaaattgccacaggaaaataaatccctacattctccaccttctggaaatgtattggtaagatatgtaagtttatatgtttactatattctactgaactagtagtataaatcttgttttttaagaatagatgtaaatttccaatagtttctttacaaacccaaattaaagcaatacgtgtgtagatatgatgcagtatttttgtataaaatgcacatttttcgtttttacttttttgaatgctgagataacatttcagtctttactatgtcttaatctctttaaaagactgtttaaaaataatttgagaattagtagttatggcaaccacgtttctgttttcattttgtggtttcagaaactgatgtaacaagaatcaggaactctgcatattttaggaaaggttgactacccccagcaacactaaggcatggccttttctgtaatgaattttatgtatttacatataagactttatatgagattcagtcttcatctttaaccttggttttagtgctactgtcagctggctccttgactagtatagtataccttatcaagaggctgtatcgttgattaagaaattattatatttagttatgcatgtgtttgtcttttcaagttatttaagtatccagtattttttggtctttgattagtggctattttcatcaactgccaggtttgctttcttgggatttgtatctttatacatgtaatgctaatccatgtaagataatttgatgccccaaacagaccttttcaaaaaagccttccttcatgggctggaaattgcttaaaaagttctgtcccacaagtagatgttgagatcacacatttgtatttggaagagtctttctttttgtcatatacagaaacaaaaggcttctacttacaagaaataaaatctgatttt

SEQ ID NO: 104883 - DNA, 1013 bp, Homo sapiens
tattacaggttgcaaagatctggagatgagtggagagaagagagtgtgtctgtatgtgtgtgtactcagtgatagcagaatagattagaaagagtatgtgtttaaaataacacacaactttattaatttatacaactttgggtaaaatacatcatttctgagtctgtttttccctctataatgggaatacagcaaggttattgtattaaatgagaatgtacagcacatagcatatcacagatgttcaaaagtaactattatgtttattattgtttattaataaaaatgctagttaatatgaagaacacagattgaagggggaccatggtattttctttgtaagttttctcttgagaaatatcccccatgttgggtaaacagagaaagaagaaaaaaaacgatgaaatgattggctttgacatttatttatggctttgggaaatttatagggagggagattatttgtattaccctgtgcccttttgacataggtaattcaggacgaaggacattttttttttcatgtacctctttaacagatttttaaggctttattccctatccaaatgggaaggtaggattattttatttcttcagtgaaaaatcaaatgatttatataattttagagttaggatttctacattatgaaatttttgcttttccctttaaaatatgaatcaatgattgattaaattcaccaatttagaaattgttagacaatcttaaatttcatttgtttaagctttgcattctagaaaataaaatacacctggcagattaaaactgatcttggtaaaaatatgaataaaacaatttcatggtttttataatctaataaaatatttctccatctttaaaccttttttatgagtccattgcaggcatattcttactgcaactgtcattatagggttaaacatttgctttattgtaacacacgaaagcagttaagccgtttggaattgtttacttgctaaaaccactgttagtcagcagaggcagtacaccagat

SEQ ID NO: 104884 - DNA, 1260 bp, Homo sapiens
gttcttatctatcctggacaccgtgagccattgcttttaactgctcaacagtcacttatactcacttttaacaattatatattataaatgatagttttgaatcttcaaccattttctgaaaaatgtgatagagtttttacatggaatgttctaactagcagaccattgatttctttgacaaagcacccttcctataaattaaaggaggagcaaaataatgaggtttatggagagttttattaaaatatccatttttttagagaatggacagttagaaggtatctgtatatgtcagttacaattaataacttcatatgctacactctttcctatgatggacttggtagcaggtatagtctatatctcggccttcagtatatactgtcttttactgtcttttatcttgtactggttagatttttacgtgtatgacataatgccctatttaagttgcataaggagtttgaaggtgatatatgataccttataattccttggcatggtatgtatagtagagatatgaatgtctaataattgtttaatcagtgctgtggtatttttgttgagtgttttaaaaagtaaggtattcttgccaaaagacttttagataatttcagtgtactggattgagtagaattgagccagatctcaccattctttatgaatttttttaatattcacctagatgtaggcaactttgggatttaacatttcatttagaagtcatgagggtagatgctaagataatgggctctgtattaagtttaaaacagagtttgagagcatgaaatgcaccttagatattgatgtaacaagtaacattcttcattgtataaatttggaaactaaaaaagtcccaaatttcttaaactccaataagcactggttgcttaagtcaaaaacctgggaggtttctgattatcatcttctccatcactcttgtagccagtctattaacatgtcctataaatcctatttctaaaatatatttctttttttttttttttttaaatggagtctcgctctgtcgccaggctggagtgccgtggtgtgatctcagctcattacagcctccacctcccaggttcaagcgattctcctgcctcagcctcttgagtagctgggattacaggcacgcgccaccacacccagctaatttttgtatttttaatagagacggggtttcaccatgttggtcaggctggtctcaaactcctgacctcatgatccgcccacgttggtctcccaaagtgctgggat

SEQ ID NO: 104885 - DNA, 1034 bp, Homo sapiens
taccttctaactgtccattctctaaaaaaatggatattttaataaaactctccataaacctcattattttgctcctcctttaatttataggaagggtgctttgtcaaagaaatcaatggtctgctagttagaacattccatgtaaaaactctatcacatttttcagaaaatggttgaagattcaaaactatcatttataatatataattgttaaaagtgagtataagtgactgttgagcagttaaaagcaatggctcacggtgtccaggatagataagaacaaacatacagaagcaaaggtaattacagcaaatgagacaagttgtaggatgtggtcattgaggtggttacagccaagtggaggtggttacagccaagtacagatgactgctggtgtggaggttgttaaatagttaagtatgttcaaaatgtcatctacaaagaaatgaaatcacctagatgacagacaaacatgatccagatgtggaactggggtatgagatgtgacagatgatagcaacaagaaatagaaggatcacctagccaaatggtatgtgcctcaaaggaaggaaggtttttatagacaggcagactagtaacattttaacactataatgggggactagaagaatgctgactttgcgctctttcctcctcccaacacacatgtacttacgtagcaggtacttacgaaaacagagtttcactgacttttccaagtaagtgtagattcaacagttacacatatgaacttaaggtttaaatcaatatttagatgactatttttagatttcagccttaagagaattacttccttccaaaagaatataagtaaaaaattcaacaggccaaactaacacaggttagttttctagaatacacctaatatgccaaaactaaggaacaaagggagaaaaactactctgttagcaagtatgtagtactgcatttaagtaatgtctttaaaagttaggttattttcttcataattttgattaccttgagaagcagtttgaaattaaggaaaaggactc

SEQ ID NO: 104886 - DNA, 1033 bp, Homo sapiens
tccacccaccttgacctcccaaagtgctgggattacaggcgtgagccactgtgcctggcttagaaacattttaaatgtattaactttttaggtggtactatcatttacatggcatctatagaaaaccacaatttcttaatttataaggttaaaataaaggttttaaaaaaattgtccctggccaggcgcagtggctcacacctgtaatcccagtactttgggaggccaaggtgggcggatcacgaggtcaagagatcaagaccatcctggccaacatggtgaaaccccgtctctaccaaaaatacaaaaattagctgggcatggtggcgtgcacctgcagtcccagctcctctggaggctgaggcaggagaatcgcttgaacccaggagacagaggttgcagtgacctgagattgtgccactgcactccagcctgggcaacagagcaagactctatctcaaaataaagaaaaattgtccctggtaattattttgtcttttctcctatccagtagctgttcagactcctttcactgaagcccttttatttcacaaatactattttcaaattctgcttttttagctaccaaatgactttttgttagctaccctacttaaatgagttgagtacttaagtctatagagtctatttgtgattgtaacagattatggagatcttaattcagggaaataatttcttctaataaagcattctcttattcttttaaagatcaaaataaaacagactctagaataacagtgtcccttaacaacttactctgaggccttgtttctccagtctggtgtgctgttatttccttttctgttctttgtagggttatttagataaaaaataaagtcataaaaacaagcatcttaaactaccctgttctgtagtctgctcttcatttgctattttatagcttttgagttatgaatttataggggattgtaggtcagcaagtttaaagtcactcacagtaggcttggtttgcctttgagtctcaggcttacaggagttatgggttaaatga

SEQ ID NO: 104887 - DNA, 1039 bp, Homo sapiens
ccatgggtaaataattgctgattagtaagtaactgaatatattattagtgaatgcatttgaaaagtttgtgtgtgtatatgtgtgtgtgtgtgtttgtgtttaagatttatgagaatgacttgttgctaggaattctaagaaacaaacaccactttttaagtctcttctgggaagccaattctgtttaatatataaagaaagcctttaaaaaatgttttgttgcccagattagtattttttttcttgatagaaggataaaagtaaattctgaattaataaaatccaaagtaagtttttgaatattatccaataattcaatgttttgttaaggtactagttatttataaataacatagcccttaatttctaggatcagcgtattctttcttttgatatctgttttctgctacaggcctgtgattggaattgaaacagtacaactgcctccaccagaggaaaatagtatgggaattcctattatggtaggttattttctagtagtctcttgcagtaatataggcagctcttgtaatttgttagtttgttgctgtttaagcctccttgtaacttagctttcatacataactgtatgtgagtaaatagttagtgtcagccaaaaagtcctttattgtagaaacatttatagtagtggaccctgtgttagtggaagacttagtatagccgttttataattcaagtaaattttcagtggagggggcttataaatctaagatctctgtcttggagaagaaaatgttaaacagctgaaaataatggtatcgcaactagttttatttattttgttctgaaatactaaattactaaaggttttcaaactttggtttagatgtatgcatccttttgctcatagctcattctcttacatgttaaatgattgtgctgcacactttaaacattaacagtcattcagtaatcactggggaacctcaattatttgagtgactcctatgttttcatgaaagtagtttttaaaaaatctcacaacctccaggtgtgttggactgcaggcactagtga

SEQ ID NO: 104888 - DNA, 1328 bp, Homo sapiens
actttgctaaacttattaattctaggcattttttaatagattccatggaatcttctataaagacaatcatgttgtctgtgaatgcaagcacttttatttcttcccttccaaactatatatcccttattccttctacccttatggcagtgctctttctttcaatatgatattaagtaagagtgattaagagcaggcattcttgcttgtatctcatcttaggaagaaattagtggtttcctggtaattttatatttatttaaatatataaatctcagtatagcgatcacttagcaaaggaatcttagttaattttatttactaggttgccctccagttttcctcataggattcatcaactggtatatcttgtgattcctaaggaactgtatgtctgtctgtctccctctgtcacagatacacacaacaaacttttaggagagcacttattgcactgctttgtagtttactttttatttctcttttcccttattagaaggtgagtacttagagcaataagaaatggtgcctaccggtagctctaggaacttaatgttgtgagcaattgatattaggttggaccatatgaaattgccgatgttagtttataacctataaaattttctatctagttgggacaaaaacaaaataacaaggaaaaaaaaaccatggtacttctactgacaagataaaatcatcagtatgtgaaatgtttgtgcgtgagaaattgttcatcactgttacatgttaaggaaaatcgtagagtggacatactgatgaaatgagtgagacacagcccctaccttaaacgatgctcactctgtggaagactgggcctttacagtattcagatgtgtgcttttgtttgggtttcttttggttttggttttgttttcttacagagacagggttttgctgtgttgtccaggctggtctccaactcctgagctgaagtgatcctctcactttggcctcccaaagtgctgggattacaggcatgagccactgtggctacctccctcctcttttttaatagagatgggttttcagatgtgttttaactctatgattaatctatgcacaacctatgcacatatttactctcagtttggatttactcattatcctagcttcctatctctcagtgtcttggattataagacactttggcaataacttctatatataaattgagacgattgacatactttgataattttatatgaaaagatgctcttatacatttttcagtttcatgtaacttaaatgtttgttagttagcatctagtgggttaaatagtgtagtaaaataaagggcaccaaacactttt

SEQ ID NO: 104889 - DNA, 2000 bp, Homo sapiens
ctcaagtgatcctcctaccttggcttcccaaagcactgggattacaggtgtgagccactacattcagctattgttagcttcttaaacatggattaaatagcccctgtcttgcacaaggtagctatttgggtataatgaaagtttaggaaagaaaaatcccctggttttaaccaagatcacattattgtcagagtttcttcattcttaagacttccaaatactgtttctttagtggtgattcccaaatttgtggttctggttttgagttttcacctaagtttgaatctctctaacatctgcctatttgataattccagttagctacatttgtgttgccccaaattcagcatgactgtttgtaaatttatttgactctgattttattgtgcatcaagtgctataccagactccaaaggacacaagagtgtgtttggagaactgtcaagaagtaaatatggttgcaacacagaggacttgaagtgagaagaaatgaccctgttggagataagggccaaatcatgaagatcctgtgtgctgagttctaagttggaactttattctgaaagcaatcatgagccactggaagaggcaaagcagggaatcggtgcaggattttgttttgaatcaattctggaagatagtatagaatataggtttgtgttgaaggtgaagctggaggcaggtggaactggtagtaagtgttatccatttgaaaagtggtttttacctaagatactggcaaaagggatggattccagagatacttaggatgtaaaattgataggacttgataactggatagtaggggctgaaggagaaggatgactcttcagtaactcctggggatttgactagagggcctaagatttagagcatgctggaagagctggtttgaaggtgaggtgaattcagttttggatatattgaggtccttgtaggacatctaaatggagaagtgttgttacagtagacagttaaatgtgaggctgggcttttaggtgataattaaagtgaatgaggtcactcaaggaatgagaaaaagctcatggcccagcagagtatcatggaaaatatggaatgaatggaggaaagaaaatctaagaagctgctagagttaggaagaaagccataagagattgctatcacaagcaatcccagttgcaccctatattctcttagacatgaagtcttaattttttcatcactttttagtttttctttatttagtacattcttttaaatttttcatggaaaagtttcttgtttgctccaagttctttactttctaagccactgtttcctaactttggagcatacatcagagtcacttggcaagcttaaatacatattctttgggatcctattagacctgctgaatgatgatcttctgggggtaatgccccagaatctgtgtcttaaaacctcttgtggtaaagactagcttgctgtttaccaaacttgttttcttttctcccaggccccagataacttatatttactagaccttttgtgtttggggatggccatatgattgaaatctggccataggaaataaagcagaagtgttgagtgttactttagtcctggcaaatagaaacctcccttgaaagattgtctttcttttccacctgctggctgggtggtggttgccagagcaactttggaaatgaggggtcaaagagaactgaacttctttcagcctgggttgtctccagcctcctcaggcacacccagctgatcattaacatagattttttgactttatgtgagcatgaaataaaaataacctattctgttatgtgataatttgggatttatccattacagcatccactattactttaatcagtggagctctttcgattgttataaaatggtcagaatttaggaactgttgcccttggtttatactgtttgtattttttaactcgtttatatggtaggtaagctttcagctgttgacttccagaccctgtatatattgtgtttgtgaaagcagc

SEQ ID NO: 104890 - DNA, 2050 bp, Homo sapiens
ctcccagccctggcagccactaatctactttctgtctctgaatttgcctattctggatatctcagataaatggaatcatacaatatatggccttttgtgtctcattcacttagcatatttttaaggttcttccatgttgtgcacgaatctgttggtcataaatttttgtatcatgtttaggaattcctaaaagaagttcctgtactcaggtcatctcactgccttccgtggtatgcatatgtgtaatctgggatagtatttatttctgtttttggaatttgttttatgaactttgtttgcagcagtactaaagggtaatagcttttacatttggatcatttttgtgtaggagccatctttgtgtgctcccttatgggttaatggtgaggactgatatgtttaaggtgttgggtttttttttgttttgttttgtttttttaaacagggttggcatatatcagtgagaaaggtgttggatggatgtgagtaacttaaccactattttggatagttaataagttcttatttgatcaagtacacactaagagtggaacattgtttgaggggaaaaaacacacacaaaaaatgacggttcttgggaaatcttacaataggggatacagaatgcatgaaatacttgaagaagaacactgatgcccagatattcaggtactctatgtaggaggtgtcttcctgttttgtttttgtttttgtttttgttttttgagacggagtcttgctctgtcaccaggctggagtgcagcggcacgatcttggcgcattgcaacctctgcctccctagttcaagcaattctcctgcctcagcctccctagtagctgggactacaggcgcccaccaccacacccagctaatttttgtaattttagtagagacggggtttcaccatgttggccaggatagtctcaatctcgtgaccttgtgatccacccaccttggcctcccaaagtgctgggattacaggcgtgagccaccatgcctggcgtgtcttcctgttttgtgctggagatgacaggggacacaagggtgaagtagctaccatctctacccttacagatcttagaagaggggaaaaaaaaaacacatagatgtagggtaagtgagatacatcacatgaagagacttatagaggctgaaggaaaacatgtggagcatattaattgaaaatgtaacatacagttcaaaaacaagttctgtgtttcctcactttttggataccttttgcaatacaaaatagaacctggtgagctctgtaagaggtgcagataacatgtttcagaatttaaaggatcagataatctgattgtaagtggagggaaaccctcatggcaggggaggtattttaggttcaccagaagtatatgtggatgttgaaagcaagcagttgtcaatgaaagcaacaagagggaactgtgaaggcaagccaggaaggatggatgggataatcaggagatagtcttgattggagtgtgtagttggaaaagagaagataaattagttaacagtgactacattaagtactttgaatcccaggctgagaagtttggacttcattggtaagtgatgggacgtttgagctgggcctccttaaaatagggcctgcgaaggttttggcaagaatgtgcaggtatggatcctcagaggggtccatgatcactgaaagttagataaccattacaggttttggaagagtagattacaaaaggcagacaaacagggacacccaggaccagttaggtagctactgctgtaaatcagaacatacgtaaaatattttagtacagatcgagaacattaagtactaggcaaaagtttgaatgagagtgagtatatcttaaaatatttctcatagctatattaatgacctgtttgtatctacaattgagagtgtcttggatttgtatgataattggtaattttttggatacatagttccagtagggtaaattcaacattatgaaaatacaattaaacattgattttagggccgggcgcggtggctcatgcctgtaatcccagcactttgggaga

SEQ ID NO: 104891 - DNA, 1081 bp, Homo sapiens
taacatcaggtcatgatactttgaaaaactacggtttagtcaatacagtttataccttgtatttcaaattatacaactgttctgtcctataagagagccactagccacatgtagcaatttaattgaaattaaaccaagttccatagttttgctagccacattttaagtgctcagtagacatatgtagctattggctattgtattggataggacagacatagaacatttatctcatttcagatagttctactggacagcagtgttagagaatagcaggtaaagcacagttatagcaggaaccatttctgctaattccagtacagtccgtgcatcttatactcttaacagtgtgaaactcgagatctgggttttccagtaacctttaccagtcaaatggcactttgtgcttccattgttaatggttgaagtaatgactgatcgatgttttcctttgtttctagtcctgcatttttgacaaagttgtttttgtgatttagattactatgtgcattagaaatttggtgaacttttaggagagactcatatttgattcaccattaggttttaacagaaacaggattgtgtttttcaggattgtgttaagcaaaagtgcaactggattttattttggaattgcagttgtgagaaaattgtgatgccactccagtcttatgtatatccattaatcttcagtggtaatattgaactttaaaatgccacttgcggccaggcgcggtggctcacgcctgtaatcccaacactttgagaggccgaggcaggcggatcacttgaggttaggagttcaagaccagcctggccaacatggtgaaaccccgtttctcttaaaaatacaaaaattagtctggtgtggtggcacgcacctgtaatcccagctactctggaggctgcgacaggagaatcgattgaacccgggagacagaggttgcagtgagcggaggttgcaccactgcactccagcctgggcgacagagcgagactccatcccaaaaataaataaataaatgtcacttgtaaacctaatggctcagggagaacgaacattgaggttttcctctaaact

SEQ ID NO: 104892 - DNA, 1030 bp, Homo sapiens
tggtttataaaaggtgcagatggttaaaacacaaacgtgtgacgtcagggtcggtttttaaaagtctcttctacccactacatcagttgtgtctcttgggatggactttagagaatcgattcgagcctaatggcagtctagagaaatggagatcttcgtcaggactatcagattattgtaatgctgcacttataacaaaaaacttagatttagccacgcaaaaaaaaaaaaaaaaaagaaaatagagtgcaagataaaaaaacacacctgattaactgatagtacgacccttccaatattctttgagatatccatgctatggttccattgaaacaatttcttacctaaaattatgtccctcgtcatgatattttctacttaaaatggaggaattctcataactgtgatctaaccgtcataatgaggctaaaaaggaaatcaaactgctcttgctttgcattctcttcagtagctcctttaccctttatttcaactccagcagataaaatagagatactatttgtcacccaacccctccttatcagttcagtgagggtgaatgagttaatgtcgtgaaagcacttgagttctccaaaacaaagatgttgtgataatattactacagtactttgtgattacaagttagctttgtaaataattaccaatgtgccatatccagtcgtgttctatcttggcctaggagtgttaggatttaccctcatttataagtaagcctgttaagcactatggatgttgagccaggaattaatatagccctcctcttcccaccaaataatctctcctctaggttaaatttctagaatttaaaaacacaatgagaacctgattaggaacatggcaaagatgattttttgggagaatgtaagtgtgtttgagagtatgaatttatggactaaatatgcattttaatagattttgtgattgaagctaatgaaactttccaggactcttttgaaattttctaattaacagtaattaatgaaaatgttttatgatgtaccatctgcat

SEQ ID NO: 104893 - DNA, 1003 bp, Homo sapiens
tcttctctttggagggttaagatgggaagctgttacacaggaggctgagtcaggaggattgcttgagcccaggagtttgaggttgcagtgaactatgattgcaccactgcactccagagtgaaaccctgtatctgtctcaaaaaaaaaaaaaaaaaaaaaaaggaagctgggactgagcttgaggctgcctggccagaagcagaggtagagggtaacccttgtatgtcagggtacaatcaggagacacatcacaccatgttttttttgttgttgttgtttgttttgttttgtatttttaacaggatttaatagaattaattgttaattaggtaaccgaaaaggcaaacttgatagaactctagaactcgaaggtatcatggaagtagcaactgcaagaagtagccaccactccgtgggctaggggagcaaaaggaggaggtgggaaatattcaaacgtagagggtcctgagacccaaacctcttgaggagcaggtgctactcttctggtgccagtgtcaaggagcaccatgaggctggttctacaagtgctgaaattgcaagctagactcaacagctgctacaggagctgctgcagctggggtcaatgttgctggggtaaagctcatagaaatgggaagaaatggagacagacaagaaggaggaagtccctgcttcccccctccagccccgcggtctccctctaacgccccctatcggcatagcctaccaaggagtcacagagaaagcaggaatttggtttgcagagtcccagccccagtgggacaaagctgagcacagaaggataggtttggagcccgccctacactgaagtggaggggattggacagaggcacgaatacaaggatttggggcagattgggagccattttagaggctgcctgctacagttgcctttctcactatgaccctggcgatagttgcattgatttttttaagagtagtagatagccattctgcacgaatgacaaactatgaagactc

SEQ ID NO: 104894 - DNA, 1055 bp, Homo sapiens
acatggtcgaaggggtaagcaatctctctggtgtctcttatattaatatgagggtcctaatcccattcatggcccttacgatccaataactgcccaaaggccccaccttctaataccatcaccttaggggtgaggatttcaacatagggatttagggatttgtgagggaggcaagcattcagaccatagcaggcacatacatacaatggaatattggtcagcctttaaaaggaatccagtttggacacatgctacaacatgagtgacccttgaagatattatgttaagtaaaataagccaggcacaaaaggacaaatattgcatgattctacttatatgaggcacctagaggagtcaaattcatagagacagagagtggaatagtggttgttgctaggggctggggagagaaggaaatagggaattattgtttaatgggcacagagtttcattttgaagagatggaaaagttctggagatgaatagtgatgatggttgcacaacagtgtgaatgtgtttaatgccactgaactatatgctcaaaattgggtaaaatggtaaattttatgcatatttttatcaccataaaatttttattttgaattttataaaaataaaatgttcattttattttatttattttgagatggagtctctctctgtcacccaggctggagtgcagtggtgcaatcttggctcactgcaacctctgcctcctgggttcatgccattctcctgtctcagcctcctgagtagctgggactacagatgcctgccaccatgcccggctaatttttgtatttttagtagagacagggttttgccacattggccaggctagtctcgaactcctgacttcaaatgatccacccgtctcggcctcccaaagtgctgggattacaggcgtgagccactgagcctggccattcattttattttcttgttgtttttttaaaaattatatttataactatggaagagttcagttgagctgcaattaactatttctttgctattcaaagtcaagggactagaagcattggcattacctggga

SEQ ID NO: 104895 - DNA, 1050 bp, Homo sapiens
attttacaaagaccattggactatcacttgaaacactttgctcctttgctgtcctgagagcaagcacattggtgcttgcgggaagtgtcttggggagttaagcaccagctcacagagatggtgaggtgtatttcagaacccaagcttctgccagggagcatatagattttgttatttcaatattagcagcttactctccatgggttttattgcataaatttcaggagggagtgttttcttgactgacaccttagaagcactctttgtagcaaagtcacaaacatttccagatcttgctgggcatagagatggctgcaccactggaaacaatctattggtgtcacttgacacagtgtgagaggtcaggtaggggtgaacagcattgtctgcacaccaagtgggaacattatctgctctgtggggaggcccatcatgcttggcctgctcaggaggaagactgacacatgtgggtcattccgtggtgccttttctccttcacagtgaaaagaaggcctgacacttccagaggaaaatgacactgaaagcactcaggcagaggaggggaaaacatgaccatgctttctggaaaaccctttcttcatgcactcatgccaatcattgttttatccaacttagctaatccatttctaattttttgttccttaataaaagaaaaacaattcaactgtcacttactgaattctttttaaaaaaacttttattttaggttgagggttacacgtgcaggtttgttatataggtaaactgcatgtcacgggggtttggtgtacagattatttcatcacccaggtaataagcataatacccaatagtatgtgttatttatcgaattctcactgtgtgctaggaccagtagtgtgctgaagatggcttggacaggctcacgagaagcttaattgttcaatttgcaggaattttgcaagacagctgttaaacacagccattattaaaattcaattatattaccttacacttaaaaacaaaggcaataaattcaacttatcatattctaattattttactcttatt

SEQ ID NO: 104896 - DNA, 1017 bp, Homo sapiens
gctatgtctctttttagcttcgtaatctttggcaaggccattggattcttcagctgtacaattaggagactcgatcaggtgattgcctttctcagctgtcagttctctaatttcaggcttggtagcttgtaggaactgaaattgcaattaaaacctttataaactcaaactaaatcatgaattacagaaaaagtccattcttccaaaacttgatgttaccacacttacaagtttaaaatatgaagtcgactgtttaaaggattctgcatatattctagtgtgcacattcagaaacatttttcttggaaaaagtacccaacattttttataactgcacatattaatttattgccagaataaattgcattgcatgctaaataaagtcagataattcaaatccatttgcttttatgtagtttttcttctaaatgtcaacattttgaattaaaatgtttatgattttatatgaggtagaaatcttaactgctttggggtattgttaatagactttttgttatggacagtagtttttaaataaggaaattgccaatttctacagtttgggctctggatttctattgtttgggaaaaaaataactgagtcaagtggtagtaagacaaagttgacattcttagatgagtaactcagtttattacaaggaaagaaaactgattgtttaaggctgatgatcaattcttggagtggtttcagagcccagctctggtcagaagacaatttgaatcttagttcctccactgtgatctccgagaagttacttaataattatattctggtttgtgaaatctggatcatagtacctctttgacagggttgctgtgtgaacccattcattctgcaattagaaaaatagctgtcatgtgctatgcactaggcaaagaagtacctgtcacatgctaggcactaggggaagaagattcggtttctacatttggaaacttagtggaactagaagagacagaagcaagattacagatgagttagagcccccaaggaaa

SEQ ID NO: 104897 - DNA, 1904 bp, Homo sapiens
agaatagcaaggcggtagtctcaagacataagattctaaactgatgggttttagacaggaaaggagaatggaggcaaaaaggaggaactagccccacttccaatccctctggtactaggactctgagaacacagagcctccactagatgggcttgtaggggaaactgtccttaagaatatgacttcatctcaacctcagccctgttgacattttaggcctgataattctttgttgttcagagataccccgtgcattataggatgtctagcaggatccctggcctctacctactagatgccaatagcaatcctcagttgtttcaattcaaactgtttccagatattaccagtgctcttggggataaaaggacattttgagaaagaggttgagaatatgaagcattgtgctaacaatggaccatgaattccaaagggcacagtgaaagggttccacatattgggcaacagagtagcagggacagagtaggggctgatccttcgggaatcagattgctggaggtgagggataaccttggaagcagagatttttggtggtagctgacataagccaggataaaagaccagagattgaacttcatttacaaagtagctaacatagcagattatccatgttgggaaccacataaagacctgtcccttttagttagaagaagtaattactttgaagaggactggtatttgaatgaccaaatattaaagtggagaagttttagtgtaagtagtaattaatacagaaatttaaaatatgtggcatgtctttatgtgatttctgagaagtggttgctctgaactgaagatagggatgtttgtttataaggtgctttgtattaaataatgaattcagatcaaaaaactgatacatgtttaagattctacttctggtgctgtcattggctctttgaacaaggatgaaatgataatagcaaatgaaaaacaattaacagcgctggattgatgctgtaacaaaatgaaggtttaatattaatgtatttgtgaccggaaattcattggttaatgtcatttctcactctgtcttaggatcagtttgtgtgtggagaaacagtcccagccccttcagccaacaaagaattagttaaatgctgaagaagccttcaggaatccaaatcctgaacatttggaatgagcccagatagaaatatcgaatgcaaagctactggcttcacagagacaaccatttatgatttgctgttctgtaagagtgtggattctttctatcaactgctgatatcatcttcaggaagcaagtccataacatgacatatctggattttgtgcttagaaccttaaattggaagcattcttaattatgcatctaaatttaaaagaagataatttcaaaacagtgctttctttcccttggtttcatcattttcatatcttaaaccaaattacttcggtatctgacaacagcatcatctacctcagtcattaggatttcttaataaaaaagagattgtatttttgacttggttattaagattattaaaattagcccttcctttgaaatatgacatcagctttgctgttctaaatttaaaattagttgcttcatcagtaccacacttccagtttctataccaagccagtctcctcagttttcccattagaatggacatgttctgttcagcgtgtcatttctgtaatgcttcatgcagagagtttggtcatagtattaaagagaaaatacagtgaggtcacaatgtctccagagctaaaagttagtgaacaagaaagaaagtccaaaatgaagtgatgaaagaatgaggacttttcttatattctgcatattccttggaagtcaggacaagatgaaaagaaaaacatccaaaagaagtgaaattggtgacagaatgagaggagca

SEQ ID NO: 104898 - DNA, 1637 bp, Homo sapiens
gcacctgctgcagccttcagcgggctatttaaggcgttaaagcagacgataagaagcagggaaactttccccgctggcacctagcttgcagacccggccacgtttagttgcaggcgcctggaatactccgcggtcccagacgtgacgtagcagcgcgggcgagccccacattctattggtcgctgccgcccaataggaggagcggtgcgcgaccccgctgagcaagctttcagtcttcccagtgtctccgcccctagttcagccatctccatggtgaccgctaccggttatccatttggccgcgcagggcggagttgcgtcattgcctatgcgccggaagggctagtccttgcccggcgcgacctgatgatgccgagcccaggccggttccggcgaagttaaaccctcggagctggcctcggactgctggggcgttaccccttcggccacccccgctgaccatggcagtgtttcatgacgaggtggaaatcgaggacttccaatatgacgaggactcggagacgtatttctatccctgcccatgtggagataacttctccatcaccaaggtaacttcagggtcccgcccggcggttcacccaagcaagcgcagtttggttccgcccgttccttccatcattgggtagcctttgctgcgctgtgtcacccacgccctctttcccgttgctgaatcttcctcctcccgcgtccccccaccccaactaatgccctgagctctctcggtaggcacgcagttctggccttagattaggtcagggagagggtggcggagagcctctgtctctctgcccgatccctgccttagggtcccaacctgggatatttctgtcgaggaggggactcgttttttgtttcccagggcttttggggcgaccgaagctcgcctgaccttcctaggtgtttcccctaagtgacgcttctaggggaaaatgatgtcggcatttctcgctgaaggccctggggttctcacccaccttggggggaaggcaagccaccaagagacttgcatctaggggtgggataggtttgggggaggagatggcgaagagaagctatcctgaccacatggtatttgatttcgttgtaggaagatttggagaatggggaagacgtggcaacgtgtcctagctgctctctcattataaaagtgatttatgacaaagtaagggatataattttaaaacgggggaagggtattgtaagtcagtggcaaggacttagatcagcttgtcagtgatgagtgcaggagaatgtttcattgtgctaggtaaagtgcggtatttttttaggcaggttttaaacaccattgataaacagccgaatagtaaattaaaacgtttaaagttcagattacgtaatttattttagctttagagataaatctagctttagtgaaaattattatttattaaatagaaagtatatagattattttagtggacaattttttatatttctcttctatttaatatgtaattaaaattgtttagagctgctagacttactttgaagggaacaattgtatggtatttcgtgctggcttatacacagaattctgcattatcttgtttgagatataattcctaggtgcagctttacaatttcattttagtctt

SEQ ID NO: 104899 - DNA, 1032 bp, Homo sapiens
caaaaatgctgattctgtaaatgtgagacttgttaggatttctttttataaaatgaaggccttgcaaattatgaaaaaaaaaagtgatttatcttacaggctctttcctgttgtattttgaggctggtagaattagagcagaggttgaaaatctttccctagaaggccagatagtaaatactttagattttttgggccgtgctgtcttaattacaacttctaatctttgattttataatgtgaaaagagccatagacagtatgtatacaaatttcatttaccaaacacccagatttggcctgcaggtaataatttgctagtccctgaattagagtattcatttcagaattttattttacaagaccaattaattttaatagcctgcagaaactaagtgaaatataagcaaaaaagaatcatcaagcatttacaaacaattagtatattatttactgtttagcgtcaactgatatttactgagcacctcctgttttccaggaccaaaaacttgtttcttaccttacagaattctcaaaactatgccgtaagatacataataatattttaagacaggtaagatagatagatagttaatagtattttcttgttttttttttttttttttgagacagagtcttgctctgtcacccaggctggagtgcagtgggtacaggggtacagtcatggctcacagcagcttctgtctcccaagctcgactgatcctcctgcctaagcctcctgattagcgaggactacaggcacactattgtgctcagctaatttttaattttttgtaaagatggtcttgctgtgttgcccaggctggtcttgaactcctggcctcaagtgatcccttctctttggcctcccaaagtgctgggattacaggcatgagccaccacacctggccagtattttctttttaacagatgaaaagactaagaatcggactaataggaacttgcacagcatccatcataggcattaacatacttaattatgttgactgccaattctaaggaaacatatct

SEQ ID NO: 104900 - DNA, 1049 bp, Homo sapiens
agaactaaggtttttgaaacctacaaagatgtggtttttgaaaattgccaaacaaggtaaaacacactttgctttagttcagcctaccaccatgtgaatacattttaattaacttttttttgagagacttgctatcatactaatttaattttatcctacattcaaaaatcatctattcaagggatcttttaaccggcatttatctgatgagtatccacaatgtgctgtgcactgggctaggcactctgggaagagctcagggaattggaactctgtaaacaagccagggtcttatcaaggagctgccgttaaattctccatcagcactgggcaaagtgaggcccactcttgcttctgggggtgtaaggagcccacaaagagctaatttcagaaatcaaaagcaggcacttagaaacttttaacaatttcacagaacaatcttgtgcctattgagtctagtaacagaaaacaaaatgggtttgcattcttcatgtctttgtttttaattaattttcaaattcattttttatcacacgatattttataaaatggaaacagatcacaatcttaacaataaaaagagcccttccctacagataatttgagaagcactatttttacatgatgtatctgatttctggaaagccttgaataggtttgactcgggagctatgcaggtatgtgccattcatggctcaacacccctcaaattcaaaaggtatctatttcctttattctttcatctgctttgtgtttctttgtcctgtaagcctgggacatcttcacaagcaaagaaaaaagacaacatgactctttccttcctcaaccttctatgtctgttcatctttacttgtggcagcaaatcagcaactaaccaaaatatagccctctccttggaaagtgtgaccttcacagctccaccaaagggtgctttggaaatctgtcaaggtcaatgaacgtcccatcctaatgctagctcatgcaggccctctactccaataggactactaaatctcatcaaactattagtggagaccattttcaaaaat

SEQ ID NO: 104901 - DNA, 1035 bp, Homo sapiens
gagtggcctcattcatatgtctggcagttggctagaacagagccttgtgtatcttaacattcagtaagctaacctgaacctcttcacaggatggcagccacaggattcccaaaagcagcaagtgggcaagccccaatgtgctagcttatttcatgctgcggtttgcatcatatttgttaatgtactattggccaaagaaagtcacaaaaccagctcagagtcaagagatggagaaacaggcactacctcctgataggaccctctgtaatgcgtggcaatggaacagaaacagggaagaaacaagtttgtgtgtggctagctaaataatggccttgtgctttatggccagtacatgactgtgtctaattttcatacgtgaatatacttccaacttccacatgcaaaatacccataaaaatggtaacacagcatcctggcaaattaattcacatttttggtggcaaactcatgtctcattttaggcatgatttacagcaattttgataagactttgagagtacaagacaatggtggcagaacctacccacaaaatgctaggacaggtgcatttattcactcactcaacaactaattatcgaacaaatacttccttaagtgcctgggattcatcaagaacaagataaactccttgcctttgtggagtttgtgttctagtgcaggggcagaaaaacgaagcaccaagtcatgatcaatatgtggaaatggtaggacagggaagagtgatgggagaattttctagaggaccccaaataggattggccagtctctctgagaccattttcattttctggactttgggtttttcatcattggtttgtcccgtggtaggtctcagtgcagatgctgatggggacccggcagcgcatctgttatggctctggtggatttgtctctggtagagcagggagccagatagaatgggaggtggactgcaggacttgtaacattggactaatgaacagccagatgtctgatgtgtcctgaaggcaggatattccagctggaggtttctgg

SEQ ID NO: 104902 - DNA, 1026 bp, Homo sapiens
tttttgtcttttgttttttttaacttttgaagagtgaattgagccaactcggggcgtatgagtggacacatacatgcccatagacatgtatgtagttgatgctttgacatgtgtccactgagtcttgtgattaaaagaatgaactttggcccaggccagacctggttttgcactctggctactcactgcttgttttatgactttaatgtctctgggctccagtgtcctcatctgaaatggagacaatgataccatgcagcatcattgaaggatgaaacgttttgttgttttaatttatgtaaaatgcctagctcaatgcctagacatagtaggtctacagtagacagtaattactactattcttattttatgtctagcacaggctaggatttaaagactggactgcatgtttgcaactgcagttttccaggttgcgcagtgtggaacaaaaatgactttccatttaatgtcagggtggttcttccgaggagagctgtcagggcagcttctcctttagagagaatacctctgtgctggcaaaactgactctcaaatgagggtagattatcattgcagaggcctcaagattttctgaggtcatctgcttagagcttggtgactaagacttagacagctctgaggtctgcaccgccttatttatttgtaaaatgacttaagcatccttgcctggaaagtcccctaaaggctaccttctggctttggctggctcttgctttattttattaggttatttattttcaatttttctttcaaacttatgacttacattcaacccaattgccttgggctattttttagggagagggaaagttcaagtacctcggtactgcaggtgggtgttcatcccccatcccgttggtacagggagtgagaaggaaccatcacctcgctgctgatggtgtggaccaggacttggagagccaagagtcagtctgtggctgtgggctgggcatgatctgtgggctcctttgaccttccctaagcctgagagcaccagggagcaag

SEQ ID NO: 104903 - DNA, 1251 bp, Homo sapiens
tttttttaaaaagaaatatttttcacatcatgattcctgattatagttacagtggagcatgtccttacttattatagagcaactgagtgaagttgtggattagtcaaaacagccatgtttaattttcagtgcctcaaccagaaattgttactctttaagtatttggggcaggtgggttcttacaggcagcagaaatgagaataaggtgggtgagggtgtatatcagtttaaacaggcatccacctgggcatcttggcacaggtcagattatctgaagtggaaagagtggtatcgttgaagaggcatcaggttgggcttaggatactcagagcgaaagccaggcatggctttgggtagttctgtgaggtttgaccagtcacagaatgtcttaagcagttttctcttctgtaaggtatgattttgaggcctaagggaatgcatgtgaaagttctttgtagaagagctgtgcaatgttaatagttgctgtttcctgtaatcgctgttgttagagatgttgtgggcatgcgtgggagtctgtggggagctccatggctgaggtgacctggctcctcatgacctgttcttccatgttgatttggttccatgctcatgaagaccctggcatcgcctgaggtcatggtgatgtccagcaacagatgatgagggcttgaaataaagtgagcttggatggtcactttatggagaaggaggaagtaattccagaaacactgggggataaatgtggtagggtgtggtgaacagacacacaggattagaaacagggaagaagatactgtgattccagctggtgagaccagatcaacagtggacccgtcagctgtgatcgtcttctgtgtaggtctgaacttgcaaggaaagccagggctaggggttcacacttaggaataatgaacatctgatttgtagctaaacccatgtgagtagaggaagtcaccaaggggagtgtagagtggaggagagctggcagccggggatgaaccctgatgaatacatcgcatgcccaccaccatgatgaatgtgagactggctcagtaaaggttataaatgcaagaatgagaagcaggatttactttagccataagtacacggtcaaatgactttctgaaaaagaggaaagtgtctatactagggtaagacagaactgtaagagtcgtggcccctagatctagccaaatattgatcttcataaaatctaaatgtggtcgtctagttaaaaaggactacgcaccc

SEQ ID NO: 104904 - DNA, 1028 bp, Homo sapiens
gatttgggaaggaagaaaacaatcagcaaagtttaatgtggaacatgtgcattcaatgcacgtagagaagaggcttcttgtaacctaactggacaggtcccatgagagagtctcatgaacaccattcctatgtagctattattgctatttttgtttgcagatatgtgacttttctgaaccagtaaatgtcaggcagactgcttttattcagtattctatttgtgataaaatattattaattatgcatcgctactaatattagttctttctacatctgtcaatgtaaaggagagacttgcagcattccagagaaagcaggaccctcccccagctcccattctgtgtggctgctctcctcttttctgcagcccagctcactgggcattgaaattctttcacaactccattagacagggagcaccgaggcaaagtttgtctgttttcctcttggtctttacggttaacagtgcactccttgtagtgcacagtggctgatagtttgtctcccagggagccagccctgacagtaagcagcaagacaggatgatttctctagaataaatagcagggtcggatagttagatgtccctggtaacatctccccagtaggcatgcacagctccctgagagagtgtgtagtgggagtatcctttgcacatctcccccatcatgtccagaatgttcccagagataccaaacttttttcaacagaagtgctgaatgtcttctgctagaaggggaagggaacatcggaagaaaggacagtgactcatctgtgggtaaattcttctccttcgttgtgcttcctacttcacaactcccctgggggaccctatactgaggtgctttatttaaagatttgctaggatttgtttacttgactattttttcctcaagtatttcttcagttttgctataggggaaacttttaactccaacaggctcattgtatttgtgtagatttggttcattttgcaaagagggttcataaaattatgggaaaccttttccctattgtactgggagca

SEQ ID NO: 104905 - DNA, 1087 bp, Homo sapiens
ggagcctgccttccaagcacttgcagtctaattaagtaaatgagatatgtgcctcatgccacaggagtttgggagaaggagatgccacctctcactggaagggaaaccaaggaaatgtttctggaggggcagcttttaacttgggcctgatttcttttgggcaaacatggggagtaatgagcatgaggcaggaagagtttatttaaatctcctaatgaaatgttttctagtagtatttgagtaattggagagcatcgttgacagtctaactaaattattaatgagtcattccaaaagtagttctcaagtgcagtaacattcctctgagctcactgccattttgacagatttcacttacatccctgaaaaattacctgatcttttcttctgaaaattctaataactgccatttcattttaccatggcaggcctagccacacatctaactgtaaactgttcttaattctaagtgtattgaatttagtcaagtcagttactttgactcaagttactttgactcaagaatgaatagctgaatatgaaatacttagtgaataagtagaaagagagtttgtacttcattttctcaactctttctttggaacacttagtgatttttaatagacaatatagttgcactcactctgaattctaagtatagttaagtgatccttcatttttttcaagtagttttccttagaatgagttgctaaagatcttgaaacttgatggctaacagaagtcagttattaaaacgtcacttctgatgtttcatgagtgtgggtttaattctaggttgttttatggttatagatgtaactgcagtacaaaaatgcatggtgctggccatttttcagctgttgaattgtcgttgtacacacatggagctaggggcgtcattggtgtgtttttcatcatgaatgagttgaagtcctttggcgacagcttccgtagagtaatgccttacatggtacagggaccagcatactagggagctctgtggacatttatcaggcaccttttggcctaggattagggtgggggcacacagaggacctgtagttaatgcagaggctgcaattctaaa

SEQ ID NO: 104906 - DNA, 1105 bp, Homo sapiens
tgctgatgccaacaggctgaacttttaaggccttaatagatgcatcaaagatgccctgagcatgggctcaccggtcttcagtccatcatggcttgcttggtgagaaatggtcgagatgaagtgtgtgaaagaaaagttactgatgctgtttctaatagcccaggctggaataatgctgtaaaggtgtgcaaggaatggggagaaggatgttgaggtttttctggattgccttccatatccctcagactggtgatccaactgtttcttttcttaccactgtttcttgccaatctagagactgtaaatgaaaacaaaaacttactctcatgtctataagtagtttcttattgtggacttcatttaatgaattagcctaaaacaactaaaaaccaagaaaatatcttttttcttaataccatttactttcttggatataaagtgtgaattcagaagtggcttaaggcaagtgatggggatcagtgtccctgaggggtgaaccagccaaggttttgttctcctacctgcaaggaatgttagagtactatacagtgcttgggtttgggagccaagttacctaatgaaaaagcaactttaactcaactttcctgctcattagtgttatgatatcaagtagcatggtggacatctgccaagatggcccccagtgacccctgcctactggtatccacggccttgtgtacctagtgaattgcttctagtgaacaggatacagcaaaagtgatgggttatcacttccgagattaggttacaaaaagattgtagcttccatcttgcactctcccgctctctcttgattactcccctgaaggaaactggttgccgtgttgtgagctgacctgtggagagacccatgtggcaaggaactgagggaggcttcctgtgaacaggcagtgaggaattggggccctaagcccaatagccctggggaaagtgaatctgaatcttgctcaacaactgtgtgcatgagcttggaagtggatcttcccccagtggagccttgagatgacttcagccctggccaatgtcctcaggcaacctcatgaaagattttgagccagaggcacccagataagctgcacctgga

SEQ ID NO: 104907 - DNA, 1952 bp, Homo sapiens
ggggttaggatgatttggaaggacacaattcagtccatagcaccagactatagattggtattttactttggttcaaactctctcacagatgaagaaccagtacttgatgctagagtaatggagactgatgggatggtggtagcccaggcttgatggaggagtctgtgtgtcaaggaagacttgaaatcctcaggtggatttggagttttatgcaaatttggtgccagggacagttggctgttagtcaggcaaaagatgggagaagagggtggaagcagataatcttttcacgaagaggagacaacttgtgggagggatcaaaacacggagataaccctgcatatgtggggagccacaggcagttcagtttggttggagcatgttctttgggggagaagaaagtagggccagatgatgaaaggtcttaggtgttgggctgaggagtctaagctcaaaagcactgaaggtttttaagatggagggggtgcaggtgacatcagattctcattctggaaagatttctctggatttagaatgaggaaggatggaaggggcaatgctgggggaggggaaacatatagaaaccattgcagtcatcaggcaaggtaaaggtggcctcagtcaagacagtggcagtggggacaagaaaaggagtgggggaaagagaaattaggaggtggtcctagggactgcctggcaggtgaaggaaagcagaaagcagaggaggaggtgggtgtgctgggcacctgggatgacacgagttccccacagccagatgctgagtctgctttaaagcattctccaataatgctctcacttgatgattcaagtagccccgaaagttgaaaggaaggtatttttcttttcttttcagatgaagaaattgatttggcaggtaacaagtagtaagtgggcccagaatccagtgtttcagctctttccactcaaagcttatccaccgcacatgaaagagagctcagcgccaactgccagtccactgaagggtgtcgcagtgatatttgtttgaataactttattgaactataatttaaataccatgaaacacacccatatgaagtgcctgggtgatgagttctgataggtgtaaacatttgtagaactatcaccacactcaagatataaaacttttccatcaccccagaaagttccctcaggtgcctgccctgacccagccaactgctgatctgctgtgtcactgttgaatagttttgcttctttttgaataacatgtacatagaatcataccgtgtgtgtgcctctggcttctttaactcagcctaatgcctttgcagttcaatctgtgctgttgtatgtatggagtccttgatgttgtatgtatggagtccttgctgttgtatgtatggagtccttgttgttgtatatatggagtccttgctgttgtatatatggagtccttgctgttgtatgtatggagtccgtgctgttttatgcatggagtctgtgctgttgtatgtattgagtccttgctgttgtgtgtatcaagagttaattcctttttgtttctgagtaatattcccttgtttgcatgtgccacaatttgttgaatcattttcctgttgaacatttgggaaatttccagtttggggctattatgaaaaaaaaaagctgaatatccacgaacaagtgttttgtgtggatgttttcacttctgttggggaaatatgtaggagtggaattgttgggtttatgctaaatacatgtttacctttataagatactgctcaactgttttccaaagtgtttgttctattttacatttccaacaacaatgtatgagagtagagagcttcattttttataggtaataatcagagttactttttattcagcacctactgttgtattaatctcttctaaacaaactaacaacaatcttatgaggtaggtggagtcacccccacggtatagaa

SEQ ID NO: 104908 - DNA, 1037 bp, Homo sapiens
atattttatcttttagctagaatccacacatatatatcctatttgattagggtagtaattaggataactaaaattctgggcctaattttttaaagaatccaagacaaactaaactttactaggtacataagcttctcaatgagtcaccattcttcttttttgtaaaaacttttttctttgaaatgctaaacttggctgtatgtcaaattgtgcaaaatattggtattaaagaatgctgcaacttttttatgtctcttagaggttaatcagagtatctgaagggaattgtttttataaaaacattgaaatattagttacttgctataaatagatttagtctgttatatttccttttgtaaagtaaaatatgtccagaagagtcaaagtagttagttttggttatttctaaaccacaaaagttgtttaataagtatatcttaagaatgtgctagagttaaaagttagcattgtttctagattagctggtgtcttcattttacattgtgacaaacagctagagcatcagagcccttttgctataccacagtctttcgtttccagcctttgtcactagtctttgaggaggtttgctcctagaactggtgatataaagaatgaaagtagctgtatgagcagagcagttcaagggccaaaccctggaacggtagcaatgggatataatacctttctaagggaaaaagttgtatcagtaccatttgatctgccatggacatgagtttaaagcggctttctggcccttctttcagtgacttcttccctaaaatgtagaaattctaacttaatgtagttactgtgagccatattactagtgccccctagggtctataattccttaaaattttcattctgaatctgaaggagagagtcttttaactttagaattcccaagagggctttattacacctcagaaattgaaagcactatgaatttgtccatttaaaaatgatctgtagtttttttggtgctataacattctgacacatatcattctgtgattaaatctccagcttactat

SEQ ID NO: 104909 - DNA, 1057 bp, Homo sapiens
taatgatatgtctttaaatgccaaaacttacatcttttaacctaaaaacatgaaatttcagattggagagctgttcacaagccgtggttcctattagatgcagttcagtcagtgaaaacagtattttttagaattacattttctaccagctgtctttgggacattactgcaaaatcattaattaagaagtacataaaatgatattgagtctaagtcctgttatttctgagtttaatgggatttctttttttttaattgatttcttttttaactaaactgtttaataaaactagccatcctggtatatatgttatcccagtgttcaagaatgcttctcaaaaagaataatcttttttctcattatttataatgtttaaacccaaaacaaatggtttaagtttttgacaactttcagatctatagtagtaatcagaaattttcagtaaagtaaaaggactctttctgtcttttccaggataaaagagtgcatcactttagaagaagtcgggcaatgcttaaatctgtttgatcctcctggcttatctagttacatgggaagttgctggttttgaatattaagctaaaaggtttccactattatagaaattctgaattttggtaaatcacactcaaactttgtgtataagttgtattattagactctctagttttatcttaaactgttcttcattagatgtttatttagaaactggttctgtgttgaaatatagttgaaagtaaaaaaataattgagactgaaagaaactaagatttatctgcaaggattttttaaaaattggcattttaagtgtttaaaagcaaatactgattttcaaaaaaatgtttttaaaaacctattttgaaaggtcagaattttgttggtctgaatacaaacatttcacttctccaacaagtacctgtgaacagtacagtatttacagtattgagctttgcatttatgatttctccagaaatttaccacaaaagcaaaatttttaaaactgcatttttaatcagtggaactcaatatatagttagctttattgaagtcttctta

SEQ ID NO: 104910 - DNA, 1395 bp, Homo sapiens
tattgaaatactggttttgagaatgtcttcatctgtggagtatttgatgatttgttgaaagagatctgtatgctcttccaaagctttccctggtttatgtatatttccagaaataattttctatacattaaaaataatattagcagtagaattactatatcataggacagacatgtgtacattcagctttagtagatactattaggtgattttcctaactggtccagccaatttacacacctaccaggttatatgaatgctaggtgctctaaatgcacacatttggtattatcagtgtttctttgtctttttgctttttgattgtaactattgtgacggttatgtaatggtacttcactgtggctttttggctgaatttctctcatggctaatgatgttgaacatcttttcatatgtttcttggccatttggatattctcttttgtgaaaatgcttgttcaagtcttttgcccatttaaaaagtcaggttgtttttattttaaaaaaaatggtatgtaggacttaatttacattttctgaatatgtcttttgtgatatatatatatattcaagttgtttatatggtttaatgtttattattgaagaaaataaaggatatcgcttagatttttatttctatcaatccgtgctaatagcttatattaaatgccaatgtaattattcagatgatatatatgttttgtgatatatcacaaaagacattttcaacatatatagatatgttgaaacacgtatctatatagatatagatatatgttgaaacatgtatctatatcgatatagatatatgttgaaacatgtatctatatcgatatagatatatgttgaaaatgtcttctagtatgtgacttgctttttcactgtcttaaagggtatattttaatgaaaattcttaattttagagaagttcagtgtatcagtatttttctttatggttattatttttgagtcctgtttcagaaatgtttacttagcctaattctatgaagatagtcatttatttaaccactggagtcttattgttctatttttcatgtttagatctggatttcattttgtgtgtgtggtgtgaggtagggttaaagattttctttccatataaatatccaattaattcagcaccatttatttgaaaatagaatctctttcccactgcactgcattggtcttcgatcctagatcaagtggccatttatgtatgggtctgtttttggagtctattttgttacatacacataaagtccttatatacttaccacactgtctttctggctaggtatatacctaacaggagttactccatatgtatattgaaagacatttccaagagtccttaaagcagcattaattctaacagtcccaaattgaaagcaa

SEQ ID NO: 104911 - DNA, 1024 bp, Homo sapiens
ttttgttgtgacagtcccattaaaatgtggactgaatcctctccttcatgacacagacagcatcagtggtgctgtccttgccacagaaggccccagggtgtgtgggcacagcgagtgatgcaagtgatgtaaccagaagaggttttgggggattttcacacttctttacacatgctatcctagcctggcagagtggtctgtgattccccactcagtactacctctctgtcttttatccttaaaagaaaaactggaagtcaaagctgattggctgtcaaacaccaggctccagtttcaacctctgtatcaaaccaaaatagcagccttctaatggaaattttcttttagtataaaatgtactttcttttttatctgtgcaatttacattcattttaattttttggaaagcagccagttgatttttgcatttaaatgagagtgagaagtataattatttacacaaatttaaaattttctatgtaaaggaaataaatttccaatgatgaaattgtataccaaaaaattaattgcaaaattttgtaggcatgtgcatatgtttctgagaggttttcatcaaattttcaaagggatctgaaattaaacaaacagccaaacaactgattcagagcaagcttctgctgttgcagcagctctagctcactgtttagacctcctcagaatagcgacagcatacagggagcctattagttgtgtaccccaatctttggtgagcctggagggaggtaattgagagggaggcaggggccctgaaaatggagtaggtgttgatgagtgcccataactctccaggcccagccagggcaccattaaccatcttctgctttggcaagaatagtccagatccacctggagaggcttttgggctagggaggactttatatgcagcaggactgcattaatgactttcaggcccttttcctttgtaggctccttcctccataaaaaaaaaaaattgaaaattatattttatgactgtgttggtcagatctgttaatattatata

SEQ ID NO: 104912 - DNA, 1007 bp, Homo sapiens
ataggtaggtttctttgctgctctcatatttttccttttaattttattatttttttcctcttcttattcagatagtgtttcatctctgtcattaggaaactacttctcattgatttattctgtttatgcagtttttccttccaaattcatcaactgaactatgggaaactttgtttcttaaaaggttattttgacattatttgggtcaggccaggtttcacatagggaaaaggacaatgcttctgctttgccttcccatccaccactaacagctttgtgaaaggagagagaagtagaaggaaaggatagagagagaaggagggacgcctcattcagcttacatttcagaagcagggaatgcaataaataacatgaagaaagtccaggctcaactcgctcacacctcaggaggtgattcacgagcatgtaacacagcctgctaaggtttccattattcataattaattaaatcaaagcatgcttagtaagggcccataatcttaaaaagcattctgtgttttcatctgactaaaagtttttccttcgcttgttgcagacgacagccgactttaatattatagcaccagcacggtacagttgactcagtaaacctgccacactgtggaacagaggtttggggaagaatgtggaatgtgaaatataagactattcagccccttaaaacaatgactatccaaatatgttgcttttgagctggtagtttctcacttattttgtttaaaaaaatataacatcctttgttgggttataggtttcactgaggcagatgggtttctgtagtgaattagtccctgcatctactgagagtatcctccctccagcattaaagaaggaaaataagaaaatggcccatagcatagaggaatggtcaggtgggaagtagcttctccttaaattatttctgatggaaaaaatatattctggagcttggcatttgagttcaatattgccaaaactccaggaataactttctgccaagagcaccc

SEQ ID NO: 104913 - DNA, 1037 bp, Homo sapiens
aagagtcacctgaggtattggcacatgcataagtgttcttcttgggaatcctcattgcaaagattctgtgaacatggacttctgaaatggtattttctgtaagctgtggggtcagaattaacaaagcaattgaaaattcactcaggcaaattatagaataatgaatatccatatatataccacatatatggcatctgtctaaaacttaatcaccagagtataatcttgtcaaccccaattttattttcctgactgcctctgagagtagaaatcagtgaggcaaatatcctgtgtgtttttacacaaattgaaattatttttccataatattttgttaatggtactgtttgtgtttgtagttgagttactttgacctctgaagcatcttccacactgttgcatgtaaatggaacaataggtacttgagtcacttgatcatggattccagattctggaacagcctctttagaaggcaacagaggatattatttactgatttgagtggctttagaatatcatttaactttttaaaattatatttattagatatgatcttaatctttatatatttttcttttatagatgatataataaggcattattagtattgtataattctcaagggtattccacataaatatttaaagttaatttataaaagttaattttattgcttactatgattatatgataaattctcacttattgagaatctgaactggaaaggtcaaccaaaaatttaaaagcagatatataaattagggcgagagataacgagagcaagtgctttgagccctgtgagtggctattacacactagcatggctattgatgaggatggagagggcctttagggagggcatacttaaagaatgcaggagtgaaaatgcttgtatggtgttttaattcattttaaaactatattttcttctcatttaaccataggccactcagttcctcaaatactgtgaataaataggattttattggattgataaccactgtattacaaccactactacgtgagaatacaagaaa

SEQ ID NO: 104914 - DNA, 1107 bp, Homo sapiens
gatgagaagcttagggtagaaccttggggaaatccatgtttaagggtgcaccgaggaagagcagccccagatagagaccaagaaggacataggagaaagtacagagccaggcaaagggtgcagtctgatgctgcagagaggaagctgcaacctgcagggttgagggcctgggctctggagctgagctagagtttgaatcctaactgcctagcttgcaggttgtgtgatatttgtcacctgttgtattactttgcaaaggctcaatttataaaagcagtataattgtaaagcctacttcatctacttgttgtgaagcctagctaaagtatgagaagtatggagtaccatgcttggcatataagaaatgcttagtaaatattcggtgatgctatccttattattatcaaatgacatgaggactcagaaacattcatgaatttgcttcttggaggttgtgggtgaccttggcaaaaatccatttcagcggagggacagatggtttgagagtgagtgggaagtgaaacgtagaggctgtgagtttagaattttctcaaggttagttgtgaatgggattgggcaggggggtggtggtgattgctgcacaagagacttggaatttgagtgctggctttgaacgtacaccacagccgcagcatagagaagagtaattctgagcggtgaggatacctgcgcagaaatgatgatgatgatactaagcacaggagtgagagacaactaggaaaccaaggatcgtgggagagaggggaggagggaatgggctacagggaggaggaaagaaactgctctgcactaggacttgtctcagagcctatagaggctaccagagttaagatttgtaggttcctgaaaatgagagtttagtggaccattttgaccttctctccataatgacaacatatttttaaatcctgaaaggcaagaaaagaggtttcccaaaaagacttctgggaaggcgggcaggaatcagagcttcctggtgaagttatcagacactctgggagttggcttggaatgcatactcaactcactttgcaatcattcttaacttttagagaaagcctcccaaatctaactttattgaacagc

SEQ ID NO: 104915 - DNA, 1059 bp, Homo sapiens
taactcctttcccagtccctcagggtcatcactgcctagtgacaatttctaaacactataggaagcactaatcatctagctgttccttatttgctttgacatttgcttagctcctggacctgactctcagggcccttgggagtttgtccctccctctgtctcccacctactcagcaccacttgacgtttggtaagctgcattctttcttttggtaattttagttacgttaagtccttcttgtttgtattgcctgcttcaccccattcttagtcctacccacctttcaaggaccaccaaaatatctctgaatcaacaacatctgaagtcagtcctgtaattgagtatttttcatttatgtcttgtatgtggataaataaatggtcccatcaccttccctcagaagcctttccatatactaccatttcctaaaaaatattataggctccattttcctaacttactttaagcttaagagtgagaatatatttcatacccttctctgtctcctctggtgaccaataatatacaaagaataatttcaataatgacttcatggttattaattgttatcagtttaaatacttagcaagttgagaaaatataaagaaaataagatttcaaacaatccaatcatctatattcagcaaaacacaaaaagtttctgttagatatgacagggtctagtgtttatggaattaaagcaatgttttctaaatgaaatatatgctgttgaggtatatgtcctcgtgtttcagtggagatggagaccccacgctttccttaggataaccttctaacatttaaaacataaaacgatttcattgtatactcgtggtatttagtgtataccactagcaaatgttgagactgggactagaagttgaagttcttatatcaaatccaaagacctttccactgcacatttccatatattctattcactcatttatttatttattcagcacatacttagtgagcacctactgtgtgtcaggccatgctaggcaatgagatagagccttcaaagagcttagtctaccgatagagactgacaagtc

SEQ ID NO: 104916 - DNA, 1048 bp, Homo sapiens
tcttgaggcagaacagggtgtggcacatataaatgaggaaataagccttgaaattattcacaaatatgaaccatccaaagagggtcaggaaaagggctggctctccatagacgggttcactaattaccttatgtcacctgactgttatatattcgatccagaacataagaaggtctgtcaggatatgaagcaacctctgtctcattactttataaactcatctcataatacatacttaatagaggatcagttccgaggtccctccgacatcacaggatatattcgagctcttaaaatgggttgccggagtgttgaattagatgtatgggatgggccggacaatgaacctgtaatttacacaggccacaccatgacctctcagatagttttccgcagtgtcattgatattattaacaagtatgcattctttgcttcagagtatcctcttatcttgtgtttagaaaaccactgttccattaaacaacagaaggtaatggttcagcacatgaagaaacttttaggagacaagctctatacaacatcacccaatgttgaggaatcttatctaccatccccagatgtcctgaaagggaaaatactaattaaagcaaagaagctgtcctcaaattgctctggggtagaaggagatgttactgacgaagatgaaggagcagaaatgtctcagaggatgggaaaagagaacatggagcaacccaataatgtgcctgtgaagcgatttcagctttgtaaagaactgtctgaactggtcagcatctgcaaatcagttcagttcaaagaatttcaggtgtcgtttcaggttcagaagtactgggaagtctgttcctttaatgaagtgcttgccagcaagtacgccaatgaaaatccaggggactttgtaaattacaacaaacgttttcttgctagggtttttcccagtccaatgagaattgattccagtaacatgaatcctcaagatttttggaaatgtggttgccaaattgtagccatgaactttcagacaccaggactgatgatggacctgaatatt

SEQ ID NO: 104917 - DNA, 1044 bp, Homo sapiens
tatttaaattcatccctgattttcagaagatatctttctgaatatatgatttctgaaaaaatcataagtaatatttattaagaacttttagcctttagaaacatgcttttatacctactgccattttaacattgtgagccattttaatctaattttgctttcctagaagttgcctacaaaaaataataaagtaaacagaaaagacaagaacggtgccagaaaacaggatcatgtgctacaaatatctaaagtaaagtaaataagcttacaatctggaataaatatactggaaattgaaataaaacctttaattaggaccaacttcacataggtgtaaccagaggaagaataaaacctcacttgcagagttacaaacctcattatttgcaaaagtcctataactgcagtttaaaataattatatgcatatggtatgtcttcttagccctgtaaaaattcaaaaggtataaaaggtgtctcctagaagtgcttatgtatgggagtctaattaaatggcatttgtggagaaatgctcccatcttttgggcttttatgctgtcatttctgtgttgtgtttttataattaggcaacctgaccaatcatttggaaacccatgtagttctctcctccaccaggacaataaacacagatgttactctacttaacaagggttttccccctccccacttacacgtgataagaccaactgatgaaaccagccagccagcaccagggcctccagctgagtttctcatagcaatgctggctgggcaaaaccatctgcgtgctctcccttgctgttcctggcaccaagggtaggcatctgcacaatggctggcccagatagaagggcctgagccaagactgtttttcttatgacaaagctaattgatccgtgtgaagatgaaatgtacacacttgcacaacttattctctgggctaactgacctctataatgtcccaatagagacagacaaaaaaccgtaccctgcagcaaatccaagctgaggatcaagtacagtttaagaactactttaagtaaca

SEQ ID NO: 104918 - DNA, 1033 bp, Homo sapiens
atcagaatacaactaaagtaagtaaaggtatgaataaagataaaagaaaagatgaacagcacataataaaacagattacatgagtgaaaccaaaaggtagttctttaaaaacagtgaagtaatccaacattcagtaagtccgatcaagaataaatgagagaaaaatactaacacattcaaaataagaattatgaaagaactgaagatacagaagaaggataagttgctgtaagagactactgtatacaactttataagttgaaaatgtagagaagttttctcttgctgacttaaaaattatcacaaacttagtgatgtaaacaatacaaatttatttaacatttctctaggtcaaaagtctgacacaggtttctctaggctaaagtcaaggtttcaggaggctctgaggaagaatctgtttccttgtttatttgctatgttggcagaattcagttccttttacctataggaccaaggtcctcattcccctactgtctgttaactgaggcccattcccagcttctggaagatgacatcttccttggtttatggccccatttctccatccttaaggccagcaacaccaggtcaagcccttctcatgtttgaactctctcctctttcttcttgagttcgttctctctagctcattcttctgccttcctcttctactttaagaactcacaggaaggggaacatcacacactggggactgttgtggggtcgtgggagaggggagggatagcattaggagatatatctaatgctaaatgacgagttaatgggtgcagcacaccaacatggcacatgtatacatatgtaacaaacctgcacgttgtgcacatgtaccctaaaacttaaaatataataataataaaattaaaaaaaaaagaactcacaggattaggttggccaaccatgataacccaagatactctctccatctcaacatccttaaccttatcacacctgcaaagtctcttctgctatgtaaggtaacaaattcatagactctgggaattaaaggcttagg

SEQ ID NO: 104919 - DNA, 1044 bp, Homo sapiens
tttctaagcttgtgcattattttcttttgtactatatttttagtaatttgattaaagtattagaacattcagtataaaagaaaagtgaagttgattatttcctttttatgaaatctaattattttttcttatgaaatccaggcgatgtagttacaggaagcgatgctcaggtttctgttcctgtccagactctaactgacctccaaggtacagttaccataacaacatagtgtttctttttctttgcctacagtattatcattgcctactccaaaactccatttttctttttgcccaccctccattcatactgttttcaattcactaccattgttcagccactgagtggcactattgttaagaacaaaagtcccctctcatgtcataccttggtgatgccgaatatggctgtgatgtgggttttctattaggtgtgcacaagcctctttgcaaaatatgattcaccctgtattttgtggttattataacatagtatactttgtgtgccagctcacactgaggtgttctttttgttacactggtgctctgtgacagtatttgaccaattagttctgaaaatagacatcttatgtgctacgattagccagaaatacttacattttgcctgaaataattacaacctgattttgaaatgtttttaagtattgcctttgaattacgcattatgttaacacaattaaagtacagtgtagcaaatcttcatttatggtaactggcaatggttttaaaaaaagaatgtttaaatatcatatccatttgttcaaaatatagaaaatatagtttttaaataaatacaaaaagtgatcatctacctcctatgcaattttaaaacatataaatacttaaagtggctgcattaatcttttattatgcagtcttttagatgaaatatgcgatagagaggatttctgtgttaaatggaagcctagagtaactttaagaatcttctattcaaattcagactaaaatgatagcagtattaattaaaatccataccatgtttttcttaatttaaaataccac

SEQ ID NO: 104920 - DNA, 1058 bp, Homo sapiens
gttttcacaatatatgttttcccatcaaaatacataggaattattagtaaataaaccagaagtcattttgatcctgatgctgaaataatattttagtcacaaccaagttacaaatatttatattcttttttaatgaaaatctgtattaatttgatggatgcattgtattcacacattttgaattttgtgtattatttaaaacaaaaactaggttttattttccaaatctgaggttttgtgaatttattttatactaagtatatgaaattaactcatggtaaggctgttaaagaaaagtgatttagatcaggaaggtacagctcaatatactattatgcataaatatgtatagtaaaatgaatattgtccttagtcacaagtaatataagaagaaaatcaactcttggataaatgaagaataagaaataagatacaaagtctaggtttgataatatttagataatattcaggcaatatcccttattgatacagtgtgcatatgtattttaaagggaataattttgagagcatgtgggattataacgtctgcctttttgattccttgtgttactgtatctgtatttaatgaaaagggcagtaagtggcaataagagacagaaatggtgagacctttgtgaaccctctagcaatcagtgaatatcagaccacaaatttttccagctttaattacaggcaaaagaaaagacaaaattagcattttaatatagaaatatcttaggctttaggagaattatgataaatctaatgttgcctagtgaaccagagagggaacattacaacaaactgtctccttaggaatatttgtttaaataaaggcaacaatacttaatccttatcttttttagataattaccactatttcaggctgttctttgttccaggtttaaaataccttcagttaaaaaaaaaaaaagcaattggcagtgtttgttttctataaaactataagaagagaaaaattctgtttgcttggcactaacgagataattattttagggagagtttttgctctgcagctctagttcacgcgtgccatg

SEQ ID NO: 104921 - DNA, 1035 bp, Homo sapiens
aagctatcagtcctatgcatgtgtgttcagaaagtctatgaagccccaaatggaaaagtattaaaatgcattacagcgaaatgaatgtgttatatccctgaggtcaaggaatcaagtggctgccctcctttaccgccgacttgctattttacccccagggaaatcattcaaccttttgctgccttaaattcaggttcattaattgttttttaaagggtgatgtgtggctgataaggccttaattagcctataatctctaacagtcatttccagctttaagtgctgtgactacctagctaatcacttatttttcttattatatatgaaatagtttgttcagaaagggacttcttagtatttctgtgtcatcttaaagttatgatttaacgaaattgaagattacaaatcataagttatgaaaaaaagattataaacttaaaactgacagaacaaaaaaaccatcactttttttaatatagtggttatggccacataaatattttatttgcctcttaagtatattaactcagtaaatatattattgctaatttaaaatgttaagtatattgattttataggaagaaatgccaatatattcaagtagtaaactgtataactataataatcagctactttatttaaatatatgctttgacattttatctgtcccctctctccaaaaaagcaaaacattttatcatggagaattttaaagtatatttcatccagttcaagcacacatatgattaccatattgggaaatgtaagttagtttatcatactgcaagattttctctatacctcagtagtgactggaccattcacacgaacctggagtgaccacttcgtacgcgtgggtgagcctccaagctcctccagacagaggccagtgtggcactatgaaggaggtttttctctgacatttgatacatgagtatggtcctcatatgctgatagttacacatttttccaagtgtcttaatatgatttggaaaagatctttatttacttagttgtttttttctggttttaaag

SEQ ID NO: 104922 - DNA, 1018 bp, Homo sapiens
gggcaaattctatcagcttagcattaggaatttttagaatcatacagagtgaaaaacattgctaaaatagcaatttgaaatttctacttgcatgatttgttttaattgaagaaagaaatgaatatgttatcaaaacctatcgatcttggtaatttttccctagctaaatatggttgatgtttctgtgaatcactcactcatccagcttcagaattctttattctaagttcatcagtgtttattagtggaacctaaatgccctttcatgttagtatgattttaatggagtactttttatctcaataaagtcgtgtacatataatgaagcaaattctataagcattaaaatatagattctttaaggtttaagagaaaaaaataatagtgtatccaaaaaagggaattccccaccttcacattcagagtcttaccaagtaaaaacatgatcagtacaatgaccttaaactgatattcctgggacataataaattgggcatgatgagggagtcatatttaaaaggctcagtagaataagttcatggaatgatgatatctataggaaaagtaaagaaagctgtgtagcctttgaaaaggggctttcagatggctaaccctgcaaaatggtagatatagttaagtgtatatgtggctgactcattaacatcattttacagattttaagtagtaactaaagtcacttgacacgtgtgttaatatgggcctgtggcagtgtagtgttccgtaaggaacctgagttaggaattgggaccttgggtcaaaccttggctctgccaccaacatcttcattattttggaaaaatcatgcttgctgagccttgggcttctcttttgtaatatttggaggttgaattaaattgtctctgatgacctgtgtaagcagaacatcctttgtctttgaagaactgactttttttttttttttgagatggagtctcgcactgtcaccaggctggagtgcagaggtgtggtctcggctcactgcaacctccgcctccca

SEQ ID NO: 104923 - DNA, 1088 bp, Homo sapiens
gatgtacactcactgattcttaaggctctgttccttagagatccaaaggtaagcttccccagtagggtatgcataattttaagttgggtgaaaaataggcttctctgtgtagagtctaagaattccaaatgtggaatttgcctaatggtagatgaattgcctaatggtagcatttgcctaaagttgtaggccaaaacccatatacctcattggccagcaactcaacaggcaaattaggtagaccttgccatgagaaactggaacacatgtctcttttcccacagaaggttattctatgcttttcccttcctcacaagtcaaggaaatagttgaggaactacctctccttacagccaaactgtattgtcattggtaccccacacaggggttgatttatccaagtagaaccttgggggccatatgaagatcaagaaagtagctttatacaaaggaccagttctataagactggatacaatgaaacactaaattatttcatattatgatatgtattaatatttcttatttgggcggttaagagtaatctaataaaataaagatttaaacagactttaacactgatttctctatttgagcgtaaagcaattcaccaaaattttctttacacttcagagaaaaagtgtgctcttttacaactaatgttatatttcttgaaaataagaacatttaatgatctaaaaaaatctgtgaatccttgctacttttgagccaaacaaaaatattggaagaagtatgagagagaaagcttcaaacacgaatatcagaatgccaggcattggatggtaatcccagcctttggctctttggcaaccctcccaacagtcatgttggcagttgtcgaactgtctctgagtcagtcagtctgtctgtgggttccattgccaaagctctgtctgatcaacttgggcctccaagtttaatgtaaatttagattctaaaggatttctgtcctttccttggttgttgacttcaaccttttagtatatcctttattctttgattgatttaaaagaattcacttccttatgcctatatctgttctgtaaatttatgaactttcatatcatt

SEQ ID NO: 104924 - DNA, 2021 bp, Homo sapiens
cagaagccagtgcctgttgttcagaagtttatctacagtgagatgacccagtggtgactaagaaagtaccagagacatgggttactgatagaagatttctagataccgctactatacacacagctgtacttattttataaatgtatgtgaatagataaaattctttagatccctgcaaggaagctagtcctccccaccccatcattgactctagacttcattatggtgacatgtccctcttaataatccctctgctctttcagctgcccttggaagaatttggaaactccaagggacaacacttgtaagtcagtttcctaacatgaaacaataaatacttttgttaagttacagtgacaacccatggctatattttctatttgtcagacatgtacttccttcataaggctactctaaatcaggtattgatatagtacagaggccagtgaaatcttacatctcactcagaggccctgtatgtgcccagcccctcagccatggctgcaccccagcactgctgttgccacctccctgcctgtggtagtagctggaattatatgtgagcctacttcattggggatttcaaactcctgattgtctgaaggccgaccccactggcccaatgtggttatacctcaggaacatagaccacttttttattgtctctccttgtgaacttctcaaactgaacatttgcaggcaagacctgggtaactgcttatcccttcatgttgtgacccattcccagtatagaggggacccaaacatgaaatggaaacacagaactcttgctatctccctcttgtgttactttaccccccagtacccgtcacttccatctggggagctctgagctgccttaagggtttgtaaacacagtgggaactgtttaccattcttctagcttctaagaaaaactggcaaatttgcctactgctagcaactatatcaaagctttatcttataaaaattaattaattagctaattaattaagcaaacatatactgctatatttctcacattaacattaattccatttcaaaatgtaaactttgtttttcttaattgagctttttaatcttctactgcaaggtatgtgtttgccctagcattaattttagaaactgaccaatgtctttacttctctttttccttaaaatgaactcctcactaataattaaaaggattatcttctcaactttcctgagtaaattcactgcaaatgtcatgcaaaaatactgtaggcagtaaattttttgctatatggcatgtgtgtgtacatatgtacacatatatcctttctaatgctgtatttatagatttctatatatcagtatacgaaaattagtttctcttaattactgaccatgggaatatgtggggaaatatagataaccagctattactggtcaagtaaaatttcttcagttagtttgtttaaacacacatgtcactgagtggtttttcagagaaagattagcttgatgggtcatcagataagttatttgacatttgtccccagtcagaccggatgccacgtgaaaaatttactcaggcaaaaggctcctaggaataaacagttctctagtgttgctcacaggggacttggcaaggtgagcggaacttcaacttgtcacggatgcactgttctgacaaacataagtagatgctaatggctaaatcgtgacagaataaagtcccacaaccatatggctaattgccacaacaatatcttcagtgttattaatcaagttttcatagtgtgccatgataattggaataattagaaacagcataggcattgcttgtctttaccacacgttttgcagacagggacctcagacaaccacaattgcactttcagtactgtgttgtttaatgctatcttttcttcaaaaataatttggctgattaatgaattaactgcttgccaccagtgtattttgtgctaacttctgtagaagcaggaatatctaaatgagaccatcaaaccctctgtgaatctgtttaaataggcagt

SEQ ID NO: 104925 - DNA, 1038 bp, Homo sapiens
ttccaaggtgattttcagcaaatacacaatgctattgcaattataggagaaattatttgtccaatttaacttattttggaataaattaattatggaactattaaatgtgatgaatgatctttaaattttacttgtctcttcccaagaatttaaagtccaagatgatattgtaagtatgaggtgggggggctccatctaatggacgactttttatgttgtagagacagggtctcgctctgtcacccaggctggagtgcagtgatgtgatcgtagctcactgcagcctccagctcctggactcaagggatcctcccacgtcagcttcccaagtagcaagaattacagggatgtgtctccacacctgactaatttttttgttgttgttttttagagatgaggtcttgctgtgttgcccaggctgatctcaagcccttgggctcaagtgattctcccacctaagtgttaggattacagacatgagcctctactcttgtcccaagggataatttagatttaaatctaaactcaaaaaattccgagctcagactttctttgatttttttttttaagtgatagaaagtgtagggatttttatatttttacaactcagttgcttcatctcaggaaattaagaaagtgaggcatgtttattattactcttccctcctgctatgtcagaaaaaaaatttaggcttatgattttaggtaacttgtcaataattttttttaatttaatttgtacctgagaaaaattgctatagttagttctcaattatctatattgagaggaaacaagaacagttttaaaggtgactactgaaataagtgactgtgtcatgaggagcatttcaaaagactagattattttgaattaagacagactaaaccaaatttacttaaatatatatagtcattaaacaagtggtttcaggtgcttgatatcagatgccctcatagcatcactatgagttagacaaaaacgaatactgttccctgagacatcaagaagctgagtaacatatccaattcacatagttg

SEQ ID NO: 104926 - DNA, 1043 bp, Homo sapiens
atcttaattctccactcttgcagtaaataaataaaagttatgaaacacccgggcaacaataaaatataatttatttcatagggcatgacagaactctttacatatctaaaatgaacatgttatttacaaatgacttgtgatactcatataaaccatggatctgtgtgttaactgctttcattagggagatatgcatttttttcctaattgtttaatcgtttaaatgtatcattactcctaaaggcatgtgagttaaagtgacttctcttggtgcgattaactcataaggctaagaagaacctcagaaatgagctcttctgcagctgaagacattaagaatttaatggaaaggacaaaacaataattttcatttgggaacctctcagctctctgctgattatcttcctgcccttatttatttttaggaaccccaacctctaaaaagtttttaagcattgctatacatcagtcaaacagaacaatgttgtaagcttcttgtacttgtatttcgtactaggtagaaagttacaatcaccatactgatttaaaatgcatgggaaatgagaagtatcactcaaatgaaagcccagatatttaaaaagtagtaattagttattttaaacagaaaaatcatacacacaactggttttcagaataatgtataccagtgattctcaagtgtcatcccagaaccagcagcaccagccatcacctgagagcttgtcagaaattcagactcttcagtcccacccacctacttaaccagaaagtgttagaggcgactaagaatctatgttttaacatgccctgaaagtgattctgatgtacagtaaagtttgtgaaccactgatatatactgatagactaattgaagcaaaaataaaacattgtgggacatttattaattcctcatgtatgtatagaatcccaaagaaagcaagtggatttctttcagttttggataatttccatcagatgccattaatctcattttcaactccacctatttgagtttctgctacttttccccatttctttttctc

SEQ ID NO: 104927 - DNA, 1074 bp, Homo sapiens
atattttctggattcattaataattgcttgcaagagaaaaggagcaggtagggaagtaaaaaaaaattctttaaattcttttttaaaaattatagatatgtgctgtactgtttggtagataccaggcatatgtggctgtttaaatataaatttaaataaaattaaaaattttagtcatcacagtagctatagctgataatggctactgtatatactgtactggacaactcttacagaggatacttccattcttacagaaagttctttggacagtgctgtatagataattcattattatgctcgccccagcagcacaaatattaaaattggaatgataattcattattgttttatttttgtgtaatatgtaatgtaaatgtctacattttgctttttattcatgttgaacttttagatatggcctctgtgaaacatttacttttatttcttttctctcacctttagaaaatgacatgaatttttacagtaaatctttcctgaatttttggtcaaatgtagttattatgttacattgtagtatgtggatggaaactagattagttttgaatttttttctatgttaagcatattcgaaagttattttactgagtaatttattgatttttttttttaatttaaagatcctctttctcagttcctattttgaaaaagaaatactcccagtaatttggtccattgatgtcacactttacaaagttaagatgtcctaaatgtcggtatctcctacacagtttcctccaagcccattttttattgaaataaaaaacaaattcctctgggaagaaggattttacaagcaatttcagagcagaattgattttggtgtgtgttaatgccgacaatctgcccagtgttaaaatgttaaagagaaaaaaaaaatacaagctgccatattcctgtgatcacaccaaaatagcagcttgtatttatattttcagtctcctcgaggtggactgcaggcacacatgaatgagtggatgtacttggtgttgtgttgtgattttatttaatgcaggcaaagtacatgcttgtgcatgcacgaccagccctcac

SEQ ID NO: 104928 - DNA, 1050 bp, Homo sapiens
gtgtgtgtgtgcatgtatgtatatatgtacatgtacgagctttatttgtgtggagagcatgtaatcattattttcccttgctgatgtaatgtagaattcgttcctctaggacatattagaacaatgtgtttaatgctcttcaatttaatttgctggtatcacaattaatacaattagggtcacttggaatgaaactattaacaaattgagtaatttactttaacaatgtcaatgtgttctcacaattacatttgctttaattagtgtacaagctattatttaatagcatacttcacatagaaaaatgtaataatgcattcttggctccttaaaaaagaaagaaggaaacttaacggactgagtgattttgtggtagagctgttagctgtaaagtgatggaggagaaagtagaaagtcagaaagcaaagtttgcaagaatgtaactaaaacattcttggtacttaccagtacatggaaaggtaaacactattgcctgaatagtattgagaacttttaatgatagttaagaaggggaacatacatcctggaaatttttaatagagtttagttgtaatactgcaataataattcaatttctgaacatcataaagtaggtcattcctaacttatcacccttatggagaggaatgtaatggtgcagaattttaaaaggtgggaaacaaaaagttataattctcaaatgggcttttgttttattttctaatgtaggtatttctgacctaagaatttactaatagcctatgaaaaagctctgcagaaggagatggtgagcaagcttttccactcctgtggttacttcttctatctggcctactctgttgaggtcagaagacccaaggaagaataagttgttatatttctatttctttatatgtagagtaagcagaaggtgatgtgctgtcaaccaagtcataattaataagatctgctgttctctgtaaacagaaaagcaagatttactatcatgttatcaagtggcaacttaatgtgaaaaggagataaaagcaatccagagaattcagtactcta

SEQ ID NO: 104929 - DNA, 1050 bp, Homo sapiens
gttgctgaataactttggaagtattttcatagagaagtgattgccatcaggtatgcttgttttctactgatatatgaattttgtttgtttgtttgtttgtttttgagaccgagtctcgctttgttgcccatccttagtgcagtagtgtgatcttggctcattgcaacctccgcctcctggattcaagctattctcctgcctcagcctccagagtagctgggactacaggcacgtgccaccatgcccggctgattttttgcgtttttaatagagatggggtttcaccatgttagccttggatggtctcgatctcctgaccttgtgatccacccaccttggcctcccaaaatgttgggattacaggcatgagccaccatgcctggcctgctatatgaaattttaacaactttgattagaatatggcttatacagagtactatatgttttagatcttagccaacttacattttaatcattgttttataaaatttaaaagaagtaaaagaaaaatcagacaagattgtaaacttgtcagtcaaattccttacatcttattctgagaagagtgaggaagtataattgagatttcatagatgtctcattgcacatactgcaataaacagaattatatcatgaaatcaactatcctcatgtgcagtgtgatcaggatgttactatggtaacatttccatttgtgaatttttgtgtagttagaatctgtagtcatcacatcatgctaccattggcttttgatttttcatctaaataaatcactgtgctacctgcatgctattaagtggcaccatgtatagtacttaactatcatctatacactctaggctaggaaatcaaaaataggaaaaagaaagaaatgggaacattctgctaaattacattttaagactgtcctgatgttgctggtaaaattttaaatgtttcttaagagaagtaaaagcattgctagttattctctgagatgctttaatttttataagtatatgatgatgaaattggttaggtatggtaacagtaggaggtaaggagggcttt

SEQ ID NO: 104930 - DNA, 1035 bp, Homo sapiens
ttttcagctctaaatagctattgtgtacatatggtaaggtactgctgcttaacaattagtaactgctttgatgaagctaaattacatgtttaagttcccatcaggaagtcgcttcacatatctgtattaatgtattcaaggatcgagaaggaaagttaattttccagcttaaatatttaattcaagcttaaaatttagtctgtaattagagctcccaaatggcaggaacatggagtatttgtccattttaattagattgttgtttacctattaattatatatcatatcttgtcatatagttttgatggtaacagatggtgctaggagttagtaagggtttgaacaaaataagattccacatgatttattaagttgcactttattagtgagtggtctgctttagtcaggttattctcccaaataaggactgtgaaacatttcactaattttggtaattattcttttgtggactcttaagaaatattgagcataaaaagtctgagatgagagatgtctatttagaaacaaaatgatttacttgaggcatctttatatttaaggaatatgtattaccaaatcatataattggtatgaagtttagtgtattttggtaggacaatgttagggaagcaaaatgtcatttattggtaaaaatgtaggcatagggaatgttttatgtatgtatacaaaattatgatttaggataggaaaataataagatggtgatttagttatgtatatcaaagacattcctttcctgacttttgaatttaacagaaggactaggttcttgtttaccaaaatattctaagagcaatctctagtgtctagtgaagttgaacaacagaatttccatattcaaaaagtaaatgtcaactaaatagaaaggccttctaagtttgtttattcaagattttattaatttttctggttaccttctcagctttctaaaaggaataaattttatttatgtatatatgcatatatttgtgaagggatacagacagtaaaacagaggagaggaaaagggagaaa

SEQ ID NO: 104931 - DNA, 1050 bp, Homo sapiens
gctctgtttcatatgcagggtggataaaaattacttaactttttatatttatgtaaatttatttaaaattaaattcaaatttactaccatatgcctcatgggctaaacataatataggctattataatcatttatataaattggttttaaaaaccagttcaatatgttgaatcaatatgtcatgaatttcatatctatatagttgcatcctagtaaattccatgacatgtacttttatagcatacagattttaaataaaattgaatagacttttctagcctacattatggaggaacttctgttatcatccagtcgactgatttaatattagaaaagaaccatgatgcttaaatgtgaaccagccagattttgtatgtctatcaaatcttttaggattgggtttttatctttcagtgatatttgctgattattctctgtttgcagatttttagatgatgtaggataacatgaaaataaatatttacttcaagaggttattcagagagtgcccttgttctctttttgtgggtatttgccagtgtatggctacaaatctttatgaaacattagggtaattacaaggcatctttaaacccatatacctgtgtattttgtcaattaatgaagagtaaaagcacatcttatgtggtatgcagggcagatccgtgacttttttgaaattaaaatgcatcaacattcagatagttgtggagcagtagtttattaggaataccaaatgctgtatagctacatgagtaaacatttaaacatgagtaaaacttgggcaattttaagatcgaaagaagagataaaaggaaatattgggagaagaaaataggcaatatataatgttatatgttaatattatatatgttatccttgagcaaaaacctagaacaatagtaatgaattataaaatattaaatatgttgcctattgccaatacagaacaaaaagttcctttttattcttaaaagatcttcttaagatttaaattttaattacttaaattctggtaaaaatttcaaataagggagatttagtataatc

SEQ ID NO: 104932 - DNA, 1049 bp, Homo sapiens
tagataattgggccctatgaatagaaatacagtgttgaaaaactacctggattttaaataaatggccatatttatccattttgttttagaaatcttctatgatattgtctcagggaccacctgcagcaggagcccacaaattgaataaatgcaacataaggagaggattttttttttctgttgttgcttgtttcaaaaatgctactatccagattctctattaaggtacattgtgctattttaaatattatagttataactgaattaagaccttctttctagattaaaattatccagtgcttagaattgaccgaaatctgtactttactgcctcacttcttggctgttcttacttccttcatgctcttaaaacctccatcacctctcaacccccatcatttttttaagattgaggtgtatttcttgtagagatcaatttaaaagcaatacaatcttaaacacgtgtacgtgtttcctttttcttcatcaaaatgtaaaaattctaggaggattggatattaaaatccaagaataggcaatttaagggatggctaagagtatcaaaataaatgaggaaaaataaagagttctattcttagtaactgaacattttggaatttgtcagtaatggaactttgaggaaaaatttcttgcataaagcacttgatgggaaaaatatattaacctaaaatatttgcatattcattatgtttacaaagccaagaatttaatttctaaatgtatatcaatttttgaatgaaattgaagtaccagtgatgttgatattcaccatacatttagtttaaatgttgcttatatttttagagaatttgcattattttcttttagttcattctctgtcttatttacattcatagtttgttggtacatattaccctccaaagtaaattctgaactgagtacagaccttgcaagaaaagttaatgtccttttcttatgttctcatgacataaagaacgaatcctccccatcatagggataaccttactaataattcccagccaggcaggttatttcctgctgttcat

SEQ ID NO: 104933 - DNA, 1069 bp, Homo sapiens
gtgtgtgtatttttaaaaataggtacaatacttgttagattttttttctcattgtaatattttatagcatttaggaaatataaaaatatagtgtataatttatatggatactgacctaaacctgagagagtagtaataagagctaatgcagatgtgaaaaaatacgaaagtgaatataattgatatataaagcataaaaagcacgtgacagtgtttttcttttaatcttgtatgggcatttactttgcatgctgtatggactcaggactttttaaaaggaaaatgtccagctttttcttttagtgaaacaaaacagtaagaaattatatgtttaaaagtttttgtttcctcagatatttagttttcgtctctcatttatatcctaacatagcccctctctctctctctctctcaaaaaaaaaaacccagaatatttaaaaattgttcttccttgcagtacattctaagaccccgcttgtttaacaatgttgggtaaagtttttgcaagcactctctttatgggcctgtgttctccttttttgagttattccttctgtactggaactctcttatatagtcattccattttatttgactttagttaatttcctcaggtgtatttatagattttgttagtgtagtataattttcagtctctgctctttgttcttcccttccttttcaagattttaaactattatgtattcacagagaactctaaaatctatagctctacttttaacctcatttttatgtttccatccctctgtcccctcacagtgaatgtctggaactggaagcatcgtcttgccactgtctgtccgctccagtcagatccagccattctttgttccctcctgttatccttcagactctttatcttagatctaagaattcctagtcttgttctctcttacccattatatctcattagtcaatgtattgtcttagtagtttttgctcctgccagttctataccattctcaaaagcctagatgactcctctgcagccttattcctggaatactttagaagtctcttaatttgtaccctgctgtcctcaaatctg

SEQ ID NO: 104934 - DNA, 1052 bp, Homo sapiens
tatatttatcttcagagaatatgcagatacaaattaggtaccttgtaagctttctaagcaactgtcagaaaatgactaccacaacttccccagtgaccccgtttaatagttaagactcttaaataaaatcttgctcatggccatgctttagaccaagagtgttttgttttgttttgttttgttttgaataaattaaaattttcacccaaaaatgaagtcatcataaatcctgcaaccataatcttgcactagtttccaggactaatcatgacagtaatttgtaagatcagaattatgagtgggatttcctgttttctcgtgtatttttgtctcccaaatatccattatgaaaataaatcacttttaaaaatgacttgatgtcctttacaaaaatattgtagttttcggatgataaagtttaggaatatatttccacatcacttagattagattctgagtcattttaatatctttcttaagaagtaattaaaatgtgtagttttttgaatgtgcagaaggaaacttcaacttttgtagcctgcagtggaagtagtctagaagaaattatggattgttgtcagtacttactcattaatatttgttatgtgccaggcactgtgctagttgctagtttactgtgattttagtttgaagaatgatattagattaagtaggttttacttataatagttgaaatatacttgggaataaatagtgtatcaagattgcctattaaaataattccgtgtattctgggtgacgttaagtgctatgaagtaggacttctcttacatagtaattggttgacattctttgacctcagtgtaagactgaagtatttaatcaacaaacacagaggataaagttttgataaataaaccactttctttaaacctttagaaataaacttgaagtcttttggcattagattgatgggctttccttttgtgaaagagtaagtgaataatttaagcttataattcatgtttgcaggtcctcatcctgtcataggaataatagtcttgaaaattggagctctggaattcaccatt

SEQ ID NO: 104935 - DNA, 1028 bp, Homo sapiens
cttactgttactctgtatgccgtcttttctgtctggctaccagcaggagtttctgtttccatatcattttggcttgcattgttaactttcctacctcagcaactaaggcagaagggaggtttctccatagatgattcaaattgtttgagaggcacagaaaatttgagcagcccttcctttcaaatgaaccaggttctgaaggttctggtttactgatgaccctgagcctggtgccaacccaatgtccgatttattgttgctggtgtggtatacagctagcagccatggctcagagactggattcagggcagcttctttgagagagtgattgtgatcgctagtttcaataaagtatgctggtctataggagttgagaaaattgctcctttaatctgaaagatgttctaggcaaaggctactgagtgaatacaggagtacactgcttcatttgctgcataatagctgtattagtgtcctaaggttgcggtaacaaagtactacagactgtatggcttaaaaacagaaatgtattttcttttctgggggctgaaagtatgaaatcaaagtgtcagcagggttggttccttctgagagtgagaatacgtggttctttatttaaatgtctgtatcacttcttggccttttggctaagatcaagtgtatttaaatgtctctttttagtgcaagttgagtatttcttatccaaaatgcttgggatgagaagtattttggaattcggattttttttctgattttggaatatttgttccaatgagcatttcttttgagcatcacatcagcgttcaaaaagtttcagattttgtagtatttcagattttcggattagggatcctcaacctattgcaggtttaatgaagatgattgttttctcattattaggattatggttatatatagtatttggatgccacgatgtgaatatggttaatgaaagtggaagtttatagaatttatattggtgggtttcattttttaatttaatttaatttaatttaattattattata

SEQ ID NO: 104936 - DNA, 1025 bp, Homo sapiens
agataggtgttgagagtttaaaatctacaggaaggaaagtagatacagagatgtaaagtctctaaagaggcagaatgactaatggacttggaagccttggccactttcctgattgactatattgatgcagctaaagaaagaatttgtccggccggacatggtggctcacgcctgtaatcccagcactttgggaggccgaggcgggcagatcacgaggtcagcagatcgagaccatcctggccaacatggtgaaaccctgtctttactaaaatacaaaaaattagccgggcatggtggcacatgcctctagtcccagctactcgggagactgaggcagggggaattgcttgaacctggaaggtggaggttgcagtgagccgagattgcgccactgcactccagcctcgcgacagagtgagactctgtccccccgcaaaaaaaaaaaaaaaaaaaagaaagaatttgtccattgagggtggagagtggattggctgccatccaaggaagggcccaaaggttgaagttggtagtacttaccccagcttttgttgggagatttttaatattctggtttctacctctctgtatatagagatatacgcagggagttgcaggtggatgctccaggttttttgtttgtttgttttgttttttttggtggtggaatagtgattaaaagatagacttcagcagacaaggttcaaattcgggccttttttacttgctacttgtgtgtccttgggcaagtttctatcaatctccagtttttagtcagtgtggctgaaggctagacctggaacctattaaattcataggataatgactttcccatgacacctttggagagccagccatcctgtcgctccttgacaaatctgtacctcattccatcagcagtgtgggcctaggtgcttgaactattccattcgaatgcgcattttatatatatatatattcatctgtatgtttgatgataaataaaatatctagttcatcattttctagcgaaaaaacatatgaaagtg

SEQ ID NO: 104937 - DNA, 1069 bp, Homo sapiens
ttagtaattctgtatagcttgttatacacctcaagagatttagttgagtttaatttcaggttatgggatactagtaattcaaatataagctatagcacagagtataaaatcaaacagtaaaaaaatcaaactagaattttgaaaatctaagcgggtattaagttatggaaatgtttattgaaacacttttcttccctccctgtagccacccccccattcctctagtgcttttatttcctcctttctcagctcatacacatttctttccctatgctctgaatatgtgggagatttaagatatatatatatatcttaaatatatatatatatttttaagtgaaatgcctttatatatatttttaagtgaaattaaaaatatatatatatttagtggaatgcctttattagattacagggagaattaaatcatatgtagaatgttgttacttttaatagaatataacacagtcaaaggtcaaggttttagtaaatggggacctgtttgaaataaaagtcagtggttgtttatggttttattaaatgcgttaatcttaaaatacaaattaaatattcctggagacaacatgtatcatttcataagtgtttgaaaaaaaaatcagactaatcagttgttagagggttcttccacaaaaaggttttgtcttttgaaagacaaaaacttaatacttgttataaacttactattttggaattattaaaaataattttcctggctgggcaccgtggctcatgcttgtaatcccagcactatgggaggttgaggcgggtagatagcttgagcccacgagtttgagaccagcctgggcaacatggcgaaactccatcactacaaaaaatacaaaaattagccaggtgcggtggtgcatgcttgtagtcccagctacttggaagactgaggttggaggatcacttgagcctgggaggtcaaggctgcagccatgattgtgccactgctctccagtctggactcccgtctcattaaaaaaagaaaaaagaaaaagaaaaaaaattttttcttagtggattcttcaatcctaccttataacaa

SEQ ID NO: 104938 - DNA, 1108 bp, Homo sapiens
tcttttcattaaaccattcaaattttaaaaattagagtttttacaccaaaaacatatagatagtaagtttctgctgtatactagtattttgcttcataaaacatggttgggattctttattctatgttcacgtattttcatttaaattcaacattcattttcaagagtagtttcaggataaaattaaatatatgctatattttttcactcaaatgaactcattttccccaccttgtgaccttattttcttgagtgtaccacttagaccatctctatcacttcatctccccaacttccatcttttattgtttactgtactttctatgttatattgaatcttgtatacacaaacaaagtttatgaaaagctcaaacccagtgcaggaaggtcctagaaaaaaaagtataattatgttattgtatgaactttaaaaatgttgtctaggaacctaaaactgcttaacagatgtgattgcttcatagtttcaaatttatgccaatcagagttgataggatttgatcacactctagtagatttatgagataaattacaatattgcatgacatacttcagatagaaaaacatcaatataagttggatatcatttctcatttaagataacaaggtagtaatttttttgaaatcagatggttgctactttgagagaatatttatcagtttttatggaaattaatatctctcatattttcttcatggtgacaaaaagtatattaaacttttgttttcatgtacaaatttaattgtaaatgagaggcatcttgtttctatttcgcaatagatgacctgtcaaattttcaaaggcatataaagaaatggagttggacttaaaagaaatttggctgcaggaaaggttaacacaagatggaaaaacttgtacttgtggtactgaatttctttacggtttcaattgatatgtccaaagtcttactaggatttttttttttcaaatatgtagaagtttaacacctcacataacaaagaaaatggaaaagaacttaactcactaatgaagtgacaggttcccccagggaagtcagagtcaaggaattgggagtcaggctctcaagcctgtttgttctcatagcaa

SEQ ID NO: 104939 - DNA, 1011 bp, Homo sapiens
ttattctggtcttgtttccaataatctattataaaacatctctgtaacttcttgtattacatttctttacctgttccatttaccttctgttttaggagggtgtggtctctgttgcattatacaaacttcatgtatgtatgccttgacagtgtggcaggaattctgggatagatagtagtcacactgtcccacattttagcaatctcctcagagattggatacctttactttgttcatatccgtggatcccaactcattgtttttttttttttctgtaactttttcattatatggaaataggccctaggaaaggttgaaataactctattttactctcagacttgattaatggtttggatatagaattctagattgtagataattttattttagatattaaaggcttcatttcacaacattcagtgttactactgagaaatccattgccacttttttttgtccaccactttttttttcctggctatatatggcttgttcttaatattctagaaggctttaggatcatttctttatctctgaaattctatgataatatgtcttagaatgggttttattcatttttttaaatgaatcttcagaggacccttttaagagcaaatgtctttcagtttgggatgttatcttgaattattttcttttcctgtttttttttttttttttttttatccctctttttccctcagttctcttagttggagattcagcaccagtgtagaagggggatgtgtgaggttgagtcattgcctgattgtgggcagaatgatttgcttcttagtgtcttttctgatgtgttctgttatgagtaacttcttttgataagttattcatctgttttccaaaaatttgtgatcttctttctgtttttctctccacttccacttttttgtccttgtgaaatacaccttaaaaaattattaactgctattttagtagggttttgggagggagaagaagcaatttcatgtggttaatctgtgtttggtgaaccag

SEQ ID NO: 104940 - DNA, 2056 bp, Homo sapiens
aatcattgtagctttgtaggttgtgatatgtttgggtgacttattatttaggttattttgcagaattatttatttgctgttttatttatgtatttcattatttatttatttgattatttagtaaattatttatctgatgaattattaatacatcttcacgacatcctttaaattatttataagttaattttgagtttattgcttttagacgctgcattgttactgactagttttgatttttttctttgtggttcttgaaaattaaagtatcagctctaaggcaaaagtatagtcattgcaatgctcatggattttttttaaatttatggcagagataaaatttcagctttttttagctttaaatttacctatttagagttaccagtggtagaatgtttgtgtattatgtgcatactcattttagagtcacttacaaattaatgatatagcctatcatttataaacagtgattgaacatgtaaacctcagtctgcattaccctttgtgtctttaaagaacagatctgcattttttacttgttttaaaatgaataagtcttggttattttattttaatggcaaatctgttctactactggaatgtttttaggacagttcagagaaatgaagtccaactcagatttggattcttgacgaataaatttgactgctgtaatctttgtttttttaaatccaccttatatttgtattgggaaaacatcaggctgtttatataaatctttctatataaattgtgtatgtcagtcataatgacatatttcttatggaaatttttatatttaatgaatgaaaatggacaaagagctttataaatgcaagctgtagtttctttgacttagttaataattctcttgtgtgaagtttctatttttaatcaaatttaagatcatttctgattctatttcgtaacatagagcagttattagggctctcttattgaaagggtttaatgaataggttaaagtagtcattcgggtgagtgccatatgcacaacatggtctttattttgtgtttgcttgcagtgaattagtatgtactttacagttttcacacttcagagagaaactgcattgtacatttcaagttgagatgctactgaaatatagtgaaaatggcctctgtagacaggtttcactataaaattgtaaattatgcatacatatatccaaatttcttattttgaaatattgaatatatgaatatttaattggaatgttcctttagtatcttcatatgcttgccttaaaggaagtgttttcctttgatttatatacatggatttagaaatgtgtgtgtcatacatatctgtgtcttttctggagatgaacaaccacagatactattagatatggcattttctttttaaatgtgcttcagtaatgccaatgtggtcttcttttgaaaaaaaaagaaagaaagaaaaaaaagcttccttctccagtattgaataatctacccagcccctattattaacatatatttggggagtgctagctgtgtcatctaagtgatctttccttggaagatacacagatatgtgcacagacacacatgcacatgtgaaattttcttatgacatcaaaataactttttaggacttgtttttgaaaagagacattaatgtagacttttataataatacttagcattgttgatttcttatgtgcagatacagagctcatatcttttacatggattattcgttgatcttcacagtgatataactactgttcattttcgagttgaagaaatagagacttagagatgttaagtagcttgctgattgccacacagctgaaagtggtggggctcgcattaggactcatttactctgactcaaaggcctttctgtgtagcccattacagttttgtacacatagatagtactccgtagtttttaaccaaagttgttttactttttttagagagtactggtattttcctctaaatatttaacttgcaaagtatattcgttttgtataacatttagtcatctttcttaaacagcagacaagtacttgagcctcttgaattt

SEQ ID NO: 104941 - DNA, 1037 bp, Homo sapiens
agttactactattgtttgttaagtagagtttattcatgtatctcttcagtgctgtagtttgacctttctgcaaaaccaaagggatttttgtggataatcatgtcttcacattctgtaatactgttaagaaaactgaggttaaacaaaagaaatctagatttttaagtttatctaatagtccatttaaaaaaataatactggacaaaatgggcttttctagttatgattgcttatgggaaataaataatatgctaacaggttttactgggtgatttttgtggtgctctgctgagaaacctttcatttttcagatactaaataacgttctagatttgtagtggaaaaatacataacactgcagcttctccttagtggtttgtcagtgtgtatggtgaccagtgttattagttgatggtaagctttcatttgaaacattgtagttttttttgtcttaaatagccattatcctttataaaaaagtttatttaagaaactataaattattgcagtattgagaggatcaatgaaaactttggtggaagcaaatcttttttgtaatttagttgattttatttttaaaatttcaatacttgatgataccaaggaattattgatattgttgagataatgacattgggattatgtaagaagaatttgtactttttgtgtgttttcggtatgtagtggtgaaataggtctgggacagttgaataactatagcaaaatttgattatttttgagtctgggtcatctgtctatagggttttttaattctatttttacttattttgtatatatttattaaatggtattataaaaatcaattagagattaccatgggctggaggaggagcattggggaatgattgtttaattggtgcagagtttctgtttggaatgatgaaagttctgaaaatagacagtggtaatgatggtacagcattgtgaatatacttaacattgatttgtacagttaaaaatggttacaatggtaaattattttattttatttttttgagttggagtctccctctgtc

SEQ ID NO: 104942 - DNA, 1199 bp, Homo sapiens
ttcaggtaaatcttcagtttactgcctgctgtcttaaccttgaattatgcattcagtggcatcaaatgagtgcatggttacaagaccatgacatgcatatatttgcttaattaaaagacatgttgaataggaatactagtagatgtcatgagatacagcagtcgtcacgatgagctgcttagcagataggccttaggaagccaatatgtcagttttctaccttttcttttaaaatatttcaaggaggccatttttgggagaacaggccatgcttctttccactatacatattgcagttgaagaattttctctctaatcgtttcagtttgagaagggaaggaaagtcatgccatcctctggcctcactcctggtaacataagaaacaaaaccctccttggctagatctaaaaattacataattaaaaaaaaaactatacttccattttcatccaactaatttatttaaaatttccgagaaatgtctttgtcttagatcaagttccctaaatgcagagcctaggatggggagtcaggtgatcatgatttggtaagggccctgggaagaaaggaggaggatagggaagcgaaagaggtcccataaggatatggtctcaggcaaaatctagccccagattgatggagggagcaagaagaatggggatgactgtctctagagagtaaattgaagggtagagtaagttgtccattttcagaaacaggggcagagactttgtgccactgggtcagccagtcactggccacccggggtgaggaggtcaatgaagaagtgtagagttggtttcaagacattttttgagagcagagtgcaggtgagaggtattagcaggcagcagaacagctgaggggtagctgccttggctggtgggggtctggatcagacacccttactcttccccttcactccattgtttagtgtccatcatggcagccaaggtgaagactcgagatgactggaaaatatattcttcatgatcattcagttcttgatagataacctcagggtaaaaaaactgggccttggaaacatcagagaggtgcagattttggcagtcattggacatttccttctctcttagcccaagaaacctattaaattcttgcctgacaaatcatatgctcccactgcagcaggcggaaaaataggactccagtgtctctctttggagagttctttcat

SEQ ID NO: 104943 - DNA, 1001 bp, Homo sapiens
taacaaatagatcttaaaagtccagtagaggaaatgaggttacagtaactaagtagtattctcaagaaagtatggtaaagagctattaaaaaagggtcatagacagttcaaaagcaactggtctgttttcccagccccctgctaattcatcttgttctgttatttattatttttcctgttttaaatattgtccccttttcaaatccaagccagtatttctcttcatcaatgaagaattccttgacaaccctacctcaactcttcttctccatgtggatccacttgatgtctgcccatcaatgacctttatcacatgctatcttgcactaatagttatttttgaattccaggttttcccaaatgtgcttggagacatttaaggcaagtgctttcagtaaagtttataagaccttttggtagttaccatggagcaggcattgggctgaatgtattctgtttcacttgtactggctactatcctgtgagattaataccattattatctacagtttgtagaggaagaatcttgaggctcagaaacattattcaagttcacatagataaatgcctatatgagatataatcattttattggcatacagaagtgcttgagcgtgtcttgaaagacaagtagtatttgaatgggcaccaaaaaaaaaaataggagaaagggctttcccattagagagaattgtataaggaatggagaatagaatgtagggcagtgctcagcaatagctaataaatagcccaacagatttggacatcagtgtcattgggaggaacctcgaaaacagcccctgagagggtgaacttttctcctaccttgggaagccactgaaggtcatggtgcacagtagggtaactatgggcagtttgaaagtggaagactaatgtaaagattctcactctgggatctgatttacaaggatatcacaaacatggttaagaggattcaagaaagcttaattaaacccgtttctttacctatcagtaagttt

SEQ ID NO: 104944 - DNA, 1443 bp, Homo sapiens
tccactgctaacctgctgtgtagtcccaggcaagccgtttaacctctcagacattgaacttccccttcaggaaagtaaaatagattaggtcatattatatctaacgtcccttaaagttctaggtctgtgtgtttgtgactgaaacaggtacacaagtattacagaggatgctattttgattgaagacactgctgacaggtgttctagtctgggaaacaaaaggtaagagtttggataatggaagggcttagtttggggggtaggcggaaaagtgatattttggggtctagagccaagaagggttatttacaggtggcatataatgggttgaattgattgttggaatccagtatatgaactccatattacatggtgtgagttgagctcatgattgatatacacttttcatctgagacttgttgatagatgactgggaactctccctattatcatacagagacctagcagcatcagtacagtatagagtatgagatgagccgaattccattggggaatgggcttggtttaatatgtggtagggtggtgattgctagcatgatatgatttgaaggttgctaaagactttcctctttaaatatgtctcttttttgtttgcttttcaattgatgcctgaaggtccacccttagctgctcttttgattgattgattgattgattgattgattgattgatggaagtttttttctggcacattaaaaactttaatagcacattaaacgggaaagcagggcaatgtgagaatactcgattgatgagaaatcacagatttggaagagattagggagatagggagtaaatacaaaggaaaaggaagcagggagtgacagctcatttgagagaataccttgaaaaaaaaaaagaataccttgaaatccatttttgcaagtttataaattggtacctgtagcatttaatagctgctgagatgtgtccatccccaaatgtcgcgtttaaatgtttacccattttacttatggtaccaacaggagtgctgcttgtcatgggtgttacttgactggtttactgatgaagtatttggttgtttaaatgaaatgcagattaggtaaaaataaattactttcaacaaggtcaaggaagtgaaggttgtaaataaaatatacattcacaaacagacaaatgctatttggaaatctagcttagtccatgccaagctgttactgtctaaattaccttctttcttcctggcttgcaattaatttttgcttctatgtttggagattgggggaagggtaatagcctaatgggtaatgattttattttagtattttgattaaagagactaaatagcttggaccctggataaccataaggacgaaagccttatccatcaagcttaatttctaaacagaagtttatgcttgtatttctgagcaaattagcattgagccacatataatataa

SEQ ID NO: 104945 - DNA, 1119 bp, Homo sapiens
cctgggctataggctctgggccagacctggttgctgcaaacattttcacaacttacatgctctaattcaacaaataagaatatcttgcacctgataatgattcacaccctaacttgataaaagctattctgaaagcagctgaatacattaattcattgaatcctcataccaacctttccctagaagaaaaatgagaaaaccaagtttaaggttgagtcagagttttcaaatcctctgctaagtctcttgctccttcctctacttcaagccacctcctcagaataaaagcaaacttattttagaaagggaaaagtgaaacttggagatctttttgtttgtcatagaggatgggaggttttcttgttagaatgggaagaggagcatgtgctaaagcattgtcctaatgaaataacttgtttgacaaattatccagttgggaaaactagacaatggcatttctgggattgtggggagaacagccccttttaaactttggtctcatgaaaatatctgggagaacccagtcctcccagcttccttggtcttaaggtttcttttcactataagctttgcagattttcctgatgagtttattagaggaatttttatgaacaataataattcatgattattatctgagaattgtatattttacagaattttaagtgatgatttctaccgtaagggtatactttttaaaatttgatttgtgcattttatggtgtgtgacttttggagttaaattaatttagcagtttgtttccatgaagactgtttgaaagcatataattactgagttacagcttttacatgaattacacaaaagtctttttttcttcattttttacatctctttatgtaattcttcattttttacatctctttatgtaattacctaaagaattactaaaggtatgctatttcataacaatgctttagaaaatttatgaagttaatataaacagtatatgattaatctggtagttgcactattttgtctctttacaagaaatccctctacgatataatgaaacataggttcatcttgatttcaggttcagttacaggcaggaacttaacacttggtaaaagttttatttcttatgaatcccttgaaga

SEQ ID NO: 104946 - DNA, 1031 bp, Homo sapiens
gaatgaggaactctttatgtataaaaaatatgacttctaagtatggttaaagagaaaagataaactatgacttctaggaatgataaaaaagaaaaaatatacgaaatgaaataaaataatttggtttggtactttttctgtagtgtttagtgttaatacacacacttttattagttaactttgctcctgaagtcaccactgacagggctctgagcagagaattactttacttatcacttaatctgcaatactaataaaagaatggcttacttaagaccaatatgaacttcaacattgaactgctttaaaaaaaaaaaaaaacatctagccagatatttgactttgtggttccttaatacagcttttgttttctaatttttctaggactctggttttatttattttccaaatgtgatttgggtgtccttactcatcaagctttttcttgagctaaagttataccaattcttattaagtgatatttcttttcatatgctgttaagatactataggataactttcctgtatgtatgcttaaaggctttatctgctgataagttgggatagaatatatgtttaatttatttttgcctgaattattggttaactggttgtgccacccttagctgtatttgtttgttctgaagaggagctgagaccaagcccatagctagggtattcagccaatgatgaaaatatacagtatatacatactgtagattcttagtgaaactctttcaaataaaacatttctattactgcagtattactggccatctaaccaaactccaaaatgactaactgatatgtgtatgtgtgtgtaattttattttgctgctgcaatataaatctttaaattattaatattattataatggagatcactaccagtttgttcacattcttccctttaaccatgattaaatgaattaaattttaagaaatcttaaggtattaaaggtattatcaatgcaaaattagtactttagatttggaaaaacacgttatagagcacttgaattagtgctgtc

SEQ ID NO: 104947 - DNA, 1058 bp, Homo sapiens
gagtggagaagaaaagggaaggatcactgctggccaggcaaagcaaggcagcaggctcaccctgtgcctttcatttcttgcagggcttgctttcagaaatcctccgaaaggaagaggaccccaagactgcatcccagtctttgctggtaaaccttcgggctatgcagaatttcttgcagttaccggaagctgaaagagaccgaatataccaggacgaaagggaaaggagcttgaatgctgcctcggccatgggtcctgcccccctcatcagcacaccacccagccgtcctccccaggtgcggtctccttttcctccttgcccttctttgtttagcttttttttaatgcttgaggaagaatctcaataagaaattagatagatagatacatagatttatatgtttttaaattcgtatagttgcttgaggagaatttggtcccaaatcattaattctgatataaaaacaataagctcctaattagatagagggaagaaaattgctttgtgttccttcattctttgggttatttgggggtgaaagtagtctttaaatgggatatttgtctctactgttgttattaagtaaagtattttaaactcaatagaaaaagaataaagtcagttttttcccaactggtttcagaatcgccatttgaatagtaaataaataaaaataaataatttcatttgtatttatactttccagtacgaactgcagctggtaccaattacacaccatctcatttgtaatctttcataattaagtttaataaaatccttgaaggcagctttaaatggggctgataaggaattctatccatactccaagatacgggcatgttttctctttcttaaaatttttggactttttaggaaagaaagttgccttccgggtaactttgggtatgtgaatctgtattgttttttaaactaagttttaaaagtaacctcataactgttataattcagtaaatcaatttgcattacaaacccttagataaaagtttgctagttagtgtattagactcaaaaaccacaagcaaatatattatctttt

SEQ ID NO: 104948 - DNA, 1229 bp, Homo sapiens
cgctagatgccctcgttgggggtgcgaggctgtggggaaaagtttaaggtttgttaatattagtcgcgattgttggcgaggggggtgggggtgattggaagggaggcgaggtggccttcccaatgcgcgttattcggggttattgaagaataatattgcaagtgacagccagaagtagactttctgtcctcacaccgaagaacccgagtgagcaggagggagggagagacgcgaagagaccttttttcctttttggagaccttgtccgcagtgatttttttttttttaagagaatcctcagtcaccacgtcgtttccccagcaccatcacagtgtacagctcataacgggttttgctttgtttttacgatttccccccaacgaatcacttgtcagatcaattttatcttcttcctcctccctgcttcccactctcccctcctccccatcgcaaaccctgttctctgaggttagacattttacaaacccctatatgttggttttcgaattgtgattttttttttaaacccctttctcatggctactcttctagacgtttatttctgcccttcccccgcttaggggggcgggggtaggggaaaggaaaataatacaatttcaggggaagtcgccttcaggtctgctgcttttttatttttttttttttaattaaaaaaaaaaaggacatagaaaacatcagtcttgaacttctcttcaagaacccgggctgcaaaggaaatctcctttgtttttgttatttatgtgctgtcaagttttgaagtggtgagtttcaggtcggttttgctaatttcactcagtaaaactgcagtgtttctgtttctagatagtactttgcttctttgtctctttaaaaggtcacagtgaaagcttggcctggatcgtgccggccatatggaatggataagggcacaatcttaaaatgtgattatggggttgtgtgggggcgaaggaggcgatccagctagaaactcattgaaaaggatctcgctttgcaaaaaatcggttcctaaaaaactagaatttcgagattttctttccttttaaaggaaataattgttgttactgagttcactgttttattcagtaattatcatatatggtcttagtttatgggcagataaatgggattttcagaaagtagcttgctttctgtgtggcaaccagacattgcactaaaatgggttgtaacgtgtaactcaaaagaaactc

SEQ ID NO: 104949 - DNA, 1006 bp, Homo sapiens
ggttgttggcagtagcatgggaggaagactagaggcaggaagaatactttggaaaagtgggcaagagatgactgaaaccgaacaaaacagtagcaaatataataaagtggaggggtaacttggagctttctggtagattcagttaggactgaattactgccccactctttctgctgaagaaatgagtgtcccttcacccagccacaattcatagcagccttgtttactcacctgcagctctttccccactcccaccccaatatgtatatgtgtgtgtgtgtgtgtgtgtgtgtgtgtgtgtgtgtatacatgtatgtattttctctggactaatttctaaaaactggcaagcctgttattttatcattaagtagcactgagacaatggttgtagagaacaagactcatcagacttaatgtgaactaggaggaacacctggaaatgtttaggtcacataaccctgatgctcttaacccttgggatattatgttattgttgctataatttcaaaaagtaaagatgttatgtatttatcattaaaaatttattcaaaatcctgcttgatattagaaacaagagaacatcaaatgtgtccatatctcactttgacctattgtgttatattgagcaatgcactatttcccatcatgacagcacagtcattaaagagagtgggaccactcacaactcagttttccttatacctgcacctccttgtattaagttattaaaccatgaacccatactagaaacattattattagttagctattatgagtttttatctattgacaaatatattttagtgctgtctggaaagcatatgagttctctaataattataaatattagcaaaaattagtacagctactatgaagaaaagtatggaatggtcttcaaaaacccacagataaaacttccatataatccagcaattccattaccatgtatatatcccaaagaaaggaaatcaatatattaaagagatatctgcattcctgtatt

SEQ ID NO: 104950 - DNA, 1028 bp, Homo sapiens
agtgaggcaatgcctctccctgcttcggctcatgcacggtgcgcgcacccactgacctgtgcccactgtctggcactcccaagtgagatgaacccggtacctcagatggaaatgcagaaatcacccgtcttctgtgtcgctcacgctgggagctgtagaccggagctgttcctattcggccatcttggctcctctccctgtatacatattttaaatttactaatgtattgcccacagcctgattattattgtggtttccatggaaatcagtaattttggtgctatttctttggaggaagctttgaacatttttatttacattggataatccaaaaagtgcaatgggaagtgtgaagagactcaaaatacactggagtggaacaaaagtttgggatactaaacaagaagcaactctcattcccctttttgggagaccaatagtgaacaaagagatgtccaaaattactgacttaaaaaaatatgaagacataaaaaggtcattcgatgggtacacagcaatgctgtgcacaggtaaggcagagaatgagatggcacaaccataaacatacatggaagagggtagacagaatgtcctttattgtgtataagttgtcaatagaacaaatgtctagaatacaatgggaatctagaatgtaagttggatacatctgctatgctaggcaatgatgaatcctggaagaaatagcagggaggttaacagctgtagcagccaacaaaaatattgttttcaaaaaactaaaataaaagatattagtggcaaggagacaaatgaaaagacggtattttctgttagttgctgaaacacatttctgctgtacaggatccacatcaggatccatctagtgattaacacacacttttttaaggttcctgatcagggcattgagtggatttgtgcacatttgttggagaggtgagaacacatggtcaatttcaggtaatctggatgtattctgagatgattaagagtccaagggtggttatagccatttaaatcagacgtaggg

SEQ ID NO: 104951 - DNA, 2050 bp, Homo sapiens
atatgaacattcactctacagacatggaaagcatcaataccaattaaatattcaggcttggaagccgtagcaataatacatggttatctttaattcttctctgcaaactgtgcccaaaccccattaactgaattcggacatccttccctaccatcctctcccaggactgactatgatgatgactttgggaactgtatccaaaccataaaaatgtgagaatctcaccccactgaacagatgcatccctcttgaagacctggagcccttggtcctacttctaatcatctttctccctaaagcggatgagatcagggcttgggggagggagggattaagggtgcagagggagagaatggctttgcactagtaagtaagaaatatttactttgattttgagtggcatggtggtggcatggtagctccatgaaacaaaccaccagtgttttcagtgcacacaaagccctgcatattaggcggtaatttatcgttgacagcatctgtttcagttttggggctctcttgattcaacagccacatcccgcattgcttttcagctaggatgagtgtgggtttgcatttttggttgtagtagagacttttgtttgtttttgagatggaatttcactcttgttgcccagtctggagtgcaatggcgcagtctcggctcactgcaacctcggcctcctggattcaagcgattctcctgcctcagcctcccgagtagctgggattacaggcatgtgccaccacgctggctaattttgtattttcagtagagacgggatttctccgtgttggtcaggctcccaaagtgctgggattacaggcatgagccaccgtgcctggcctgtagtagagacttttataaaggagtctgctttaatccagggcatttgcagctgtattgtcaagatcatatattttaagttctcattctgtttgaatacaagggttaagtagggaagttttccagggctgtgggtctgactgcaagaatttataattcatcgagtcagtttctcgttctccaggggattgcctccatcagcattgtaaatccagtcctgggcagtaagagcttaaatactacgcagtgactcatttatgattcctcttgggagttatttcctctcagggaagtctctctgagggggccaaagctcccttatagcaggaagaattcactgcagaaacaaacaagaaaactgggacctttgccatcatctctgaatggatttaaggttggcttgatagactgcaggagggactgagtgctaagatgtcccagctgttgacattcttccttaacgaacattgtgtgctctgccccttcatctcccaagtgaatcagccagtttctgctgagagcccttatacatttccctctgttcatactcagtgtaggtacttctgtctttaactgctgtctgaaaggaggtgagactttttccctccaccctcctccccctacttaccaggatgaatcttagtgttacttgtttcaatggggctgaccatcagattggtagcatttccctcttgcccataggagtgttatgaaaaccagaccactgtctttgaacccacctccgtgaacttgtcctgcaactatctccccaatttctccttaataacaggcaatgaaatgaagggccatttattgccaggttaaaacacagaaggtattaaaaactttgtaaggataaaaattgtagagagctgtcaaaagtacacacctattggtcatatgaaatgtcaagcccatatcatggtaataatgctctaccacggtctaaccagcgtatttgactcctcttctgtgaaaattgagacaaatttgaatttatgtgatgaagctatttcttttttcttaaactaaataatgttgcctactctgctcttgaagacaactcccattttatgttcttttgcttcctgtataacagaagggagatgggatgatagataaagacgagctgcaggaagcttgtgaccaggccaacttgagtttagatgacaagctcctggaccagctatttgactactgtga

SEQ ID NO: 104952 - DNA, 1004 bp, Homo sapiens
atgagaatggggagaaatcgtccatgaacatggagattggacatccccacgaaggaaaggatgatttaggagacaagagggtcatcatgggaacaaaatttcccatggagttggggatcagagtaggattaggaaaagaagattcccgatgcggggagagccctgtggttagtaataagtgtgagggaaggatggcaccaccagaaacaaaatttccattgagcaaggggcttgaaatgggattagaaagacagaatatttctaggactgtcatgcagaggggtagtttaggagtcgacagtgtctcagcttcacagggaacaaaaccttctctgttgccaggaagaatggggttagaaaatgagagtcttcttgcaggatatacccatgaacggataatacagcctcctttgggcagggtgtgtggaagttcacaggctgcagggagcaggagagctcctttggctagtggccctgaaggggtagaggaattagtgggaaagcctgctttcgttatggaaccaagacaggaaatggaaaaagagtctacctgtgttttaatgaaacccaacacagagattaagcttcctgtggaggtggacattggactaacccaagccgaggggccagatgagactaagaatacagagccccaaatgggcttggtgatagaacctccccaatgccagtttgcccaacaacatgaacagagaaaggaggctggaaacattgaatcaggagtggaacctccagatcgcatcagacccatatactctgggaagttttttgatcggaccccttgctggccaagtgtaagtttttttccactttccataggaactaaactgtgtatagccatgtctttattgagatgataaagtgataaaatttgttttggtttgaagagacaaatcacaaggattttatgagattcctatatttcttgccccactggaatctttgcagatgttacttagatttctgattctctgcctcccttccta

SEQ ID NO: 104953 - DNA, 2008 bp, Homo sapiens
cgccgctcccacaagggctgggcacaaaaaacaaacaaaaaaacacaagttattttgatcttcccccaaagaatagtaaaggaatttcccccgaccccggccgccaggagcccagagaccccccagcctaaataacaatggcgctggagagggcgtggccgcgcgtacctggggtgggggaaggggagaaaggcggccagttcggatctgagccactcgcagggtcacgtgacatcctgcctcgccccgccccgcgaacaaacctaggcggggagggattcgggaaggggcgaggaagcggaaggagcaggcggactggcgatgatgggaagtgacgaagtggcgcagttcgctgcgtgcagcgacgtggcggcggggccggcaccgggcagcggaagtggctccggcggtgggacttgagtgtttgtgttttggttcgtgaaggagccggcggctggccttaggggaggaggcagagggaggaggaggaggaagaattagtcggaactccagcgccggcggcggcggcggcggcggaggaggagaaaggaaagaggaagggggagcggcgagaggcggagacggagcccgacaggggcggcaccacggcacgagccccgcacagtccagtgtgaggggagcggcgctaagagcaggcgacgccgccgccgccaccaccaccgccatagatacactctcatcctacgggccacgcctgggccttgctgccaggaagcttcggccccgcagctcggcttgctgcggtctcaggtaaccgaaccgcccctcctcctgcgcagcgggggcctggaccccaggttatccgcggtccccagcctgtccgcggccctgccggtactgagaccccccaccccttctccctcacgcgcagcagtgccctggaccagagaactatcgaacccggcgtcttgttctgccagccctggtgactcatcctccaggggctctggagaccgggatttggggactgactgagggagcgacgggtgtcaccctttcccttctcaagatggcgccgtggaaagtgtactggaggccgcggttccgcctggtctccgtcctggcagtcctgggggtctcggtcaaagcaaggcaggttcgggggaggaggttggaaaggccaagggacctggcgagtgctgcttatccaggcgatctgtagttggctattagctactcaggtgctctccaagcaggaacctgggcctactgcaggtgtcaatgtggggagctccgcctatcttcaacttccaaagatgagtagtgtcggtgggtgggaggctcgtcaaaataggctgtctagagacttgttttctgtttggaaggtagtgaactacagcgttaaataaattcaagataacaggaccgctgaactccttcactgggtagagaccatggaacttgctctggcgttatcttccctggaagctgcttacctctgagactttcaaacttgttaagttctgaacgtcatagttcacatacttggtttttgtcttgcttaaatggaatcaaagcgttcaatcagttgcctttcacataataagaaaaaaacacttgtacacctctgggaatactcaagactgctcataaactttattcctaaagtaaaatggaagtgataactcagcatttgtataaacaaagtaaatggaacagtgcctggcacaaaataagtgcccagtcaattttttgatcaaagaacccttagaaggattttaactatagaatgaataacagttattttcaaaagattacaaatgtatattatgcaaaattcttgttttgcaaaacagaagtttcagtaagcagtgaatacaaatgaatgcacgtaatttttaaccttagtgttatgctaagtgtatatttaccattaactttagttatttcctgtttgagatccttagggggagtagccacaattaagtagctttaaaccttaaaagtcaaagtgaaatcagaatcttgtttgatttttttttttaat

SEQ ID NO: 104954 - DNA, 1048 bp, Homo sapiens
tcctctatttagacttttttttttttttttaagatggagtcttgctcagttgcccaggctggagtgcagtggcgcaatctcaagctcactgcaagctccacctcctgggcttacgccattctgctgcctcagcctcccaagtagctgggactacaggcgcccaccaccactcctggctaattttttgtgtgttttcagtagagacagggtttcactgtgttagccagggtggtctcgatctcctgaccttgtgatccacccgcctccgcctccaaaagtgctaggattacaggcgtgagccaccacgcccggcatacttagaccttttaaaactgtgcctgttctcttgctctttggcttctctactagaagggcggttgtggctgttctgtatatatcagtgatgaaatagttttcttttttgatgacgtagatggaatccatgtattcttgcatcattaggtattaagttgggcatgttacatttgtaattttatttaattcttaggacaacgatgtgagatgtagtatccattactctttccaaaattgttgccttcccagcacaagagtggcagagaaaacacttaaattacagtcagaagtggccctgtcacataacagttcagaggaacctcagttgtttctttgtccaatgggaaagatcattggttacccctcacaacagctatgaggatcaaaagtaataatatatgtaaactgtaaaagcatgacaaaaatgtagggcagtgatgtaattttcaaaggaatgatttatgatatattcaagattataatattgctgtagaagtcattgaaaattaaatatgaggttgtcatttagtgtttgaagccagtgttagatatttggtttccctttgtcttcattgcagacagtaagtgcaaataaaaattgccgttgagatcaaagagagttttatttagaataagataattctcccccatctctggaactcagtatttgaaagcagatttaatgtaagaaaagattaatcaaggtgggataatgcaagaatttcagacaaaa

SEQ ID NO: 104955 - DNA, 2246 bp, Homo sapiens
aagtgtatttccactagcatgctaaggtatgtttgtgtgtgagtatgtttcctccagtatgctaagttttgacacatgcaggcatctaacttgggtgttatctgtccttcctttgcccaaagcatagattataattgttcattctcaaaaatgcaactcttatctatttcccctttatttgaaggcagctgatggttactctgcaaggtgtaagtttctcttttaaaaactaagcggtcgagcatggtggctcatgcttgcagtcccagcacgtgggagtctgaggcggaagagttgcttgagcccaagagttcaagaccagcctaggcaacaaagtgagaccccatctcactttggaactcaggactgcagtaagccatgatcataccactgcacttaatcctgggtgacagagtgagaccttgtctcttaaaaaaaaaaaaaaagagagcatgtatatagatgttttaaggccaaaggctgtggaagccaggaaggaaatagtagatatgatctatcacaattcggggtgataattagttgcacagtagaggacaagttttgttggggtgatgattgcaaaggtatttgtatcctgacttgttctaaaaaatgtttgtggcagtctagagaacgctgatatgagctgagcttctttataaacttactggctggccatcatctttattgacttagattttatttaatagaagtaataatgaggccaggtgccatggctcacgcctataatcccaacactttgggaggctgaagcaggtggatcacctgaggtcaggagttcaagatcagcctgggcaacatggtgaaaccccgtctctactaaaaaacaaaaattagctgggtgtggtggggcatgcctgtaattccagctactcgagaggccaaggcacgagaatcacttgaacccaggaggtggaggttgcagtgaactgagatcacgccattgcactccagcctaggtgagcctgggtgacagagtgagactacatctcaaaaaaaaaaaaaaaaaagaagtaataatgagtataaaataaaatagaacttttctggtattattgagtgaatcggtatagagaattacataaagcactagttaggcttaagttttaattgtatctacaaccagtccccatctaccgttcccccaacacaattaccccagaaatcaaactccctaagacagcaaccaatattttggcattcaatactcagtaaacatttgaaaagaatgaacatatggttatatgatactttgggggtaacctaactggaaagaaaaattatagataagcaggtgaaactgatattaatatgagtattcaaatattctatttatttgatcattttctttcagctaaaaaattgccaaagaatgaaccacaaaatccaggagcaaattctgccagaggaagaggagtagaccttaccgaacccacacaaccaaccaggaatcagtgttgtagtaactaaacctctagtttgaactagctggaatagtcttctgcttcctaaatgttaataacaatggaattggagcatttaaccagcccagtatgacttccaaaagaagagacttatgatagagtcaagtttctaatacagaattattttaagtgttttgaacttaatttttaataacatgcatgggtccctctcactaatgtttcaacaatagggaaaaatgagaactatgtggacacttgtttcattggaaggttagggggaataatttctcatcactaggaatatagacaaatgactgtctgggcccacacagttaaccagcccatttctccacactggtacagtagtcacctgtgaaaaaaaaattggaacttactaatttgggcttttcaaaaacattctttgtttagaaggagattctaaagttatttatgatgcttagccatagtattcaggcaaatgttcatttctcctggtacctgtatttaaaatgtacattccacattttaataaattaaccacaagaaaataatcccacatatacaaggtcaggggtggggaagagtattaatggtatcttaattatacccagtctggttttttttttttaaatggggtaaaaatcaaatgcaaccccatcttgttttaggaattttgagaactaataaatgcaccttaatggtcagtgttcctttcaaacatgtgagttctttaacaaaaatgaaataaaccaggtgtctgtgatttctaattaatcaccg

SEQ ID NO: 104956 - DNA, 1127 bp, Homo sapiens
aatcttaatatctggttctccctcttccattcttgccttactcccactggaataaattctttggcttgtcatcctcccaacttcaggacaatcaaatacatatggcttaatgggaaggtggtcagattagaaaatattcacagccaatctctccagtaggcagcccttgtttggcttaaaactgcccgttgaattcaagtttcttacatgttccacaactatgattgtaaaagtcaaggcagcaggcaccagcctgtgtggaagaaagttatatttagtattcctttcggagctgtctctttggatatcgtggagattctggtacaggctgttactgtttgagggcttctgggcctgtggcagagaaggagtgggtggtttgctgacagttcttataaatacccccagtatttatttaatggcagaaacacacagagagaacacacagagtattagaggagagaacatagcttagctccattcatcccctgggcccaggaccaagcacttctaatctgttctgaggaactgcttctggggccagctgcagccctgtgtctgggggaagtcacctgcctgcttgctgaaggaggaaggaaggaaggaacagggaacaatgaggcccttgtaaaagccaagttttgcttttttttttttttttaagtttattttctaaccatatcactcttctgcttaaaacctttcagtagctttccactgtttctggaataaaggtcaaaagtcctaatatgatgagaaaggttctgtagggcctggccaaagcctgactcttcagcctaatctctccccactttcccattcattaacattcctcaaacataatccacactctgcccacctcaggcctgtacatgctattctctctgctcaaaggcttttctctccactggcactcagttaattctaactcattcctcaattaaaacctcatttccacaagctgaactttagcatcatcagaaaaatgtttcctgatgcttcacaggaatcctccacactttgtcaaatgcctccagaactccttatgctttgcattgattcaagttttttattttattttatttatttatttatttatttatttatttatttatttatttacttac

SEQ ID NO: 104957 - DNA, 1045 bp, Homo sapiens
gaaggcgatcaacggtacaccactttcaaacgcagcactgacttgtatgctccacagtcatcaacagtgaaaacaacagttttcaacaagagttggaaacactgagttgagggttttttttttctttttaaagtttgaggccaaaatcgatatttattcttttgaattatgcttatatctttttcctggttaatacgcacgcggtggcacaattttgaaaactacgtaacgttatagaaccaccacccagaaacgaatcctgttaacaaactttttgtattcaaactttttccactgcatagtttttgacaatgctttttagacaatctttcttttagcaaccagcactttcaaacaaaaattacagagaatagtaagtttttttcccctcctccggcagatttgacccagaaattgctatgggaagaaagtgttaattatattaaaaaatagtttgacagaaagtatttaaaaagagaaagggagaacatcacgtctttattttggtgaattagcaacaaagaaaaagattagcatggacgggtacttttcaaaaatatattttttttcctctggctcccgctagggtggaggaagttgtctctctgtcagagacagggtggaagagagtgaaaggacaaatgattgagaggctgccccctcccactggtgcaggcgtgcgggggtcggatggggggccgcggaggggggaggtggccagcaggtgcctgggctccaggcccctacccccaccctcgtccccaccctcacccacacccagggattggcctcgccccctggcgggcgagcggtaggtgtcgaagcactggggtggggggtgcaaaccccgcgggcagcggaaaagaggccgtggggggcctcccagcgctggcagacaccgtgaggctggcagccgccggcacgcacacctagtccgcagtcccgaggaacatgtccgcagccagggcgcggagcagagtcccgggcaggagaaccaagggagggcgtgtgctgtggcggcggcggcagcggcagcggagccgct

SEQ ID NO: 104958 - DNA, 1327 bp, Homo sapiens
tcactctgccacgtaggctggagtgcagtggcatgatcgtagctcactgcagactcaacctccctgggctcaggtgatcctcctacatcagcctcttgagtagctgggactacaggcatgcgccagtacactattattattattatttgtattctttgtagagatagggtttcaccttgttgcccaggctgttctcaaactcctgagcccaagcaatttgcccgccttgcttcccaaagtgctgagattataggcatgggccaccatgcctggctgaaagtgttcatttttatgtatccattcattcagtaaatatttagagggttaccaactgggtgtcaggcattgggctaggtgctgggcctatgacacacagaatttgtccttcaggagttacttattgtgtgtgtgcacaagtgcatgtgtgtgtatgcatgtgttgggggcctagggatgagggcagtgaaccaaaattacagagaagttcagaaaaactactttcttggagtagttgcggacccagagcaggacagttcatagactggggcactggtagggtgggattggcttcctggaggaagtgtcagtggctgctaagaactcttggcagggcagagtggggtggggtgaagcttcttgtagtggagaaactgaaagcagttgtggaagcttggaggtgggccaactgagccagacctttgttgcctagggccaccggctggggtgcgtggccaagagggcactgaggagtgcaggaatcttaacctggagagtgacattatctcagatttgctttttttaaaaaaaaaaaaaatttaactggacttgattgggtacgagggagtgtaagagagcaaaatctgtggttctctctcagcttgtttctgcacttaatatgagcaagcccaaaaggacagattgctctacctttgccacaggccccttggcaagttagattagagagattagagaatgaggagggatctagaaagagataaggtagttcactggggggcttttgaaagaaaaacaggtcccaggcctgatataaatctggcctttaaacttcacaaacgaaaccaaaaaagaagggagctaagtcagccagggtgacgtgccacaccccagagaatagaaaaagaaaaaaaaaaaagaaaaaagaaaagaaacaaacaaacttgtttcgcaggatccagatctttgaactgtgtcctggtaaaggttgcttcagagtcattttggttctgtgttcattaaaaatgtagatctaggccaggcgcagtggctcagacctgtaatcccagcactttgggaggccgaggcggga

SEQ ID NO: 104959 - DNA, 1048 bp, Homo sapiens
ccagactggagtgcagtggcatgatctcggctcactgcaggatctgcctcctggggtcatgccattctatgggatgaatctttaactaagcttttgaaagaaaggatgggaatttgatagtcatatttggaagaacccaggagggcaggaatgtggataagaaatcaaggaggtggccgggtatggtggctcatgcctataatcccagcactttgagaggccgaggtgggcagatcgcttgaggccaagaaatcaagaccagcctggccaacatgacaaaaccttgtttctactaaaatacaaaaattagctgggcatggtggcacacacctgtagtcccagcttcttgggaggctgaggcatgaggatggcttgaacccaggaggcagaggttgcagtgagccaagatcacaccactgtactgtagcctgggtgacagagcaatactctgtctcaaaaaaaaaaaaaaacccaaacaaaaaaaacaaatcaaggaggggtacttggccaagtagatgtagataaggaatatgaaaggaagagaggtagaatgataaggaggtgggtgcatgtgggctgatgatgtcactgctggtagtatgtctagcctgcatagctccttctcccctggagtccgtattggtgagtccttactggtaaatattcatgtgaaatcctgttgccacttgtccctggttctggaagatgactagagttgctatacgttgtagtcggtgagccatgcagaaccatacatgttgagagtgatggcagctttcctaaaaggctggcagagcccagtacataaagctccagtgggcaatgccacctttcttatgtgggcctagttgatagagatgttggaaagagaacattcagtcctgtgttctctagaactacttgctgaggccattaaatgccaccctctccccaggaatgacagtgagaagcaaagattactctacagctccacaaagatttttcataacaactgtccctgaaaagtagtattgaatatatgatgagctcgttatttaatggctgattc

SEQ ID NO: 104960 - DNA, 1037 bp, Homo sapiens
gcaattctcctgcctcagcttcccgagtagctgggattacaggcatgtgtcactatgcctggctaatttttgtgtttttattagagacagggtttcaccatgttggccaggctggtctcgaactcctgacctcatgtgtgatcctcccacctcggcatcccaaagtgctgggattacaggcatgagccaccgcacctggctgggacatgaactttagggcacacactatttaacccactgcaccgcattaaaaaaaaaaaatcagaaaagccaaaaatttaattttattaattctaatttttactttaactgaatatttcaaaatattattataatatgtaatcaatataaaataattcttaatgtgatattttaacattttttaatacgaagtctttgaaattcagggtgtattttcaaacactcataacacatctcaatttttattgccaatttttaaagactccgtattcgcttgtggctggctgccacatcttggacagcacagttggagtgctgcggggctgacaaaacttttatgcttctcagtgtttcaccccatgttgtctccctctcttcattcctcttagttttcagggaattttaatttgtttgggaagtctcagtcattatgaacaaaagaaataaaaatatactttgtactgggatcccaagactcagtggaggaagtaaaatcagccagttttgaaagaaaagatctttattcagttacatttttaagcatcagtgtttattgtatggtagaattcattaagcactctatcacaagtggtttcaacacgtgcggttaatattcaagatgtaactttttttttttattgagtaggggaaatataagaccttattattacagatctccctgccatgagatttgtgactcacccatttatgagcccccagtgaacacagccattattctctgtcatgttaagacaagaaggggcataaataaactttttttctgggctgactgaacttagtctgttgcaacaatgaagttaagatctatatctcta

SEQ ID NO: 104961 - DNA, 1087 bp, Homo sapiens
gaagggtgatctgtagttgagcaagcaggttcagttcattgaggcctctttattttcaaagcttttctccaattatcttcattgcattttggccatcaggctgctccatgttctccaaaggttctttgaactttctcccacctctgccttagatctggaagctcacaccaccttcaatgcctttccttcattttctgccagggaattctgcttatcctccaaggcttgactgcagaactctgtagagagaataaaggccttcttagagctctgtggcaatgttccttcttatataactataattatataccaatctgtactgaactgtgattaagagttgactttttctctagtttgtaatatatttagttcgttgtgcataattgtgcttattcttttgttggtaaatagtcattgaattcaataatggtaaaatgagggctggttgcatatatttgcagaggagctttcaaagtttataatctatacctgctgtgtccaacacagtagccactagccatgtgtggctattgaacacttgcaatttcactagtttgaattgtgctgtaagcgtgaaatgcacacaggttttgaagacttagtacaagaagaggaatgtaaatagtaacttttaatattgcatacgtattgaaagaataatactttggtatatattaggttaaataaaatatattatttaatgaatttcacctgcttcttttgtctttttaaacacagctactggaatacttaaatttacatatgtggcttgcattatatttctactggactgctctcatctaatgggctcttactcttaggcttctcttttttttcattccagatctgagattacagaaaatgaaaccacttttaaatgataagccttttgcacattagtcaatttgacagatttcattgtagtcattaattttacctcttctagcctcgatgccaaattcccatgaacaaaaaatgtatttgagcagccttcaaatcctattgtgttatttgcttctggtccagaggagcagggacatgttagctgcctgcccagctgctgcctgttcacactgcagggcatgtg

SEQ ID NO: 104962 - DNA, 1211 bp, Homo sapiens
tatgagaaaggttaagcttcctagaataaacaatgaggtggaggaagatcaaatgaaagtagatggagtggacagtctgctggagaagggtggaaaaaggtccagacaagttgttatcaaagagaagcttccctgtaataagaaagccagacaagaacagctatgactacactatataaatacgtagttgtctaaatgtgccaacttctcagaccctccaatgtagcccctctccaaggaggccaactacagatcccttttgaccaaaaatccttttcagctctcacctaactcaatctctgaggaagtagcgctgaactttctgttctcaacaaatacacatcaccagctaacctcttctccagctccaatcttccccgaaccccaccttccatcctccctatcccaacaaaataggtgcaccaccatcacggaaaatgactcaaagactgaactcctcatggccctcctcaaaatggcagctacctcttgctggccctgtttctgccaacaagcccatcattcattcctttagtgtcctttaccttccacacattaccagccaccagactccactgagcttcctcattctctctcagagacactgcatttccccatcctacctttcttccattggaatgtcaaacctactataataaaatagccccctagactgttctctctgctgccagggtagtcttcctaaaataccactttccttaaacaaccccatctctaccagatccagagactactcctggctctttggggatgctgaccagaattagacttgtttaacttatctctagatttaccagtctcctaattaatcccaacccatgtcaacacccaggtgaacctcactctaactgcaaagctaaactatttactatactgacaatcaattcatattaaaccaaaaagagtcattcattattaaaagaaacccttctcttaaccttttattaagaagactttttgatgcaaataggctcccttcaattatctaaaagtatgttttcttaaagagataggcctctattatttatgagtctaggagcatattattaaaaactaaaaaataaaataaaaatctataaactacaatgcacaaatctatagcagtcaacctgccacaaaactcaagatatgaagtcgctgctatgtaaaactttgatgtatcgctccctaatttaacctccctcatcaag

SEQ ID NO: 104963 - DNA, 1030 bp, Homo sapiens
gagcttggttttctgcatctctgaaccaccaacttacaagtcctgcattcatgactaggaccatagagaaccctcttgacatggtggagaatttgcttatatggaaacctaagaagttgaccctattaggaccagtcttgatgctaccagtactgattcttaaaatatacattatttgcatacattagccaccagcccatttttaacgttgggtggggaggctaaggctcaagaacatggtagtctcttaattataggtagattttgtgagaagacttcagtcctacaggagttcagaaattttctcttattaccagtgaacttaaaggattgatggtaagactgatgaaagaggaccttccacttaaaaatggggaatgtttggtttccaattgaggtcttacatatgtttctttgatcttatcataagctgctcatgtttcccacctggagaatgtgtcagaggaagaaatgaacagactcctgggaatagtattggatgtggaatatctctttacctgtgtccacaaggaagaagatgcagataccaaacaagtttatttctatctatttaaggtgagattttaacattttaaaaacattttctctcattattcaaatgtacccagtctccatatgccaggtcgtggctgtgaaggctttcagctcctggtacattttgccctcagagtttgctgaacaatacgtttcttcatgactgattctctaaaatggcccaccatagtttgaacacatcattctctttgaggcttttacacttgtatgcaaagttgagtatcttggtttgcatatgcaaatagattttttccatccacccaacaaatatttattgcacatctgttctgcatgtggcactaacgtaggcatgagggatagaacagtggacaaaacagagttcttcccctcatgcaatatatatttcagcagaagagacagtcaacaagtaaataatacctttgcaggtggtgataagtgttggccgaagagaaacaaagtaggataagtggaa

SEQ ID NO: 104964 - DNA, 1049 bp, Homo sapiens
tttaatgctcacaagaacccaatgaagtaggtattattgttgtccccattttacaggtaaggaaggaaaggctaaatagcgtaatcaaattttcaaagttatgcagctagttaagtgacacagctggaatttgatcccaggggctgtttcattccaggactcactgtatgatgctgcagaataaggtgattttaacagaattagacacaagtggtgatgtaagggtaatctaattgcattcccaagtttcactagctggcagggatattgttgcttgttattgcaggcctagtttttttctgctatagttaatagtacgagataaacataattgaatatttctgatgacctgggggtttatgggatattgatggtgcttgacttctcttgtcacaggtggctgtgttactgcaacgtgccacagttctgcgacagtctacctcggtacgaaaccacacaggtgtttgggagaacattgcttcgctcggtcttcactgttatgaggcgacaactcctggaacaagcaagacaggaaaaagataaactgcctcttgaaaaacgaactctaatcctcactcatttcccaaagtaagggagagtttttgctggtctttgtttgatcccagagcttgaggttgctaaatacaatgccaaagcctgcataaataacaagatcggaaatgacagaagaaacattccaaggggatgggagaaaagaccctcagttccctttgtgaatcttcttgggtattttccagtccatttattagcctgactttgggttgactgccgtcattgctcccttatcccctcctcgtcctacctgagtcattgtctctgactcacatagaatggggcagtgctttcttttgtatattcagcggccaggaagctctaggacgatgagggagaatgtttaggtacattttccagccactcagaaatggtgcaaaagagctcaagtggcttttttttttttttccgttcaatttctccaactttttccaagcactggtgaaccatccctgcctcagctatagtagacttgc

SEQ ID NO: 104965 - DNA, 1031 bp, Homo sapiens
acatcacaggtccacttactaataatctcacagttgaaggcatcattcccagctttttatcttgaaaaatttcaagccctcataaatgttgcagaaattctgtaataaaaatccatagactctttactgagattcagcagttaacattatgccacatttgctacctctctttctctctgcgcctccccatatgctctttttctttctctccccactccccatgaaccatttggaaccatttcagaattaaaaacacatgtcataatacttcacccctaactatttttgcatgtactgtatctcataaggaagctattctcttacataaccacaatgcagtcattactcttagaaaatttagcctggttacaatattttctaatacagggttggtgaattacagcctgcaagccaaatctgctccactggctgtttttttcaaataaagttttattgaaacatattgtttgcagctgtctttgcattacaacagtaaatttgaataattgagacagggaatgtgtggcttgcaaagtatgaaatatttattatctggcttttcactgaaaagtttgctgacctctggcctaatataaaaccgtatttaaatttcccatatagccagatgatgtcagttataacctttgttgttgttgaaggatcagttagggattgtgcattgcatttaattcttatctcttcatttgtttagtctcctttaaaacaactccccagccttgttttggtcttttgcagcactgccattggtgaagagtcttggtcgctagttttgtataaggtccctctttttggatttgttgattgtttactaaggattagattcaagtaaggcatttttggtaaaaatgctgctgtcatctcattgccttgcatctgagggcatgcaaggcaatgacatttcttaagacatacctgtcttaagacatttctgacagcttccaggaaatgaagaaatggcttggagattatattacagtgttaattttcaatttgtcatgtttctttaaata

SEQ ID NO: 104966 - DNA, 1324 bp, Homo sapiens
aggccattcatgaggggtctgccctgatgatccaacacttcccactaggccccacctccaacattggagattgcatttcagcatgagatttggaggggtcacacattcaaactacatcaggatgcagtcacatgtttgaaaatattttggatatattaatatttagtagtgtactagagctggcttgtactggaatgcacaagaaaattgttaaattttcaggagttttgtgagctggttgttccatatgttggtagcttgaagttgactagcatggcacctggttacctggatagccagttctggactaatgagatgaagtgtcaccagttagggccttccttccttgaagagctgtttgtggagcatctacttgcaaaccactaggcagattaaataagatggggagcataagtgctggcacatggttgtgcttccagctatggttgagtgtaggtcaacagatattctctggaaagaaaactgttctttaaaaagaggtgttaagaatatatacatgaggccgggcgcggtggctcagcctgtaatcccagcactttgggaggccgaggcgggcagatcacgaggtcaggagatcgagaccatcttggctaacacggtgaaaccccgtctctactaaaaaatacaaaaaattagctgggcgccgtggcaggctccagaggctgaggcaggagaatggcatgaacccgggaggcggagcttgcagtgagctgagatagcgccactgcagtctggcctgggcgaaagagcgagactccgtctcagaaaaaaaaaaaaaaaaaaagaatatatacatgagtgctactattgggcctgtaatgagaatttgaatctgtcatctcaagggtccttaaagctcagctggagaggattccttgaagccagaggttggcaaactataacccacaggccacattttgtctgcttactgtatttttaaataaagttttattggaacagtactgcacccattctttaacatattgtctgtggatgcttttgcattatagcagaagaaggagtagttgtgacaaacaccttatggctcacaacgtctaaaatattttctatctggcccttcacagaaaactttgctggcccctaatctacactgaatatcatccgtgtacacatataatactccaatttctcaaaatgctttacctgccttttctgtcttgtcttcataacttgtatgtgtatgtgtctctgtgtgtatgtgtgcacacatgtgtatttaggactctgaaaatccacaaatgtgtatcttattagaacaaagatgagaagcttggatgtgtcc

SEQ ID NO: 104967 - DNA, 1058 bp, Homo sapiens
aggatactgtacaagttcaatatgtaactcaagtgtagtcgatagcaaatgaagggatatttgaaaaatagatctcagtgttcattgttaatttacacatacacgcaaacatgtaatcacaattagtgacactgaactactggaaaggatatggttaatgtggattagaaagatgatttaggcagcttacacttcagaaagatttcttatgaccttgtccctaagggaaaacaaggactaaggaaattctttaagggaagtcatgaaattctataagggaagtcatgtaaatttatgaataaatttcagaagttattcctgtagggtttggcatgtgttggagtgtctttttgttttgttttgtttttttttgttgctaatttatcttcccagttgtctttggcttaggtcccttcctttccaggaactgtgtccatgttttattggtattgcagttggtgtcgcagtctggcgagaataaaccagactctgaattgacagaaagagctctcatctataccttgtcctgttctactttcttgcttttaagaaaagggaaccagaaaacatgtccttagaatgttattcatttagggctgggcagtggctcacacctgtaatcctagcactttgggaggccaaggtgggtggatctcctgagatcaggagtttgagaccagcctgaccaatgtggtaaaaccctgtctctactaaaaatacaaaattagcttggtgtggtggcacatgcccgtagtcccagctgcttgggaggctgaggcaggaaaattgcttgaacccgggaggcggaggttgcagtgagccaagatcacagcactgcactccagcctgggcaatgagagcgaaactccatctcaaaaaaaaaaaaaaaaaaaaaagaatgttattcatttaggattttcatgggtggactaaagattagcagctccggatgattaagatggctgctgagaaaaattattggaaggtctaaagcaatgtgtccaatagaaatataaagcagcctgcaaatatgaggttataaaagcacacatattatg

SEQ ID NO: 104968 - DNA, 1269 bp, Homo sapiens
atttacttttatctctctttatgaggttccaaaacaatcacattagatttacacgttttctgtaagctttgtcactgaaaaaacttgatattataaaaatatttcaatgactgagtttattcaacattgttgactacctttagttactttctaatgtcttctggctgattcagagattctgggcttctcagaccttacttggaaaggtctgataagaccaaatttaaaatgctatgtatgtgatgattcagttctttagaagggttgccagtttgtggtgtacagtaaacacttggattactaaatattctagtgaagattagcacttttcatttgcatcttttttttttcttctgagattctcaaataccttaaagataagcagaaattcataatctacattcattctgaaaacttttatattactattcagcaagtgatctttaagattgagctaggaacttgtggccctggtgtgttattttcaaataactagaaacttacattttcaaatgatgatttttatctttgaagcaaggattttgattttgttttggttttatagcttattttcaaagttaagaaacgcaagaaagggtgttaatatatttcattcaggaaaggtcctggttggtaaaatatgtaaaagtacaaacttctgaattcaccatcatttcctgatggatttgtaaaaatttttctccccagtctaatgtatttgtttgtatactaacttccacacagggctatggaacacacctgatgaatcatttgaaagaatatcacataaagcatgacatcctgaacttcctcacatatgcagatgaatatgcaattggatactttaagaaacaggttggtttctcaccacgcaacactgttttgtcactccttttcttaatatgttctcaggtagcgttcttccaaataagtttctcccccagtgttttctacttataagaacaggcatttgttttacaagccttatgtcaaaaataagcttcagcctggattagagagtgtcactagcacatagtaagtattgaataactatttgttgagagaatgaatgaatgtcacctgtcagtgaggtataatattgcatcctaacattctaaaatatggtttctaataagaaattcccagtcctggaatttggtgggtagcattctctgtgaatgagaaaaacagattcagtttctggaaggcctccatttatgacagcagaaaggaaatcctggagtttataaaaacctgcaaacagtcctg

SEQ ID NO: 104969 - DNA, 1077 bp, Homo sapiens
tacccatctttgttttctggtttctactaacctccttaatcccagttcttagttttttgttaggcattatctacctaacagccctaaagctttttacacagtgtctggtgcatagtagttactcattaagtatttttcttttacttaaagtggctcagtcttgttcttgtgtttcctggggaagtgagcaaaggcttttttttttttttggaaaatacaaacaacttttgttgctttttgttcaaagatgtcagcctaagagagaattccaagtaggcacttggaagagttaataaagcacagcgggctcctctctctccctgtctctctgaagagctggctttcctcattgttctctctggagcttaatgagcaggtctggattcagcagcacatcgttccgcattagaggctgctggccaactaaagccatcaccccgctgtcagctgctctttcctcattcctcctcccagcagcactaattcatccccacggtgttagctgagagcaggattcccttggcagagtctgcaaattcacattgtacatgatctgttggcccttcaaacctacaggggaacgccagaagcgcagagctattttagatggctaacaaagcagtcaactttttagaagccaaggctccctccccattcttttttctcctctcctccccctctgcctccagccttccctcacacattccgttgaatgggtgatggaggtttggagatcttaacctagtttttaaaaaagctatctgaagtcacttcaataaaaatatatttggattcatgtagtatttttttccacagaattcagttgattttttataagtattatttgttccaactgtgaaaaacccctcaaggaaggtagggattcatggtggcagcaaagaaacagtgaatattctgaggcatttcctagcccctaaaagtatacaggagcagaataagttgtagttgtcattagtagagagagagagagaaaactagtatagttggacaggtggaccaagagtggagagttaagtgctactttgtgagtgttgactccaagggaaaggtaggatc

SEQ ID NO: 104970 - DNA, 1081 bp, Homo sapiens
ggatgttaatggaagtgatttttttttttccccaccaagcaacttaaagaaaaacggcaaactaattgtaatcactaacacaacagttggtgggttttgagtttcctaaaacattctggaatggttccaatttcaggtttttgtaagaatgagctgaatagtaatcagctggcaatagggtaaaactctaatcattgctccttgtttccctttttcctttcaagtaaagagcccagagaccctgaccagctttacagcacgctcaagagcatcctccagcaggtgaaggtgggtgtcctctttattcacctcatgcaaatattttgaaatgatttcccacatggaatttccatattagataccttacttttttctttacccaagagccatcaaagcgcttggcccttcatggaacctgtgaagagaacagaagctccaggatattatgaagttataaggttccccatgggtaataccattaacattttctaagtatagatttaaaactctggatggcggtgtgggggacaaatggttgctgaggttgatttgtactcctctgcttagggtaggaagtgtatgacgggtggtgggattccatgcaccgtggcgggtcagtgatggcagagaagtgggtggctgtgttcattagagacattctgcagctgtcgtttagagcccacatgagcttaacgacactagacgcagaaaatccacggtaactgcagacagcactagatttgaaagctggcactttagatataactttgcttatattctaactctttggtgcaaatagaaaaacatcagcttatcctcttgatatgctttgcgtctgtcgtaaataggtattcctttgaataattattcaggataataatgaaagaagttagattaaagtacttgactgctgtactttcagagggagaaattctacttaccacaattcttgattttccatgcccttgatgggtactgttaatgtcactgtatatactctttattttacgctttgtctcatatccaaaatcaaacaaaaaaggatgtcttcagaaatgtagaattgtgcagtttggtgctg

SEQ ID NO: 104971 - DNA, 1097 bp, Homo sapiens
tatgatattacacatttgtgtagagaaaataattattaaaatagtggttatgtactaacaagtttgttgtaagtagacagaattatcaaaaacctagatgcttattttaaaagtttgcattatttagaatttcttccttaggaaccaaagcagttgctttcctggaactgcatttttcagaactgctcaaagcacctcatctagatgagtgttttaaaaaatatatataaaaagtctataaagagacttcaaacatcacatatttcacctcttacaggcttttttaaaatcatgtatcccttccttaaagtccttcagaataaaataaaagtaaactctcacattccattagaaaaaaatggaaacattcattcatggtctgaaaatgttatggatttccccaaattttgctactgtgtgcaatttcctcacacacaggttttgaggaaacccctaatcatctatcatgaaatagctaatggacatgccatagaaaatttaccttaatagtagtaaatagattaaaatctattccataaaataaaaatgtcctatgacttcaatttaaatacatatctgaaaagctaaaaggaggttttttgttttttcaaaagtgctaattattacatttacaagtctcttcaatacatcatgtccaattctttgtaaaaaactaaaccaccttgctttaggcacactgcttggtgagtttctaagaagcagaggggaaaaaaaatcacttgtcaattaatccagcttccttaattttactgaagaagaatttctccaggatattggcacatttgtagtattcactctcaggggggttgtactctttgcaattggtaaagactcgctgtaagtctgccatgaataatttcttagacacgtagtacctattcttgaggcgttcactcatggttttcagatctgcacaggaaaaaaaaatattagcaatctttgactccctttaaacaccagctgacaaaactgggactgggaaaggaatctatgttgttggtttgattacatttttatcatcccaatgcttttatttaagagaaattcttatgaccaaggaaaacagttcttaaatc

SEQ ID NO: 104972 - DNA, 1052 bp, Homo sapiens
ggtttttgataattctgtctacttacaacaaacttgttagtacataaccactattttaataattattttctctacacaaatgtgtaatatcatatttgactttgcttatgcaggccataagttccaaaagataatttccctgcccacaaaggcataaacttgaaaacacatgagattgaatcaacatgctttaataggaaaagatgtatggtctatatatgtatcaatctggtgaatcctcgttctaataaaggttctttttcttttctatgatacacacagccacgctgataatatgcaaatgaacattttcctttatgtctctccagataatgtttattgtctgaggtaaattaaattcccaccagggtttgctgtcagtattttaacacccacattagtatatgcgtccagggtcataaccccctaaaatccatcatgcaaccttattaatctgtcttgggattccagtttagtgcttggatttatttcctgattacactacatagaaaagtgagacatctgccattcccaactctgggaaaaccaactaatatacaaccatataaatgaaggccatcttgatggtctcaacactaatttttatgatgcaaatttatacactgatttttgtaaaggacaaagttttaaaagcgtatttaacttgatgttttctatcagcataaataaaatggtcatgaatagtcattaaaaacagttgccagtgataatctgcatgaaggaaaaagaaccctgcaaatggctattgagttggaagtattgtttttgatatgtaagagatattcagaatgctcacactgaaaatgcctcaactttttaaagtgtaagaaaccaccatgagtggtgtctagatttctaatgaagaatcatgatacagtttggattaagtatcttggactggttttaaacagtgctttgtaccggatctgctgaagcatctgtccagctggtatcctgtgaaagtttgttattttctgagtagacattcttatagagtattgtctttaaaatcagattgtctcttctatatt

SEQ ID NO: 104973 - DNA, 2291 bp, Homo sapiens
agtttttgtgtgggtttttttttttaaatcatattcagtaaaaattgttttgtagctacaccacctgaaactcagcagtcacctcatcttagcctgaaggatatcaccaatgtctccttgtatcctgttgtgaaaatcagaagactttctctttctccaaaaaagaataaagcaagcccagcagtggctctgcctaaacgtaggtgcacagccagcgtgaactataaggagcccaccctcgcttcgtaagtatttggtttgtgggaacttatttttaatgatacatgtcggggggaataaggttatggagctttgttcaagaatgagttttttctgaaatataaacatttgatttaaaaaaactgaagtgagaacatttaaaattggtgtgttttaccataacttggtagggaagagtaagttaatattgggatgcttacattatgcctgagatctctttttactcttacaggaaactgagaagaggggacccttttacagatttgtgttttttgaattctcctattttcaagcagaaaaaggatttgagacgttctaaaaaaagtatgaaacaaatacaatgaaggttttgttggatattgtttaaattcaatctacacctctttctgttgcttcaggagaggatctgtaagagtacacaaacagagtgagccattgccatagaatattctcttgacaggaccctagctcataaacatttcttcagaactatacttcaaatgggatgctttgtattaaaactttaataaatttaatttattttttcttttgaatataaataactgagcttaagcattatcatcatatcgatttcttatgctgcctaaacctcttaattttagtcgaaatatatctttttttttttttggaggcggaatttcattcttgttgcccaggctggagtgcaatggcacgatctcagcttaccgcaacctccgcctcccaggttcaagcgattctcctgcctcagactcccgagtagctgggactacaggcatgtgccactacgcccggctaattttgtatttttagtagagacagggtttctccatgttggtcaggttgctctcaaactcccaacctcaggtgatctgcccacctcggcctcccaaagtgctgggattactgagccactgtgcccagcccaaaatgtatcttatacaaacattgtagaaatgaataatgattactcaaataagatcttttaattataagcttctggcatctctatttttcccttaagtaggggatactaaagtgaatgattttctaagaggatcttttgaaactctttagtacaatatttgagtaaaataaattattgtggatcttttgaaactctgtgtagtattcgagtaaaataaatatttgacatttacagtagggtacaccctaagttgtttatgaattccttataccactgttatatttaatttttcagataaaatatgtatgggaaaatgactagagaaattgattcttttttaggctcagggacaagataagtgactaattgtgaaccccaagctctaattgtatgttcagagtgatgtctccataaaattacaaatgtcatgtactttcagggtagctccttatttagtcagaaatctcagagattaaatgtgtgaatatttagggtttttgcatatttttgaccaaccaatgaaagcgaattagttcagtttagaaagtttgatgtctatacttgtatatacctctttaaattttagaactttgtaggttattcatttttaaagagcaataaagtttgtataagatagtgattgctttccttctattctttaaatatcaaaaatagagtatctctctgtcttcactattctcatccttggacatttcctctcccctccccttggtattctcttttttgaggggggggtgttctaggtgagttaatccttagtattttcagtagtcattgctataaaactctcagcttcccctccatactttcaacctaacacttctctctcccaacttatctctgtgtaatctcccagttcatgattaacaaattataattttattgagggactgttctaatcctgatatctcagattttcttggctgttatctccctatctttctgtattctatgtcagtcagagccaaaatccttttcatcatcccaaatttttctatccgccacatcactgattcatacaccctagtcttccatcacagtctcttaatttttaagttttttttttcttactactcccttcatacttattctttaatttcat

SEQ ID NO: 104974 - DNA, 1047 bp, Homo sapiens
ccggcacataccaccaggcctggctcatttttttgtatttttagtagagatggggtttcaccatgttggccaggctggtcttggactcctgacctcaggtgatccgcccacctcagcctcccaaagtgctgggattacaggcgtgagccaacccgcccggcttacagcatatttttaaaaaagatacttgcctgctaccactgactaactggccgatttagaaagttggtttggtttttaaggttttaatctccttacaaacaaaataagcatcataacacctatacttcacagaattgttctgaggatcaaataaaatgatgtgacaatattttgaaaatgatacaacttgactataaatgttagttttacttgtattaactaaaattgccaaatgagaatctttgtggacaggtgtaggttgtattacgaacatttgaactatgcctacttttgatctaataaaatattttctgagccagtttttagagatgtcgtacaaaagaatactaagcctatcaattgaggaaatcttcactaactagaagattattttaaatcacggttcctgtcaaatttaatataaaacaaggccattaaaataacaagtcactggattcaaatttgatttcactttcaaggggatacttcagttaagtgtataaaagctacttcaattcaacctaagtctacaaaaaagtccctctgtccccttgggagtcctaatttactgaaaataaaaattctgtctccataacaagcaatctctgaattaggtcagagcaatacaactgtgatttccacacccagccccccactgtttaatcagaccataacttccaccaaagagagacagatggtaagtctccaacctccaccagagaaacagatggtaagtatagtatataagcatcaggagtgatcatttatcacgaacattaaaaatacaggtaaacaagtagatcacttactggtaggagtttttgttggcttagaaccctccgtctctttttcatctgtgtatttcagtgctcttttagctagagg

SEQ ID NO: 104975 - DNA, 1840 bp, Homo sapiens
ctcctgcctcagtctcccgagtagttgggactacaggcacccaccaccacgcctggctaattttttgtattttttttagtagagacggggtttcactgtgttagccaggatggtctcgatctcctgacctcgtgatctgcccgcctcggcctcccaaagtgctgggattacaagcgtaagccaccgtgcctggcctataatgtttttaaagattataaagattgaatgtcccttatccaaaatgcttgggaccagaagtgttttggatttattttttaaattttggagtatttacattatatcagttcatcatccctaatttgaaaatctgaaatccaaaaccctccagttagcatttccttggagcatcatgactgcactaaaaaagttttggatttcagattttcagattagggatactgaacctgtacaagattctttcacatgtcagatataagccatcagttgatcactgacaagtaaatagatggtaatatttaagttcccaggtttttatttacagattttataatgtaggaaaactacagaatgaccttttggtcattcacttttttagtttgaattctaaagttcttgaaattcaaatttccacaaagtaaaactacttttctcatttattttttaaattctcagatcagatacctactattcctcaagacacactgggagttgattttgattcaggtgaagctaagtctactgataatgtcttacctagaactgtatctgttcgtagcagtttaaagaaacattgtaacagtatatgtcagtttgatagcttggatgattttgaaaccagtcatttggcagggaagtcttttgaattcgaaagagttggatttttagacccactagtaaacatgcacatacctgaaaatgtacaacacaatgcttgtcaatggagcaaggaccaagttaacttatcaccaaagctgattcagccaggaacgtttactaaaacaaaagaagacattttagaatctaaatctgaacaaactaaaagtaagcaaagagatacacaagaaagaaaaagagaagagaaaagaaaagctaacaggagaaaatcaaaacgtatgtcaaaatataaagagaataaaagcgaaaataaaaaaactgttccccaaaaaaaaatgcacaaatctgtcagttccaatgatgcttacaattttaatttggaagagggtgttcatcttactcctttccgacaaaaagtgagcaatgactctaatagagaagaaaacaacgagtctgaagtgagcctctgtgaatcaagtggttcaggagatgattccgatgacctctatttgcccacttgcaagtacattcagaatcccacgagcaattcagatagaccagtcaccaggcctctagctaaaagagcactgaaatacacagatgaaaaagagacggagggttctaagccaacaaaaactcctaccagtaagtgatctacttgtttacctgtatttttaatgttcgtgataaatgatcactcctgatgcttatatactatacttaccatctgtttctctggtggaggttggagacttaccatctgtctctctttggtggaagttatggtctgattaaacagtggggggctgggtgtggaaatcacagttgtattgctctgacctaattcagagattgcttgttatggagacagaatttttattttcagtaaattaggactcccaaggggacagagggacttttttgtagacttaggttgaattgaagtagcttttatacacttaactgaagtatccccttgaaagtgaaatcaaatttgaatccagtgacttgttattttaatggc

SEQ ID NO: 104976 - DNA, 1049 bp, Homo sapiens
attctgaatgtacttgcaagtgggcaaatagaggtcatcggaatcatctcctgaaccacttgattcacagaggctcacttcagactcgttgttttcttctctattagagtcattgctcactttttgtcggaaaggagtaagatgaacaccctcttccaaattaaaattgtaagcatcattggaactgacagatttgtgcatttttttttggggaacagtttttttattttcgcttttattctctttatattttgacatacgttttgattttctcctgttagcttttcttttctcttctctttttctttcttgtgtatctctttgcttacttttagtttgttcagatttagattctaaaatgtcttcttttgttttagtaaacgttcctggctgaatcagctttggtgataagttaacttggtccttgctccattgacaagcattgtgttgtacattttcaggtatgtgcatgtttactagtgggtctaaaaatccaactctttcgaattcaaaagacttccctgccaaatgactggtttcaaaatcatccaagctatcaaactgacatatactgttacaatgtttctttaaactgctacgaacagatacagttctaggtaagacattatcagtagacttagcttcacctgaatcaaaatcaactcccagtgtgtcttgaggaatagtaggtatctgatctgagaatttaaaaaataaatgagaaaagtagttttactttgtggaaatttgaatttcaagaactttagaattcaaactaaaaaagtgaatgaccaaaaggtcattctgtagttttcctacattataaaatctgtaaataaaaacctgggaacttaaatattaccatctatttacttgtcagtgatcaactgatggcttatatctgacatgtgaaagaatcttgtacaggttcagtatccctaatctgaaaatctgaaatccaaaacttttttagtgcagtcatgatgctccaaggaaatgctaactggagggttttggatttcagattttcaaattagggatgatgaact

SEQ ID NO: 104977 - DNA, 1079 bp, Homo sapiens
agatctgttgtgggcaaaaggtaagataaggtaattgaatttgtagaagatttctaaagtagttattatttaccacagccattacttacctaaatctgtttaatgtctagagtagaaaattctctacagagaataaagaataaaattacaattagaatgaaactgccagtaatagtgttagagtataaagaacacttcatgtttcatgaaccaaagaacaacatttgtaaagaaaatgaacaatgttaacttcagaagagttcaatagttaagcaccataaaagcatatattaccaacaaatcacagctctgctaatgataaagcaggctcctaaagagttgagtgatcaaactacattttttaaaaaacatttaacaaattaattctcatgggctgtttccgtagttaaattgagttatataatgtgttttcaggtggaactctccaacttgataggttggttcttcaagtgggaattgaatgtcagtcataacaaatcagtctccctgtaatcagcataagtgtcctttggtttcctttgatacagaatagatgtattgatttgaaatcgaattatgaaatgatactaaaggaaagaaaaattataatttaggaaaatactgaatttgtttttattacataattgttaaatttctgtttttcattggtattttctaaggcaaattcctcttgaagaaactgaacttccaggacaaggagaatcatttcaaatagaaggtaattcaagtgaaaatctaaaaatattattaagggcaaaataaggtctttgagaacaaataatacaattaaatttatctaattctttttttttaactttttaaatttgttcatctggtattctgctcaaagcaaatctgtttattttacacagagtaatagagtgttaaaatatatttattgtgtcaaatctgtaatctgaatctttggctataactatggcagcaatttactgattgctactacgtgtcaagctctatgttaggcattttatgtgcataatctcacctaaccctcacaacaacctaggactataagtacagttagtcctgttttatag

SEQ ID NO: 104978 - DNA, 1038 bp, Homo sapiens
acttccccttgtctcccccacagatgctgtatacttcctaccttcctttataagtcttactcagtaaagtagcctacatgtttgcttaggccaaaaccacaagaggctttcctctccctcattgttcccatctccatcccttttcagtccttgagcttgacctgtcatctcaaggccttccactgggcttcacctccatagccatgactctaatcttagctgatatcatatcttgccagatatgcaatgatgacctctcagctctttctacccccggcctctttcaattcagactgatctttcaaaaacttaaatcagtttacttcctttcttaatattaagtaccttcccatcatacttagactaaaatctaaactcatggctctcaaggccctacattatgtggcccctgcatgtacatctcctactgttctcagtgactatgttccagccacaacaacctttctttcctaaacacagcaagatttttcttatgtgtatttgctgtttccactgccttcttttcctcctgttctttcagtggctagctcctttgcagtcttctgatttatatcacattcactgtatttaaaagagcaatccaacctgagttactctctatcacctcacactgggtatttccttcatgacatttatcgcaatctgaaattttgtacatatatcttctctttttaaaattttacttccctgcactagaatgtaagctttaaaaggataagacttactctgcttttgagctgttatagtctcagttcctagaaccatggcatggcaccatgatagactgtcaacaagtgcatattgttgaataaattaatgctttcttgtgaatacttcagttataacagtgttttgttttaatacattaacagaaccaggaaatatgttcctctggaatggaccccaatagtgatgacagctccagaaatttatttgtgaaggatttaccgttagtatcaaattctttatcatgattattaatactaagaaaggtttaattctgtgattcatttatga

SEQ ID NO: 104979 - DNA, 1684 bp, Homo sapiens
tagtaaatcaataaacattgattgggtccctgttgtaccaaatatctataatcatcactgctattaacacctattgactacatactctgtgtggaaccttgtgctgtctacttttaaaaatacaatgaagcagtaagtatagtaggaaattccttatctgatgtgatcaggatcagaaggtgagtaaaatttaaagcaaagaatatataactgaagcatttttatgtttaacttgatacatatgagtgtacattcattcaccaatttctaaatgtagggcaaagatcttccttgcagtatgggtgtttatcatcacttattttgaaaacccatgatgcctaatctacctggagcacacagtattgattgcctgtctagaagctactccccctcttctacgttcccaagagcttcttttttttttttaataaaaaaattgtatttacttagaagcattcagaatgtcaacaaaacagctgcaactttttttttttgcaattacagagtggtattcagttaacagaacaacaattatttcgtataagctgcatcagagacaactgaagatgaaaaaactaccatccccatatataactaatttgtgctgtgcaccaacaagaacctgctttaaatttccatgccaatttacaacccccatactgtaccaggcaaagttagtggctattgaaaataccaccaggacagggctatctaaagacacattcggtagtgtgttaactatacaaaaaaagacactgtacagtttaaaaacaaatcttacaccgccttacatttcaatttttttctttaaaaagagtgaattgtgtacaggggggttaaatgctttatagacaagaaaaaaaactgcgctacaaccaacttattcatcatcatcatcttcttcttcatcttcttcatcttcctcctcctcctcatcctcttcatcttcctcatcttcctcctcttccttctttttcttgcttttttcagccttgacaactcccttttttgctgcatcaggctttcctttagctcgatatgcagcaatatccttttcgtatttttccttcagcttcgcagccttcttttcataaggctgcttgtcatctgcagcagtgttattccacatctctcccagtttcttcgcaacatcaccaatggacaggccaggatgttctcctttgatttttgggcgatactcagagcagaagaggaagaaggccgaaggaagcctcttgggtgcattgggatccttgaacttcttttttgtctcccctttgggagggatataggttttcatttctctttcataacgggccttgtccgcctttgccatatcttcaaattttcctttctctttagcagacatggtcttccacctctctgagcacttcttagaaaactctgagaagttgactgaagcatctgggtgcttcttcttatgctcctcccgacaagtttgcacaaaaaatgcatatgatgacattttgcctctcggcttcttaggatctcctttgcccatgtttagttatttttcctcagcgaggcacagagtcgcccagtgcccgtccggctctcacttgccccggcgctgtctctatggagctcaatgtactgccaagagcttcttttacactggtgcatttccctttcccaagtgaattgggtgattctctggcttacc

SEQ ID NO: 104980 - DNA, 1633 bp, Homo sapiens
cattgagctccatagagacagcgccggggcaagtgagagccggacgggcactgggcgactctgtgcctcgctgaggaaaaataactaaacatgggcaaaggagatcctaagaagccgagaggcaaaatgtcatcatatgcattttttgtgcaaacttgtcgggaggagcataagaagaagcacccagatgcttcagtcaacttctcagagttttctaagaagtgctcagagaggtggaagaccatgtctgctaaagagaaaggaaaatttgaagatatggcaaaggcggacaaggcccgttatgaaagagaaatgaaaacctatatccctcccaaaggggagacaaaaaagaagttcaaggatcccaatgcacccaagaggcttccttcggccttcttcctcttctgctctgagtatcgcccaaaaatcaaaggagaacatcctggcctgtccattggtgatgttgcgaagaaactgggagagatgtggaataacactgctgcagatgacaagcagccttatgaaaagaaggctgcgaagctgaaggaaaaatacgaaaaggatattgctgcatatcgagctaaaggaaagcctgatgcagcaaaaaagggagttgtcaaggctgaaaaaagcaagaaaaagaaggaagaggaggaagatgaggaagatgaagaggatgaggaggaggaggaagatgaagaagatgaagaagaagatgatgatgatgaataagttggttgtagcgcagttttttttcttgtctataaagcatttaacccccctgtacacaattcactctttttaaagaaaaaaattgaaatgtaaggcggtgtaagatttgtttttaaactgtacagtgtctttttttgtatagttaacacactaccgaatgtgtctttagatagccctgtcctggtggtattttcaatagccactaactttgcctggtacagtatgggggttgtaaattggcatggaaatttaaagcaggttcttgttggtgcacagcacaaattagttatatatggggatggtagttttttcatcttcagttgtctctgatgcagcttatacgaaataattgttgttctgttaactgaataccactctgtaattgcaaaaaaaaaaagttgcagctgttttgttgacattctgaatgcttctaagtaaatacaatttttttattaaaaaaaaaaaagaagctcttgggaacgtagaagagggggagtagcttctagacaggcaatcaatactgtgtgctccaggtagattaggcatcatgggttttcaaaataagtgatgataaacacccatactgcaaggaagatctttgccctacatttagaaattggtgaatgaatgtacactcatatgtatcaagttaaacataaaaatgcttcagttatatattctttgctttaaattttactcaccttctgatcctgatcacatcagataaggaatttcctactatacttactgcttcattgtatttttaaaagtagacagcacaaggttccacacagagtatgtagtcaataggtgttaatagcagtgatgattatagatatttggtacaacagggacccaatcaatgtttattgatttactatacataggggttaagagaaga

SEQ ID NO: 104981 - DNA, 1025 bp, Homo sapiens
tctcttgcatttaatcattttttctgggatgtcggccgtgaacttcatggatttttcttttcccttcaagatgatctcgtttacatggttttaaccatagggaacttcagtatttaaagtcagttaaatggcaaggcaaattcataacatacatttccatagtgtgtttgtgtgtttatgtattatcagggaaacatatacagggtgtgtatgtaaaattgcagtagtttcatttatggttacttgaccataaatattttttttctgttcagtaacacagaatagagattaggaatctttgaagtagttactgagtgagtgacagtttattttccactactcccagttggtaaagtcagaaatgctgacattagcaacaggtgcatcttggtttcattacattagtcagtggatccatcttgatacggattttctctttctctagagaatagatggatctggaaagtaggtatttgaatgattttctgttggtactcaatctcttaaaatgattggcatgtcactggacttaaagggaatctgtttgatattgttacattatagaatatctcttggaaaataatttgaaagataaattaaatgtagtgtctttcctgatcctgtgattttatgttcttgctttgttttcatatattttacattgaccaagtcggaagtatacataaaagcgatctgtaacttgtaggcatagtggaatgcctgaatgttgtattacagctttatatgttattttatggtgtgggttaaggggaactcctttctcaaagataaaaaaccattattttgttctagtagaccttgttttcctttggcttagtcagtctacagggttggaaagaaccttctcaggacccttggtgagagatgttggagggatggtgagtggttattccaaggtactagagtattcagtttccctttcgtgggggtgtattgctgatctctgttgaaggagctgtttgaaagtcagagagccctgaactttaaactttgagacctgtata

SEQ ID NO: 104982 - DNA, 1403 bp, Homo sapiens
aagttgtctagatgagatgaagggttttaaaaaaattcctgctaagaaattactttgcgaatctgcgtatccacacattcatgttctacttggctctcagtaaatttttgaattttctttaactcaagaaatgtatgtgtgtgttttaaacatgttagtacatatacactgcttcatttttctgaacccttagcccaatatattgatgttaaaatgagtgtttcgtatcttctctgttctgtataattttggtaccatattcttcatttaagtctgagtgaatcatgattgttatgattcccctcctctgctattttttttaaagcaaataacagtcccacacagcattcttattgtagtcttatcattcattcctggaacggttaaggtataaggtggagtaatatacattgaaatttaattgtgtattgctccttgacttgtctcaggaacaatgggcagttgctgacttctgtatcatactaacctaagaggtggcactgccttatgaaaattggaaatttaggtgattgttcaggtgatttttgtgtaaaataattttgtcttaaaagttctgatgagggaagtcttcttgtttgacttagcaagataatagttctccatctttcaccttaccagcgtaaaataattagccttagttttccttgccttttaaatggggactgataaaacagatacttagagaattctgtgagatttacctaatcacttttaacggtaaaagatcatcatgggaaaggtagactgtaagtgtgaattattgatacttttcatttttcctcaccctaagagacagtgcctgaaataggtacctttcttatcccacttgtcaaggctgagaaacttaatacataccataatcacaacttttgagatagaattgaattgctgtcattcaaaacagcaggacatcttacaaccgtttaaatagcaattcttagtataatcttttctgtcaagagacatacaaccattttaggtaacagtagctcaaaatataatattattgactcactgctcagacttcttgaattcatcagtaaattgctttttgtattgaataatatagacctagaattatagggatctggagttcaaattttatatagaattatatgacagaaaattatgatttatcagttttttttcccttagagacagggtcttactcttgcacaggctggagtatgtggtatgatcatagatcactgtggcctcaaattcctgggctcaagtgatcctcctgccttggcctcctgagtaactgggactataagcacacaccgctatgaccaacagtttcctgaattttttgtagaggagtctcactgtgttgtgcaggttggtctcgaatttctggcctcaagtgatcctcctgcgtc

SEQ ID NO: 104983 - DNA, 1157 bp, Homo sapiens
tcttcaccgggaaagtaataagtaaataaagactatttagtggcattgagatttcaagagtaatttcttcagtaattttgcaagattattcatattacctactcaaccagactccataattgggctcaggagggaaggctttcccttagagaagcagagttctgttcgtctgaatgttgtccagtcaggctttgggacttaaaaatgcttttgaggattcttaggtccttttttttttttttttggcctgtggactgaacatagctgttcagtgtgtatcattatttattgcctttctcttactatagattatttctcacaggagaagaagttattgctggtagcatgtcagtttacatgtgtctagctcccatctctggaacacataattaagtgtggtcgacatatattcttcttcatttttgccgttgagaaagctgtcagaaatgttacatctggagaacaggaaagactaccctcaaagccagcgttggcctaagtgtactcttaaacatttcctgtggatgtgtggaccgcctgtctctctatctcttcatgacttctgcctgtgtcttgtgtgtgcagaggccaaatagtagtagcagagatggaaaaccttctcctacacatgtgcaccagcatggtcctttgtctctctctttcatttgctcttcaaggcttcgctcaaatactgcttccattctgtaattttctcttcccagcgcacccgtgggacctgttacattgagttagaggcagtattacacggtggtttcttttggagagactggctagactacgtatacatagcctcttggttagttacataccttctcagtgcctcagttccttcatctgtaaaaccacatggggttgtgtgaggattatatgagttaatacatgtaaagcactcagagtagtgcctggcatataagggctcaaaaattgttagttgttgatgctgttgttgctgtttataaggcttgcgtgcatttcttttcttcatttgttttgggaatggtgaaggcatataatgtattattcattatcttcttaatatgtttcatgtaatagacaaatatttttatgtagttactaaggcagataacttctgcatgtcttatttttctctaaaatggtaagcatacatataagta

SEQ ID NO: 104984 - DNA, 1053 bp, Homo sapiens
tatttgcatattcataatgagcgatcttcaggatgtggcctaagtctaaacatgaaatgcatttatgtttcttacacaccttatacacatagcctgaaggtagttttatttctcccatggggacgctgaataaactgtgtattgtgtgcctgcgatctgactgggacctgccacatggggttaggtgtggagtttcccacttgtggcatcatgtcagtgctgaaagtttttgattttggagcatttcagatttcagcttttcagattaggaatgttcaacctctagccggagaaagaagatagttttctataagatggaaaatttatccagtcatgcctttttggaacatgcgtgaatttgttgagtaactgaaatgtataccttcaggttcctaaatttaatttatgtgagataaaatttgtttctaagtagttttatatttccctcttctttgaaacagtatgagtttaacattttcttattagtttaggacctcattctcaacctcagttatgataccgtaatatagtgatcaattatggaactactaagttatcgaggtaataggactcttgtctcatgccctaagaaggacttcaggctgcccatttaaaaaaattgagatataatttaaataccatacaattcactcttttaaattatgcaattcagtagtttctagtgtactcacaacgttgtgcaactgtcactgtcattacttccaaaacattttcatcatcctagaaaggaaccccacatccattagcattctccattcccccctcccccccagcttctggcaaccacgaatcgactttctgtctctatggatttgtctattctgggcattttgtataaatggaatcatacaaggtgtggccttttatatctggtgtctttcacttaacataattaaagcatttagttttataataaaaaaggctaggcaaataattgagtggaggttgggaggtttaagagattccattaaagaagaaggtgaaataagggggagagatgagatcagatgaagttcagatttagcaaacatt

SEQ ID NO: 104985 - DNA, 1091 bp, Homo sapiens
catattccttacctgtggtttaagggttaaatataaaagaaaataaaactaggagaaaacagatttggaggctgacttctagaaatgttagaagaaattataaagaaaataataatcgatttgactagataaaattacacactaaaatgcttttaaaaagtatgtctttggtgaagagggaggaaaagaaaatactccacaaaaagcaaacaacaaactggaaaaatgtattcacagtgagacaggcagagaatgacaaaccagtaaaaatacccatgatgactgtgataggtaaatgggcatagtacacaaactgttcacaaaggaggaaatatggttagtaaacaggcatgtgggatatgtgttcagccttgttagtaatctaggaaatgagacttaaaacaagaaattgtacatagtgctgctgaaactactaccattgctactggactgtgaaaggtataattctaaattgaaagcacattggtactgtgcttcagtagcaacaaaaatgttagttcataatctttaattcagtaatttcatataaggggctctagcttatggaaaatgataaaaaatatggactgttacctgtaacaatgaaaatgtggaagtgaacaatattatgtgaagagaaatagctgagtaaattaggattagtccattcattggatggttatatatccaataaaaataaataggcaaggtatatagtagtatgaaaagatgcatatgaaaggactagattatatgtaaattgtgattatgagtttataaagtataaatatgaaaaatccctagaaaaagataatttataatccttgtgctacagtaatgagttgcaggtgatctttcttctgacctctctcaaatagggtatattaattttaaaatttaaatttagatttgtgattttaagaaaatttagttctagctctcaaggaactgccagtctaataggatagaactacactaaaaagaaatgtgctattgacatgaaagagacataaccacatgttctgagagtaccctcaaatatagttttgtattttatggagtgcttataaagtctccaggcatatatctgg

SEQ ID NO: 104986 - DNA, 1035 bp, Homo sapiens
atatcagttttgttaataacaacgacagtaaaatgagctgtctacccaaaatttagattattatgttgattataacaaacatctttattttggtaatgagcttataaaaatgaatctaggtcgggtgtggtggctcacgcctataatcccaccacgttgggaggccgaggcgggcagatcacgagctcaggagatggagaccatcctggctaacatggtaaaaccttgtctctactaaaaatacaaaaaattagccgggcgtggtggcgggcgcctgtagtcccagctactcgggaggctgaggcaggagaatggcgtgaacccgggaggcggagcttgcattgagctgagattgttccactgcactccagcctgggtgacagagagagactctgtctcaaaaaaagaaaaaaaaaaaaaaaaaaaaaaaagattctaaccccaggaaaggagaaggtatttgtcataattgtcataatgttttgacttatacaaaataagactttttctgaaacacagaaatccttgacagtttatttctttaagataaccaattttatacaggtgaattcttttaaaattgaacattgtagtggaaaagacgtcacaagtcactttagggtatggaaaagtgtggaacaggggcataaatattaccaaccagcacttctgcgggcagtcttcccacatccagtgaggccccctaaatcactgtctacttccttgtatatgtgtgtgtgcgtttgtgcacatgcatgcatacatgtgttcatggccatgaactaggagttatcccaagtgtagctgtgctcgctaagtcttatatttaagttatcttttgggcatggtttggcaagaggttaggtttttttcccttttctgtaaatatttagtgaaagcactccattgtttgctactgaatttttttcttatttttaaaaaagtattgtttgaaaaccttacatgatggcttgcatctgtaattccagctacttaggagattgaggcaggaagatcactatggcacacatatac

SEQ ID NO: 104987 - DNA, 1103 bp, Homo sapiens
ctgaaataacagaaatcctcactactgcttttatttagaagcattttcagacaaggaaggatgtacaatttatttttattgtcaggtataaattttccatgtttaattcagctttagaagtcatatgataatgtttgaattgagaaacattactcttaggtaataagaatgcatttaaatatatcctataaaatagacacgttatgcatgagtgaggggtgcattttcagtgacaagtataacacttgaaatctgaagaattgttggtcttccatacagcgtacttggaatgaaacaaaggtttacaacaagttactacaagaggtagaaatagaactagggaacaatttgtttcatctactcaagtctgttgaagtataataattaacttctgaccattcttggccttttaagttctcagggctctcctcataggaattataccgttaaccctgctctcctgggcaaatttcaaccaatgtaattatattcttagtcttacctgaattctctccatagagtgtaattatctgagctggattcttcccagggcactgggctttagcacagctactactctccctatctttagtccacgactgttgggtaatttcatttctgctcttgaacagttagctactatcctgcctgaagaattggcattttatgttgagtagtgtacatttgatttcactgtttaccttgtataagattaaaactaaccttagcaggccacttttgaccgtgggcaggtcaaagacgtaagtgtggtgaaattatagcagaaggggtaaatattttcaaataaagatcgtggaatcaaaaacatagagaccttttaagttttgatgtcaaaaaccactgtttttttccacattattaaaattagcagttaagtttttttcatctccaggctttatactcttaaaaattactggattatatctgtgaatatttgttgtgttagaacagatttagtatacttttaaaatttgtttaaaatattactaaactcatgttaatgtaaatatattatgaaaaatatattttgaaaaatcttgaaaagagtggccttgtttacagttttgccagtctcttaatgt

SEQ ID NO: 104988 - DNA, 1051 bp, Homo sapiens
aaaccttgtttcaaaaaaaataatatatatatatacacatacacacactaagtgaggtggtgtgtgcttgtagtcctagctgcttggaaggctgagatgggaggattgtgcccaggtgacagagcgagacccagtctgtattaaaaaaaaaaaaaattaaatgttgtatacttagcacataagtgatcattaaatgtttgatgaatgaattaatgaggaaagattttttttttgaaaaagaagttttatgaggagagaaaacattgcatatgtaaggcattatcctcaattccattgtggactctcccccaggtgtgcagccttgaatgatggaaatatcctcatgagattctgaaagaggaggaaacgaattttgcccttaaataggtgtcagtacagctgcacttatttgcacatttctagttctgcctctgactagagatcaattgtgatgactttgaatttgtagaccatctgcctgtcagtgcacttaaaattgcaactgatctttataagctgagtataactattattgtagcaaacagcaaattaagtgactatacactggaaagagttaggttcatacctccttgaagactgtgagctgttctttatttggacacctggtattaaactcttattggttattaatatttgggacaggttaatgaagacaatattttacagaatatagcagttttcaatataatagattcaatacaacaactttttgtgtgtttataattttgttacttattatttaccataagtggtttaaaatatacgtggcaaaacattctttagagctttgattgcaataattatcacataaccaacacctcttaagtattacgtacttaagaaggaacttgaactttatcttaacacaatagcattgacaaattactcacaaaattagtagttgtggaagaaaataggtataggaagagtaagtcactgatattgagtaaattaaagttatagacattaaattacagacaataaaattatagaagcactaaatagataaattgatttttttaatgtcatg

SEQ ID NO: 104989 - DNA, 2232 bp, Homo sapiens
agtgctgggattacaggcgtgagccaccgcgcccgaccccaatcttatatttggttttatttctcccatttgtctctctaaatcccttagttgataagttaattacactatctttgtttgaaaagaatataaacttagaacaagactagaacattatgaaacaacttccacgtaatgtcacaccaggacaagttattatcaagtgatcttacgtgatagtcactagtacttcaggagataagtttgccggaggaagtatatcaacaatttactaaaaaaccattttggccagaatggtttcaaagtttttagttccattaaaaactagtggacatttcccaaaaactagtactagatgagtgtcagggttgattaaagtttagaaattgttttaagaactttaattcagctgatatttagttgctagcccacatgtcctgaagattttcaaccatctttggtttggaaattatttgcaaataacatatgatcaccttttattaggtatttagaaaaaataacttcatctgacatttgtctctaggtatatggttgtgatgtcatcagggttacaatacaataaatactctagttatatgttttaaataggaatatatagcagtagtacaaagtctcatttttatttcagtaacttttcagaatgttgccatctgatctagctcaagacccttagtttgtgacactcacttgaatacttaggaaaagtctatggctttgatctgatgcctgtttgggcatcaaaccagagatgtggttgagtcccaaccagagtttaaccacagctcaaccacccttgacatcctttgacataccttaagctttatgggccaaaggctgcttgaggaggggagtacatggcagcctcaggggcagattgagtgctgcttttagaaactgagggacaggctgatctgcctagaatatattggatcttgctatgtaaatggtttgtatacattcagaatcaaattaacaaaagataaaaaagactagtgaaattgaaattatttgacttcttgaacaaatataattatttttgcacagttaccactagtactttgcaatacttgatctaagcattcaaacaccacccctgtgggcagaattttatggacactgcagtgactgtcaaaaacatgaaaatttcacatcttcccaacattttcagtttcacttctccattaatagtcactaccttatttttaaaatcaaaccttgtgttgtgtttagctgtttgtaaattgcctacgtcaaacgatacaacactctattggaaagttctttgttggttctgaatatacatacttggcttttcatggaataatgctgcagccacataacagaactctgtcatcagtgttttaaatcctgagtgattatatgcattaaatgtcattgtaggggctgggcacagtggctcatgcctgtaatcccagcacttagggaggccaaggcgagtggatcacccaaggtcaggagttcaagaccagcctggtcaacatggtgaaacccggtctctattttcaaaaatgcaaaaattagctggatgtggtggtgcacgcctgtagttccagctactcaggaggctgaggcttgagaattgcttgaacccgggaggtggaggttgcagtgagccgagattgcctgggcgacaaagtgagattccgtctccaaaaaaaaaaaaaaaaaagccattgtaggatagtagtaattttaaaaacatagaggacaaacaaaaagtactttctacttcaatccaagatgaagaattaaccatgtcagtaacgaaaaggtggaccattgcagcatctgtcattattgtttctcattttgccttcttcttcctgtcttctccccattgccatctcattttctctgcagccatgagcaggaactgtatgcaaagtacaaaagactgtattcctgaaacagaacttgttgaccccattttcttgactcttatttgacattgctttctaagagaagggttttggattacacactcacacacacacacatatgtacacattcatagtaataaatgtatttatcaactcagttgcaatgagattctgcttgttggaatatcatataataaatagctatattggtatttattgaacattggctttttatatgactgcaataagatttgatgctagtatttttaactgttgctccctctctgcctccatgcttagctgtttaaca

SEQ ID NO: 104990 - DNA, 1020 bp, Homo sapiens
accaacatggcacatgtatacatatgtaacaagcctgcacattgtgcacatgtaccctaaaacttaaagtataataataataaaattaaaaaaaaatctgagaaaaaaaagttaatttaaactttagcacatcgtatggttaacactaggtaaaatttcccttttgaagtcactaatatgaaatacataccacatttgttttctgcagcagtagagctaatatactttgacctttttttcccaaatgatactttataagtcttcaggggagagattgaaagtattaaatttcaagttacaaccatcatcattaagatcagctcagccttaatcttttggccttgtccctgcctttccctgcagtgccccagccagtctgtactttatttccttcagcttctaatgttttttcttcacttttggtgtaaaagattctcctctctctgcctggaaccactccttggccccactcttccccttggcaagctcattctttaggttttagcttagacatcactttcttgaagtaaatttcccttaccttctctgtgttcccacagacccttatgcttcctctttcctaacgtcatccactagagagtaattgcctgtattttgttctctaggccctaatacacggtaagctctataaggtcagggatgctcccaggctaccagcactgcacctggtacatgtcaggcatccagtgcatacctgatgagttgaacaaatgaggaatcattccactacgtaactagcaactaagcattcaagagatcagtatgaatgcatatatttatcgttattactatatatctgtatatcttggtttttacatttgttccttcttttgtatgtttggagaataaaatcctttataactcactgcatcccttccttaggaactcttaatacatctgcctcatcccatttatctgtgtcttgaaagggaataaacaggacccaaatggtagattatcccaatgtacaacaattcagcatgagaaattccatgttaa

SEQ ID NO: 104991 - DNA, 1031 bp, Homo sapiens
tctttaataaaatgagggaactggatcagaaagtctaaaagaagttccctttattgctcaatttttatgatcctgtgatttagaaaaataattttaatgggcagtttcatagtttgaatgacatattattcaggctttttaaatataggtgttagaaatgaagcttaaagcagttggaagcaatagagaataaggcaggaattaagtacttctaattaacaatgctagataatgtcagtgactgtttcttgtatctgtactgtaaggacaaatgctgttcatagttgtaacttctaagacaaggctttgatttctttacagtattcttcacctacaccagaaccacttgtaaagaggcaagaatatttactaagagttgaatcatgatatgttttttttgcaatatattgtttaaggtttcttttaagtcctgcctctttcaggaagcctttacctaatagttcacttctctccaggaaaggactgatctttacatgtatatctttctgttactgtatttaggcccacaaaacccctaactagatattgcctatgggttaagaacagagtaaagatatgaagaactgttttcagacatgtaaaataaggtaatgtgaatcatgtagaagagacaatatctttattccttttactctcaaatcataaaaacgaaagttataggagggaagatttgacttaataatagggagaatgtttctgaaaggtagaactctttggaagggacatgatctactttctactgtgtgcactagtagtgcttaggcatcttgtaaggattgttgtgcagggagtttctctttcagcttgaaggtcagctaaatatatcatctgagaatctgtaattgaatttaacaaatattttagtgcatctttgcagtaggcattaaactctacataattaggtgatggctggtatctgttacagtctagcacaactggcttaggaggcaagtcttattcttgcagcactattcacagtcacaaaaatatggaattaacctaggtttcca

SEQ ID NO: 104992 - DNA, 1051 bp, Homo sapiens
aaagtgatggtgcaccttattttatagtcaatgaaatatggtattacatggttgtcttcagagcctttattaacattcatggcattttgtgtgaattagaaaaatgtattcctttctgcaggccaaaacagccttgcagctgcatgtgaggaagaaaggttattaggaaactttgacagtatagcaaagtaaatataaaatcaatgttcagaggagtaagtttctgtttttaaaaattatctctttaattaaaggcagtatttttttttctaatggataagccagttgtgaagaagtttttatctgtggatatcagggtcttttagggtagacaggaagtctaacagagtttaattttgactgagtctgtcgaggttagtgaccccgtaatcttttcagaatgaagctcttgccacgaagccttccagttccacccctaggaacttaggtcaactcctgaaaggcatttctgtttttgatgtttgatgtaaatctttattcttacatctttggcaatgtttttgtttgaccatatactctggaactacttttcacactgatagtgtcaaaaatttaattttcacaactagcagcaggtaagcctaacttacccatgttatggagatttggaatactattaggaatagtctactaagttagtattttttaatacatgacctaatatgaggattctgattggaagctaattgggaatgatattagttcctgtcgtgaaagtatttcaacttttacagtaacattaaatacttgggatctagatattttctatttaaaataaatttctctcaccaattggagggtgataatttgtaattcaaatgtgttacctaattttgtataaaataccttttcctggttatgtttcctttctttatcctcatctttcttgtaatgtagacagaaaagtgcagtttgtagtaagctgacctctgaattgctctttgggagcgtagttacaagggattaaaggggccctctgcaactccagagattaggagattaagtcaggcagatccaggatctctggtac

SEQ ID NO: 104993 - DNA, 1004 bp, Homo sapiens
catggtcctcagtcttccactcaaaggaattagaggaattaatgccagtcattttcattaaacccttttaatgttaaagatcataatgttcttaaatgttcaaaatatacagaacatatgaactgtgacattgggctccatttcaaaatagcatgtttgcatatccctgttgtggctgttttccacttctaatggtcataaaaccctggcttatatttagcagaaaatcaacgactttgacagaggagcttagcctggtaacagcgcaaattaataaccatctttaatagtagtgagaacagtctttgaaggggtaagccaaaacctgacccccgaaatcaacagtattgtcaaagtattttacggtagattggctgtttaatctactatttaaatgtacttactagttttatctaaggagacaaaaccagtaacttacctttataggaaatactttagttaaactgtagtgtaattgcagtgctccagattaactaccctcaagcagtaaactatattggttgcagtatagaaaggatgtctgcttagtatctgcataatatcaaccattgacataattttttagatttatttttaggaccttccaaatacaggatactattctaaaacctaataagaataggggagatatatatatataaagctatgctttaagagttcatttagaaactttattttactgtgctggaaaatactgtgtcaagttgtacttaaattcaaagacaaaataaattaactgtgaccttaaatcaaaatttaattatgtagtacctatttctttatcttaaaatgtgaagcaaatagttatgagggcacagttggtgtagtgagaaaatacttctctagttactgtaattatgggataattaaataacctttctgaacttcagtttcctcatctacaaaatgtgaacagttcttgtactgcttacttcttagtgtttgcattgggaatcaaatgagatgataatgtgagaaaatgc

SEQ ID NO: 104994 - DNA, 1073 bp, Homo sapiens
tctccaataaaatctatgtacacaagagcaaagaagactgtacctatacttttcccatattatctacaattgcttggcatagtgccagaaacaaaaaagatgttaaatcagatgcattgaaaaaatgggaaagcagtggtcttaaaataaaagcccaaaacattctgatacatttagtttaggtatagttatactatatcgagtacaatactaactacccagtaatggaaatgtaatggagaaaagaagaggaaatacactaaatcccttatgtgagacctagattcaaattctgtttctctacttgcatgacattaggcaagtcacctaacattaaatgtaaaattgcagggtgcaggagatggggagaacaaaccaaacaactaataagtacaacagacttggactctgaagattgaaatcttggctctggaactaaataactgcatgcatcttcttgaacaagtcatgcatctcttgatttccctcatctctaaatttagcgtgacaaaatccatctcacaaggctgttaggattaattagaacttgtgtgtgtcgatgcctggtatattgtgggcatatactaaatgttagatttatttatcaaaaaaactctgtggatcttatgtgacctcattgtagaaatgagggactttagttagccaatcactgaaatccccttgagctcttagttttgggcaggtataacaaagtaccatggactgagtggattgtaaacaatagaaagttacctctcacagttttggaggctggatgtacaagatcagggaactggcatggttgggttctggtgggttctctgttctgggttacagactaccaacttatcactggatcctctcatggcaaaaagagaataagaaagctctccaagtttcctttcatcatattgttgttaggatttaaacatatcaatttgtgggggacacaaacattctatccataacaagttccaacattctacatcagtcatctcagagagaagataatagataaagaatggatattgttctttttaagctcactagggattcctaacttatctacagga

SEQ ID NO: 104995 - DNA, 1437 bp, Homo sapiens
acaaatgtttatgttggagtgcccggcacatattgaatgcttactgaatttattatttctattattagtttagcctatatgaagccccttgtgaaataatattataacctgtaggaaaatttagtaaaggaacatgggacagaaaaatgttaaagagatcttctccttcctcaggatattctctagtcttccagcttttactcttaagttatggttctaaaacgctcttttacctaaaaaacaataagaggttataacccctcagagaccacgagcctgtggtgtgttagcatttgttcaacaaacagtgggctctttatgtatgccaggcagtgctttggacatcagttgaaagacaatactttcatgagtaattcatgatttcatgaggaggtcctactgcaagtatagtattgaagtaggaatatgatggcaggacccccaaagaggagattgcttacatttcaatagataaacacataacacttcttaaaacttagggatcaagattttgtttcctgcttcaaaaggtggtagttgtgggagtctctgacattagaacatgttggaacagtcagtgtgtctgtttaattcagtgtggtttaattcatgaacacctgtcagaatagaagttgacaaacatcatcatcaaagtagatccttttgttatcattataaaatattcaagtttaaaactctgtccagaaattcacaggattctttgcaaactcaaattttattatttttcatccagttatactttggttttaacgaaatgtctccatttaaaacaccataaagtcaacaaaatttattaaaatttttaataaaaactgagcaaaagatgtgacaaactgtagaggatatccagataacacataaacaaatgaaaaagtgttcaacattattagcatttaaggaaatgtaaattaaaaccacactgaggtatcattacaccttatcaaaatggctataatgaaacatagtgataacaccaaatgctagcaaggatgcagagaaactagatcacattgctagtgagaatataaaatggtacaaccactctgggaaggagtatggcaggttattataaaactaaatatgagcttaacatatgacccaccaattacactcttgggcatttatctgagagatataaaaacttatgttcacacaaaacacatacacagatgttcatagcagctttatttgtaatagcttgaaaatggaaacaaccctgcgatattgtgatttttaataagaaatatatactatttggtcctgatttttggcacaaagctactaaaagccttgcgatctcagaaatgttaagtgtcttctgatgctaatgaggtgactggtggctggggtctcctggaaggcctcaggatggaagctggttgccatcatgtcacaatcatgtgattagagggttgg

SEQ ID NO: 104996 - DNA, 1044 bp, Homo sapiens
acctgcctgtggtgctagcctagggtaaggagttgtccagaccgccaaacgtcttcccaggagagctcatcaagagcccatgagtcccctgcccacagcccacctgcattttctccgtgaaatatctacttgaagacaggcatctcacacctgtaatcccagcactttgggaggctgaggcaggaggataacttgagcccaggagtttgagactatcctggacaacatagtgagacccccaaaattacaaaaaaaaatttgaaaattagccaggtgttgttgcacacacctgtggtcccagctactcaggaggctgaggcaggaggaggattgcttgatcccaggaggtcaaggctacactgagctgtgatcatgccactgcactctagcctgagtgacagagcaacaccctgtctcaaaagaaaaaaaaaaaaaccaatacgaggggagcaaggtgagaagtatgtggtgggtacagggaaagagaataagacttgtcaagaaatatgacaagagctatcagtaaaatacagataggtgactcttggggcagctggtgtgaaatgtagtctgtcagcagcaggtgactggctcagccgcagcaatggtggtccaggttagaacagcagcttctcatctcctaccctcccactccttgccagctttctgaacacttcttcccccacagtgctggtatttactgactcccaactctgctttccttgcagctgaccctctggtgggcagcatcgccacacagtacatgaccaacagagcagagcatgaccggatggccagacagtggaccaagcggtacgccacataggggcctgctgcctgccgccccgcgggacctgtgcaagcacattcaccaagtgcatcggtagccctgcccacccctccagacctcggttcttattttcctatttttattaaatttggaaccattttgtgatggtatgttgtccatcttcccatcccagttcttcctgccccccttcctctctcccacgctctcttttatctctcattttattcccttgt

SEQ ID NO: 104997 - DNA, 1048 bp, Homo sapiens
cactgtggctgataactgcacttctggtaacccgacatttgctttgtgtcctggtgaccgctgtagccctacgtgcagtgaggcttgtctaattcaattacaggttcaagtgtatttttcatctcaaacctctaatatttctttggagttgagttgcttagcatgtggaatttctccagctgtcagtagcctgatgattttatggttgttatagtaaattgctatcattttacatattgactgggcattctttctgttacagccttctttatcaacaattaaaatatgtaactccaaaaatagccttcttgtgaaagtgaagtctgagctaatcattgtgttcagccactttcaactttatttctctcaaaattgttacagtgattgccctcaagctttgtattgttcatttttgttgttgttgttgttgttgttgctgctcttttttctccatgattttagcaaaagaagtaaactcaactgtattggtcacggtcagcccattcaatgacaagggtgtctgtctggcttcaccttcaggctattttagtgtgcagctataggaggcagaggaaacgtgggtggtgtagtttctaaaacacgctgacttgctgattgataattcagggttattagtgtaacaaagcgtagtggaaactcctactcctgctgcaccatacagttacagaccctaccatactcttggtctcatttaaggaaccattaacaccttcactgctgaaaagcaggatttataagcataagtcatccacctctaaatattttaacatttaaaatgcctgattcaaaagatacagtttttgttgtttttaactagttaaaaataaatcctaagaaaatatatttaaatattgcaaatgccacttctaaaccaaaatacctgagaatattttttgtctttttaataacgattttaccattcattttatttaaaaacatttctcagcatagcagggcactgtatggtctctgatgcactactcaaccctctagttgtagtagagggagccacagacagtacataaat

SEQ ID NO: 104998 - DNA, 1064 bp, Homo sapiens
cagcaccagctcctcctcatcttcgtcttccaaccagcaaaccgagaaagaaacaaacacccccaagaagaaggagagtaaagtcagcatgagcaaaaactccaaactcctctccaccagcgccaagaggtactgtgctcttttttttttccacaggcttcctatttccgaactgcctcttgctgcatttggtctgcctcccaatgaggatagcttaaacgctcctcatggtttatgtgttcttaaaaatgaaagaagggccttggaagccctaattattttctctattgctgcttctgtttttaaatcattgctcacatgcagctgttgcggcttgcctctcgcatttcttgctgaagtttgtaagattcctcgttacttttattagtgacccccaaatctgatttcagatttcttgtcctactaatggttaatctgtgaccttccccaaggccatgatcccatttcttaattactaataccagcccagagaactgcatcaaaatgaattctgtgaccattttaccttctcctcacctgttgcatggatgatcttttctaaatagagctttcttcacaaattgcataaggaataagaaactcatattagcaggtacaaaatttagtaggtgaagacagatgttttctggtggaatttaaagagatttttctgagagttgaggcaaatgaatgaatcagtaagtgactataaaatggttattctaggttatttttgtggttctctttaaaaacttcagtttaccaatttcagggagacttgtctttttttcatgctatttgctgtcctcatgctgtgaaaatgttactttgccttattttttcaatttaagtggtctcccttttactttattcttttcctcttaaggccctgaaggtagctactttttatccctgccatcctaagcggtcaccctttttctttattcttttcctcttaagcctctggaggtagctactttttacccctgccatccttcagtaatatcctctgatcgccatgaccctcaaaatcatctttagtggattcctaggagctctgagac

SEQ ID NO: 104999 - DNA, 1006 bp, Homo sapiens
ttgagtaatgtgaattaaaatttttacttttggttggctaatggtgctgtcttaatgttatatagtagtcccaatattcagctctcttaaaagagttcggttttacgttttgtgctgttaccttttggaatttaattatttagtattttaatgtactttattggagataaagatggattatttatttatttatttatttattttctttttgagacggagtcttgctctgtagcccaggctggagtgcagtggcatgatttcggctcattgcaacctccacctcccgggtcctggttcaagcaattctcctgcctcctgagtagctgggattataggcacgtgccaccatgcccagctaatttttgtattttgggtagagatggggtttcaccatgttggccaggcaggtcttgaactcctgaccttgtgatctgcccgccttggcctcccaaagtgctggggttacgggcgtgagccactgcacctggccttggggatactttttgaagtcagcgtccaatgaaaatctatgaattaagtgatatattaagtgcgtacatgtttaaaattaccctcagcatgaaagcatgagatttgaatgagttaaataattggttttcaattagtctgtcttatatttttaccctttgccatacttcctttcttcagtcagcattcagtgtgtagttttaaacacgttattaaaatatggcacttggcacatagtaacttctcagtaaatacaaaaattagccgggcatggtgatgcactccagcctgggcgacagagtgagaccctgtctcaaaaaaaaaagttgattattgcaaatcagtagaattgctcctcttgaaggaaggtgcactgtttgtgttcactaattttggcacttggcaaaaatatttgaagttactgagcatcaaaacttatgtgaaatgcaattgctcaatatgttataatgtatgaaaacataaaattaaattcttaatgttgtatattatgttgggt

SEQ ID NO: 105000 - DNA, 1778 bp, Homo sapiens
atagcttagaaggcaatactcacagtttttggggattcttgttaaattcctgtcacaaactttgagggcctgttataaatgaaaaggcacaagctgggcatggtggctcacgcctgtaatcccagcactttgggaggccaaggcgggtagatcacctgaggtcagcagtttgacaccagactggccaactaaaaatacaaaaattagccgggcgtggtgacgcgcgcccgtaatcccagctacttgggaggctgaggcaggagaattgcttgaaccctggaggcagaggttgcagtgagccaagattacgccactgcactccagcctggttgacagagtgagactctgtctcaaaaaaaaaaaaaaaaagaaagaaaagaaaaggcactgccttcaaggagttcataatctagtcaagatgttaagacatgcacacacatattttgaatggtacttggaaatataaatattatttggaaaataataaaatgcagatatcatgttataaagtttcagaggagtgagagattactttgacttgggtttgagggattgtggctggagtacttagtgatctgggaaggcttcatggaagaggtgagaagtggggtggggaagaataagggatattcgtgatggaacagtgtaagccaagacagcagagggaagacagaaaaagggcactattgggcagaagtgagtaaaagctgtgtctagagaggaagaaacattagtgggagaataaatagtaatagataaagcttgtgttcttcagtgtcaggctaagtctttaaattttattatgtagatgctggagaatcattaaaaaccttttgagtaggggctgtcattcagatagagttggctatctggatagagacagagtaaggattgagtggagcttggtaggaaccaggagacttggagattgctacagtagttaaggtggaaggtcaagagggtctggggtgtaagtggtggccttcaaagtggagaggaaagagaggtagaagacagtagaatccatagaacttagccactgatttcgatatggaggacttgaaaaggagtcgggttcttctgggtgttggggaagttggtggtgcattaacagaaataaataaggcaggaggatgaactggcttgagggaaaaaggttttgttacttgcttcgttgatcacatgcaatgcttagcatgttgctgccacttagtaggtcctcagtaaatatttgcagtttgactatatatttgagtttattattaaatcagtcattgaactcccagatctacatggcctacttttagattagattagacaaattaaatagattataaacttcctaaaagggaaggacaatgatttctgtctttgattctgaccctacatgttcttcccaactgctttagtttgacgattttcacagctacaggagatgttaaaagaatgatacagcaagcgcccacccttcaccgtgattcctcagcaaaattacaccatgtttgctctgtctctctcttatctctatatgataattttgtggagtcatttgaaagtgagcattttgatgcttccgtgtgtttagctttgcacacattgaatctgaggtggcctgacggtggagctgaggctggaactggttttggtagtccacattagatttgaaagtttgggtgatgttaaagtgcacaagattgctgagattggaggaggaaagaattgtgctctgaaggatgtcttcagatggaggatgggaaatgaagaggacttggagaaag

SEQ ID NO: 105001 - DNA, 1089 bp, Homo sapiens
tcactgggttttgctacagtgacagcaaaccattggggcagtgtgttgttcactaatacttttaacagagtagttaaaaactgaattctgtctgctctccaaagtacatgctgacccaaatatgacaaagtgaatgcaaagccctcttatatagcattcaaaggcagatttgccacaggtgccacatctgacttgtctgtagtgatctgagtcattattaaattttaaatagtaatacaacggagtagtcttagtagagtctactagcattgaaatgatgatcattatccatactgccagtacattggccatttgtatttattaaaattgatcgatggaaaattggtgtgggatggacctctagtaaattctacagaaaaaggcattgaggcacatttccaaacagatgagagtaaatagagtaacttgggatgatcttacttggagaaaagttttagatgtgatgcagctcaaaaagtcagcattattatgaagcaatgttgtacatgtgacagcagcatgagtagatcagatcgtaatcatttaaaacattagagtgtctgctgtgtgctaggcattgttctgtaggtgactaaaacagacctggcctctggcttgtgaaacctgaattttagtagacagtgcaaacagcagctaagcaaaaggattagtacaagttgtaatggctagtaggaaagaaattgacagagtgcagtgatggagaataattggggagggtgtgagggttacctagagaagccttacaaagacatttggtcaaagacctaaaagataggaaaggaaatggccttgtgaaaagtaccagaagacatctgggacagagggaaggtaaaaacaggccctgaggcggggacaagtcaggtgatgctgattatgtaaaccgtgctaagtagagagtttggatttttctcaataatgctttaaaagtcttttcccaccctccctgctgcatggaaaatagctgggaggaagatgctagtggaagaagggagaccagaaaggagggtattgctctgtttcaagctagctggtgcaggtggctaggattaaggtagtggcagtggagat

SEQ ID NO: 105002 - DNA, 1073 bp, Homo sapiens
agaggaacacacacatctcttctattgcttacttaaaatcccttactcccctagactaagggctccaacagagtctggacctagtctctcctgtttatgtcttccccagtacagcacatggcatgtggaagacatctgatgtttaatgagtaaatacattataggtgaaaacttgtgaggactaagtgaaaagagaaactctttttttatatagcattctaaatcagttatttcctaaattcatgaatggatggctaattttactagctggatattcattttagatattcctattaactttagttataaaaactctcttgtaaagatttattcacaaggctttttaaaatgctttaacttcttgctgtttcaatgtatttcatctatatcctaaacagttcttgttccaaatgtcctatttaacagaaaaatcgtaatcttaacatcaacagcaaaagctcaaaacattttttctgaaatatatatcttatctgtgccataaactagatcataaaagcagcagctgaaaagaagttattagaaatagcttaaaactcacaggaaacagatgctaactttccctccctgcctccccctttcctaatgcctttaaatataaagctattacgtgttgaaatgaaccttttattttgaggattatttatgtagattatccagagaaatttaatgcagtctcaattcaccagaatttttcaaacaataatctgcaaattgatacaggtaaaccgtgagatttaacttctaatgtctaaaaaaaggggggaggaggggagtttctaaaattgattcactttttattttgaataattgatgattatatgtcataaaagcctggaaattaccagaggtacactgtatgcaaattttaaaacgtatacattactttaaaagtatacattacttccttggttcttacccttggcttctgagttttgttttaatgcaggtgtgggaacctcccctagagatgattccaataggatggggccctggtgtgactgttttttgttctggtttttgttttgaggcaggtcttgttctgtggctcaggc

SEQ ID NO: 105003 - DNA, 1152 bp, Homo sapiens
gtagcaagataccttaagttacaacaaaatcttaggaaataagactgaataatatctgttatagaaataccctactctttaccaactcccaccctccctgaccccttcaaaatcataagcagctctcttctgtgacagacaaataatgtaagaattgtgaaaccccaatttatgtagcgtatctcttggtccactgtctggccattctgtcatgttctgctctgttggtcatatactgagtggcaatacttcccaccaaggggtcggctggaagaaaagaatgtagattactttggagaaaggaaaagaacattttaaactttagcgaatagtgacagcttgggtagatacgtacgacaaagtatgtgtgatcaaacccatcttcgaaacaccactccaccatgctggatatttttccatcaaaatttcaaaaaaacataacgttgggggaagagggaatgcttaggctttagtgtactggtctgtctttatcttagttcattccatttttctcccaacaaacaacactcaattggagtttctttactcttatgtgttaggctgagttcagtagagactggaacggtcaaggcttcagactgcaatgaacatccagctgtgttcatgtgacccttagctcaatgtcaccagttaacggcattgtgaatactgtgaagtcttcggggctgttgcagtgcaacactattaacctttacgctggttaaagagccaggttgccaggcaaaacctggacctccaattaagtatagtatttctctgaatcttaggatctttaataaatttatatttggtttacctagaaaatatatttgtctgtgtgtgtgtatatatatacatatgtgtatatatatatattttttgagacagggtctcgctttgccacccaggctggaatgcagtgcagtgacatgctcatggctcactgcagctttgaccttctgggttcaaacaatcctgacacctcagccaccctagtagctgtgactacagaaaaatattttttaaatgaaatgaagtcccaaaaaagtcacaattcaatagtcactaagtatttaacaactaccattttcaaaattgagtgccatctcagtgaccagctatgggacacatgctcactgaaccccagaggca

SEQ ID NO: 105004 - DNA, 1042 bp, Homo sapiens
ctttaaccagcgtaaaggttaatagtgttgcactgcaacagccccgaagacttcacagtattcacaatgccgttaactggtgacattgagctaagggtcacatgaacacagctggatgttcattgcagtctgaagccttgaccgttccagtctctactgaactcagcctaacacataagagtaaagaaactccaattgagtgttgtttgttgggagaaaaatggaatgaactaagataaagacagaccagtacactaaagcctaagcattccctcttcccccaacgttatgtttttttgaaattttgatggaaaaatatccagcatggtggagtggtgtttcgaagatgggtttgatcacacatactttgtcgtacgtatctacccaagctgtcactattcgctaaagtttaaaatgttcttttcctttctccaaagtaatctacattcttttcttccagccgaccccttggtgggaagtattgccactcagtatatgaccaacagagcagaacatgacagaatggccagacagtggaccaagagatacgctacataaattggggtttcacaattcttacattatttgtctgtcacagaagagagctgcttatgattttgaaggggtcagggagggtgggagttggtaaagagtagggtatttctataacagatattattcagtcttatttcctaagattttgttgtaacttaaggtatcttgctacagtagacagaattggtaatagcaacttttaaaattgtcattagttctgcaatattagctgaaatgtagtacagaaaagaatgtacatttagacatttgggttcagttgcttgtagtctgtaaatttaaaacagcttaatttggtacaggttacacatatggccatttatgtaaagtccctctaagactacatactttttgtttaaaacaaaattggaatttgttttcccttcttggaagggaacattgatatttaacagagtttttagagattgtcatctcatatatataaaatggacacgtggctataaaacac

SEQ ID NO: 105005 - DNA, 1055 bp, Homo sapiens
tttcaggtcctccttggggacgccgcctgccgcagccacccgcccccttggtgctcagttctggttctgttaattcgccccaccaaaacgtgccgagcaccgctctgtgctggggttgcggaagtgactgaacgcggctccgtgggcgcagtggtgggggttgggctagctgtccccggcagttggtgcagagccattttcattcccggcggtttccttgtttttgttggggaactaagatggacggatacagtcgtcttattgtacttaaagcggatgatatttaatacacagtttgatttcacaggtaagccaagatgggtgcatacaagtacatccaggagctatggagaaagaagcagtctgatgtcatgcgctttcttctgagggtccgctgctggcagtaccgccagctctctgctctccacagggctccccgccccacccggcctgataaagcgcgccgactgggctacaaggccaagcaaggtacgtgatcgactgcgtggatgcttggataaaattatattcgagaaaagttggaaaccagctgttaggaagacactgctgcctcagtgtctttcttcgcatagggctttggcagaaaaaagctagcaacactggtcagttactgtatgcactgttgtctaaagtggcaagtgtgtcaaaggttacaaatctgaatgagttcagactaaagcaaaataaacagtgtgcctccctgtgtgagtagcctaaggtgcattgaaaaagactgggatgtgttttatttttttctattagatagcattaacttactgttgaagtatttttggtggagtattagtgacaagccattgagtcttaagccttacggcttcctataaaatcactaatttcgtgtgtgtttgtgtgtaggttacgttatatataggattcgtgttcgccgtggtggccgaaaacgcccagttcctaagggtgcaacttacggcaagcctgtccatcatggtgttaaccagctaaagtttgctcgaagccttcagtccgttgcagaggtaaatggttttgagtagcag

SEQ ID NO: 105006 - DNA, 2435 bp, Homo sapiens
ttgtgatttttactaatcttggtgaagagtaattgcttgaaagacttgtctttgttacaaatgcgtgtgtatatactggaagtacttgtggaacctaagctttaaagcggcaagaatatgcagaagagaccaaatgtggcctgcacagcctaaaatatatactaaatatttttaaagctaaacgttgctgagctctcagttgtatggaaaaagataaggtccccaaaccctaaattttgttacccagatattaacatattcctgccctagtcaggaatggagtattaagagggaatgatgtgtttcagtctatgtgtgttgttttagcaagtctacattatctcattacacttgtgatagtctagggagaaatgcttagtaaataacttgagtagtaaaagactcttgtctggtggtgaactagagttgagaattaaaattctttctgacttgctgctataggcaatgtgggagattgaccttgggccttttttcctattctaggagcgagctggacgccactgtggggctctgagagtcctgaattcttactgggttggtgaagattccacatacaaattttttgaggttatcctcattgatccattccataaagctatcagaagaaatcctgacacccagtggatcaccaaaccagtccacaagcacagggagatgcgtgggctgacatctgcaggccgaaagagccgtggccttggaaagggccacaagttccaccacactattggtggctctcgccgggcagcttggagaaggcgcaatactctccagctccaccgttaccgctaatataagtaaagtttgtaaaattcatacttaataaacaatttaggacagtcatgtctgcttacaggtgttatttgtctgttaaaactagtctgcagatgtttcttgaatgctttgtcaaattaagaaagttaaagtgcaataatgtttgaagacaataagtggtggtgtatcttgtttctaataagataaacttttttgtctttgctttatcttattagggagttgtatgtcagtgtataaaacatactgtgtggtataacaggcttaataaattctttaaaaggagagaactgaaactagccctgtagatttgtctggtgcatgtgatgaaacctgcagctttatcggagtgatggcaatgctctgctggtttattttcaagtggctgcgttttttttagtttggcaggtgtagactttttaagttgggctttagaaaatctgggttagcctgaagaaaattgcctcagcctccacagtaccattttaaattcacataaaaggtgaaagctcctggttcagtgccatggcttcatggcattcagtgattagtggtaatggtaaacactggtgtgttttgaagttgaatgtgcgataaaattattagccttaagattggtaagctagcaatgaatgctagggtgggaagctggtgagccagtggccattagataaatacctttcaagtgtgagcttagacgtcaaccctaaaatacttaaccgtaatgctaattgtgatcattatgaatcccttcagtcacattagggggaaagtagttggctataagtacgtcattcttagtccagtcagtcttaaaaacatcttgggttacccactctgtccactcccataggctacagaaaaagtcacaagcgcatggtttccaaccatatgtgttttctgcagttatttctcttgttctggccaaacaaccctaaaaatccttaccattccacaaagttggaccatcacttgtgcacccactttgactatgagtataccaccacattgcatttctgtttgcaccatgtcttccaggagactagactactgttgtccagggtcaatttgagtgtaaagaaaatgtagacaaggaattgcccaattttaaattctgactttgctgacttaatttaaatgctcgttctgaaccaattttctcctatcttctctaggggtttcaaaagactcagttaattgatttccaggaagtactcatagcaagttcataaaagttcttgagacctaaatttcttcacaaaaaaagaaaagatcttaagtcatacattttaattgtgtagaggttgttcaactgaaggaataaatgtctattaaactaaaacaaatggaccttctgttattttttgtcatcttacagtgctaatgtactttaaagcaaaccaaatgccctaaccagcaaaaaggcatcaaaatgtgattatagaaataatataatttgagatagcataaaatgtacttattctctcagttctttgatcattgcatgaattaggtttttatctaaaactgttcagctgggtgtggtggctcaggcctgtaatcctggcactttgggagacaagctggaggatttgttgaggccagcctgggcagcatagtgagac

SEQ ID NO: 105007 - DNA, 1804 bp, Homo sapiens
accctttagcatgaattctaatagctttagtaacctcataagggctggctcaattaggaagtttttctctggtttgagccctcttccaatacttcgctgatctaaatcttgcctcgtggagcaaggcacattataaaaattcctccggatgaatgttgaccatccccttcccccttcagttcttccatttacagttctcatctctttgtccttgcccagcattgttttttctgatcactcatcatccttgttgccgtttgggatggagcacccagaagtgaacaggctcttgtggaagtggttggatgattatcaagttccaagttgccctctttgtcttgaatcctgttgcaaatgaattccctggcaggcttagtatttttggcatgttgctttgctgactcacagtaaccttgcagtcaactaggacctttcacgtgaactattatgaagttagatttcattcattgtgcagataattgcatgacttgaagtgtaggaatttacaatgaccattcttaaaatttctctcgttcatttggccttaagttcaaagctgttacaagctgttacccaccatgtttacagtttctgctatctatcagtaagcaggaggtctaataagaattgccttaaactggccgggcacagtggctcacgcctgtaatcccagcactttgggaggctgagccgggcggatcccctgaggtaaggagttcgagaccagcctggccaacatggtgaaaccccgtctctactaaaaggacaaaaattagccgggcgtggtggtgggctcctgtaatcccagctacttatgaggctgagcagcagaatagcttgaacctgggaggtgaagattgcagtgagccgacatcgcgctactgcactccagcctgggcgacaagagcgagactcccatctcaaaaaaaaaaaaaagccttttaactttcgaatttttgtaaacattgaccaaggtggggccagattcagcgctgtgtggcacacctctacccttccctctagtttggttatcagttgacaaacattcaaccagtgatcctgtaatcttactgtccttcgtgacatctctatgtctcctcgccccatgagtaacaagtgaaaacagtggagtaaaagacttggaaaaaaattggagaggtggagcaaagaaatctttccttggagcaaggaaaagcaagaattgaagaaaagttgctctactggtcagtagggttaagagattcaaaaggtagtgtggaaataacctacaaagaaaccactggatccttaacacacattaaaaaatgaggtgaataatgggtagggaggattagttactttggtttgaaccattctgttggaactcttctagtataatgatgacaaaaaaataatcatcagcttcttactctgtgccaggccttttacatgtgttcctcatgttaattccatgaaggaaggtgccgttgccaccatcttaatgatgcggggctaagtaaattgaagctaaataacttactcaggcaagtagtagagccagaatttgaatccacaaaatttacttgggaacacaaactgttaactactgtgctataatgtactttagcctgcataatatttgaagatttatacgcaacttggtggtcctgtcttcttgagggtgaaggagatactgcatgtgtatggatccccactcaatttgcagtgatatatgtaggttatagctagtggaaaaggatagtcatctgcagggcctcccagtttcatcagtcctctctttagtcatgctggcttatttccagac

SEQ ID NO: 105008 - DNA, 1251 bp, Homo sapiens
caggattccactatggagttcatgcttgcgaaggctgtaaggtaaagcatgcttttgtttctttaagctactgattctgggatttaagaagttgggtttagatttacccatttgtgcaattgatagtctgagagacagtgagaagtcagctgctctttttaagttttaagcattttatgtagtgtataagcataacttgttttgaataatattcttaattcagtgaaagtatttcttttttctttaagattttgaacaaagtaaatttgctatctcaattaaacatacttattgtgttaaaccaagtgcaccaaatgctcattcattaatgtgtcaagcacagttctaggtggtagtgaaataacaaggaacaaaacagagaaggcactacttctgccttgtgggaacttagtttaaaccaaactttgaattaggatctcatcatatactttgacttaatgacacgtcaggtactgggagctgggaataattgctacatacttgaaaaaaatgtggtatcttaaaaaataatgccaagtgagtaaaataatcctgaatataagttgagcccttgggaaagctagtttatttgtaagtttagttgactattttctagttattgctattagagtattggtcaaataattccaagtgagatggtctctacctccctacctatatacagggaatctttctctctttttaaaaaacttggcacaatcttttctcctgagtatcaaaaattaacgtgatgaagacacatgttcttgctgttctctgacttgaggccacaagcaagaatctagtttggcgagatatgatgggtaaacaagataatgaatatacatgatgggagaggaaatattttcaagtgtggctctgaatgaattgcgagtttgccagtttttttttttttagatggagttttgctcttatttcccaggctgaagtgcagtggtgtgatcttggttcactgcaacctctgcctcctgggttcaagtgattctcctgtctcagcctcccgagtagctgggattacaggcacacgccaccactccaggctaatttttgtatttttagtagattcggggtttcatcacattggccaggctggtcttgaactcctaacctcaggtgatctgcccgcctcggcttcgcaaagtgctgggattacaggcgtgagccacgcgccctgccaagtttgctaacttttaatggccgggtaactttgtaagacaagtcagtattttt

SEQ ID NO: 105009 - DNA, 1046 bp, Homo sapiens
aggtcagggctgcagtgagctgtgatcatgccactgcactctagcctgggcaacagaacgagatcctatctcaaaaaaaaaaaaaaaaaagaatcagtcattcatacttcaagagttttggaatttgtagtgaataaaagtatgagatggaaaatgtgactgcaggcagggtctggtaacagggtagtgtggttgttgcaaggggtgttttgggtaaggacaaagaatctctgaagggaagaagaattttgtttggttagtaggtgttaggtgcttactcataccaataagaatcgaaattaaattctgtgtgtcaacattgtatttccctctgtcctaagacatagtgtttcccagatagtgagtcatatactgggactgtagttcgtcatatacactagataggtatgggagcagtgtttataagaagttcatttgggtgtttttaaatgggtaagtaaatcttcctttgttcttagggtttctttcggagaagtattcaacaaaacatccagtacaagaagtgcctgaagaatgaaaactgttctataatgagaatgaataggaacagatgtcagcaatgtcgcttcaaaaagtgtctgtctgttggaatgtcaagagatggtatgttcccagtttaaagagtgttcctaaagtgtatggagcttggcttttattcctcatcatgaaccagagctataaaccggttaccaaggaccctcttgtatttaaggtgaagcagaaaacatattttcatgctttacaggacaccaaattgattaaagtcgtattttagcattatcatcccagaaacagtttttggctaaacttctgttgttgttgcttcttctaaaaagagccattttttttctgtgcaatttgattactttttattttttcctaaaaccaatggagtttaaaaacattttttatatggccgggcatggtggctcacgcccgtaatcccaacactttgggaggctgaggtgtgtgggtcactttaggtcaggagttccagaccagccatggtgaaaccccatatctac

SEQ ID NO: 105010 - DNA, 1257 bp, Homo sapiens
atatactacattattttattttgctaattagaagcagttgaaatcagatgacatctaattttaaaaagtcagaacctctatgttcttgtgaataaaaattcttaacagtaaagaattttgattgatcaaatgttttatgtgatatatatgctttataatatagtaactagctaacgatttgttactgagattttgagaaatttgtcaacttttgcctttattcagatgtataaaaccttgctttctattcgttagtgacactgataagcaagaattttatttatatttaatgttaataatttatcctgtttttcctatttccctattcctgatctctcttagatcgatctggaatagaaaacgtcaactctgtggaggctttgcaggaaactctcattcgtgcactaaggaccttaataatgaaaaaccatccaaatgaggcctctatttttacaaaactgcttctaaagttgccagatcttcgatctttaaacaacatgcactctgaggagctcttggcctttaaagttcacccttaaggcctttgtttatttaaacatgaactgatggtaactgtacattttgtgctaaaatgcatatttatatgtgtataccatatgtggagatagaaaagacctttaagacaataaaagattgtaggctatctctgtaatcatgcaatagctgttcggattgagaactcttcagccatgattagacgttgactgcatctccctgatagaccaatcagctgtgtcgcacttaaactggagaagttacactgaagtataatcacactgaatgttagactttttcatctgccaaaaccaaaaaccattttgatctccctgtggttatcaatataacgcacaatcacaagtgtatgaggacttagaaattaatcctttgtggtaggagttctgttgaatgatggaaatcttattactaccacaagactatttgatctggtaattggagacttcgggatttaggagatctccatgtctgtatttactctaccactgctaaagtgtgtggtcctgggtagtttacttgcttgcggaaaatgagaattgatggtgtccccaatgccccacctcacagagttactaaaaaatgtctgtaaagcatatttacctcttgggagataggcactatgtaaataaggtaaaatttctgttattacaattattcataataatattcttttcttatttctaagcctttctgggaaatcatttcagtccacaccaacca

SEQ ID NO: 105011 - DNA, 1128 bp, Homo sapiens
tataactcttatgggatatacagtatagtttttgtgaatctttacatgatagcattatctttttataattttttttcctaagataaacaaatgcatagttttcttctatgggtgatagaaacagctttttgaagtaatgaaaacctcaaaagatcatgttgattcttaatttttgccttttgcataagcctctttataacatgtatctttaaaacaattaagtctttaggaatgtgtaaccagaactatgttagtattgcttataaaactttagttaggttcaatatatacatatatacatctctatataggtatatagatttgcattttgtcttgtaaaattttatttgaataaattcttcctgtaggtaatgggaaacaaaattaatagttcatatgtcactcatagcatttctatatttgaaagtagcccaatataaaacttttgattctaaaattaaaccagcagcctattacaagcacattctttgattgagtcattggttataaacttactaaatgcagagaaagcagccaatttaggaaacttctgagttggtgggacactgttgattaataatgtactgtatgaattaagtgatgctttaactttgattttacattttaaagttaaaatgtgggcattatgtcagcaaacttaagggcattatgtcagcaagctaaaacattttttttcctgtgcttttaatgtatctctttacatgatctgagagaggattcaagttgatagaaatagctgaggggaaaagggggaacatcttgggatgaagcttgtccttatggtgatggtttaattacagattaaaaaattagaaggaaatttcagtggattaagtgtatagctttcatatctacatttcaagaaattaccattgtaacttgataagagatgatttattttatgtaaacatctttgcaaagcaaggtgtagcagctcagctagatttattactgtgcacgaaagtaaatacctatctcaattattctttttcttttccaatataaagtttgctgaatgtacaagaagagtttatcacttaggatatagaatttttttaggggttgggggaggggatctgttaggaaactgttacctataaacaaaga

SEQ ID NO: 105012 - DNA, 1027 bp, Homo sapiens
taatttttttgtatttttagtagagacggggtttcactgtgttagccaggatggtctcgatctcctgacctcgtgatccgcccgcctgggcctcccaaagtgctgggattacaggcatgagccaccgcgcccggcctgaattacttttctaagcagaaaaaaaaatattaacttaaaaaacttatctatgtgatttgagaactatagttcataaagtattttggaatgaatttttaaaaaacaatcaaatgagtcacaatccataatcatgtctagagaccctttttcatgctgatttcttacaggaggttacaaaggtgagagacggtgtgcatgcagcaatggagggaaaggccttccatgtaagaggaacatgaggccaaatcttggcaattcacttcctccctaaggctctatttttccatctgttaagtagagatgacgataattcttatctgtacagagttgttacaaggcttagggtaaaaagtatttgaaaattgtacccagtaactaacaatctatgaaaatcagagacggtatttcttcctggcctcgttttcttcttccttgtttaaaataatcataaacaaatgcaatacaagatgtgttaggccatttgtcctcaaaatactattggcctcttaattatatctgaataattatttgcatgaaattaagtcaactttactgcaattgtaccgaattggaacaaataaaacttcaggtgggagaaatgttagaatcaggtttgtggttcccatggggcgtggatagtacctagaagggagggattgtaggggactggtaagcttcagatttttgatctgggtgccagtgacacaatttgtgatcctttctcaaggcactcactttcaatctctgcatgtgtctatttttaagtatgtgacactttaataaaaagttgaaaccaaaataaataaataaatatcctctatgtagtctttaacggacctattttcattttctcacatttcatatgcacaacattaaagaagaaatagaa

SEQ ID NO: 105013 - DNA, 1040 bp, Homo sapiens
ccaacttcagtgcagggtttgctatttttaatcacagaacttagaagcttaattcagttaaaaagagaggaagttgtcaagggagggttgctaaaagttcatgctaaatttgcttagaaccagattgtgttcattaatatttatacatctatggttgggaaggggtgattgtgcttctttaaaaacactgggtattcattttccatgtatggcacagccttctgattagggaaggtgggttttcattgtacaatcaatggagatacagatggaaaccatctggcgcctcatcccctttttgtcaaaaaccttgtcttgtctctcacatgtcaatgatgaatggaaggatttcaaactctagctgaacaatgcagtttgaatccctcagctagccaaggggtttttggcaagcatcgatgagcttaatattttaaagaaaccagcaatcattttaattcattagttgaagcctgttgttctagacagtgtttttgatttgtattttgggcactggctttgtttttgattcacaagcgtattccatatgggtatattttcttttatacagtgtaaatcatggggataaaagtgggagtttcatctgataaaatgaccaaaatgctgagagattcttttaattatcttttgcattaattatgattcatattaagtgttaagaccaaaaattttcttgtgagctagtacagagcatgaatcagagaacacagaatttagttaacccagctatagacaattaatctaaaaatcaattcagtgttctgctttgtgagaggaaacgacataaacctgtcttagagcatctcgggtacactatttttatggcttgtctgctgaaggtgggtttctaggatggaagcaaaaaaatcgattcacatggctagctttgcagtcattattcagctaacaaaagccagattggttttcctgcccttcacatttaataaaatgaggtgaatcaccaaaaaagcaagttgatgctggagccttattcagaaactcatttccagagtatgtcctgg

SEQ ID NO: 105014 - DNA, 1026 bp, Homo sapiens
ttcttccaagaacttaagagtgatatatcactctttattttgtgaagtcaaattgattagaggaaacaataaacataattctttaaccatgaaacccaatatattttgaatacttgtctgggccacataacgatagtcacatgttcgttctctggagactgccgggctgagcccatggctcctggtaaacagtcctcacagtatttcttctcagactggaagagatctcacctttggcctttattatcattattatttcctttgctctgacatgacagaaatccatcaccttcttgatactgatacctgttcactgctgtcagatcattaccacgaagggaaaaccagtgaatacagtattttttttaacattcacctagaggttttaatgataaccatgctttaaaaattggattaattgggcaatgctgctgagcagagaattccatattaggtttcactgactgtcaaggggctatgtgacggcagctcccaattcaaaatctggtgcttcaaaccatctcttccagacaggaaccaacttaaatggatgaagagaccccttagggaagtagataaaacattaattttaaaagacagggagacttaatttcagatcttatctttaatacttactagctgtgggacctcagaaaaggtacttcattgccctgaatttacattttctcacctgtaaaagagatgtaacatcaccgacctgtgagaattagttgaatttacatagacaaagtacctggcacattctgggtccattttaaagtgagttccacacactcatttccctcatatagatttgaatccaatatatatctcctgccagcccacacaccatcaaactaatatatcagatcagcaagaaaattagacgagccttttactactctaactatggtccccgatgagcagcatcagcatcatttgggagcccatcaggaatgcagaactagggctcaaccccagacctgctgcactgaaatctgcaatttaacaagatacccaggtaat

SEQ ID NO: 105015 - DNA, 1084 bp, Homo sapiens
accgttttccaagctaagccgccgcaaataaaaaggcgtaaagggagagaagttggtgctcaacgtgagccaggagcagcgtcccggctcctcccctgctcattttaaaagcacttcttgtattgtttttaaggtgagaaataggaaagaaaacgccggcttgtgcgctcgctgcctgcctctctggctgtctgcttttgcagggctgctgggagtttttaagctctgtgagaatcctgggagttggtgatgtcagactagttgggtcatttgaaggttagcagcccgggtagggttcaccgaaagttcactcgcatatattaggcaattcaatctttcattctgtgtgacagaagtagtaggaagtgagctgttcagaggcaggagggtctattctttgccaaaggggggaccagaattcccccatgcgagctgtttgaggactgggatgccgagaacgcgagcgatccgagcagggtttgtctgggcaccgtcggggtaggatccggaacgcattcggaaggctttttgcaagcatttacttggaaggagaacttgggatctttctgggaaccccccgccccggctggattggccgagcaagcctggaaaatggtaaatgatcatttggatcaattacaggcttttagctggcttgtctgtcataattcatgattcggggctgggaaaaagaccaacagcctacgtgccaaaaaaggggcagagtttgatggagttgggtggacttttctatgccatttgcctccacacctagaggataagcacttttgcagacattcagtgcaagggagatcatgtttgactgtatggatgttctgtcagtgagtcctgggcaaatcctggatttctacactgcgagtccgtcttcctgcatgctccaggagaaagctctcaaagcatgcttcagtggattgacccaaaccgaatggcagcatcggcacactgctcaatgtaggtttatttttttcccttcttctaccaagaaaaaaaaaattgtctctcttgcatgcaataaagacgttggaaataaactgcattggtagcaagacaaaggatttaatga

SEQ ID NO: 105016 - DNA, 1041 bp, Homo sapiens
atctgtaaatgaggacacctaatgcggaatggtcggcatgatactctatccttcccccattaagataacaagatgagaggcaatgattcagatcagtatatttttggagctttgagcggataaaaattaaaaattaaaagagatgatgttctgaaatactttgggtaagcaagctcataaaagccatttggaaacctgaaattacacattaattcagaatctccttctgaggggctcctaaaacacctttctgttttcttggcaggatgaaagcattacttttgtgtcactgcctggtgctttcacggggtctattctaatgctcactaaggcgtcatgctctgttctaatgtgcctcttgtagccatctttggtttgaaccaactaaacttcaggtgatgttgaaaacaaataggaattaatacatgaagctttatatcttccctctatagatatgttaaatctcaagttaccaggataatgtgattcatggcttattttccagcctggagggagtggttggtccaatctggagggatttattcagctgctataactactgttgacagtatggggaattggccccacaattccccaaagtctagggactgtgctatcccacagaaacaaaactgctaagctgttaacaagaggtggttcagatctttggtggttaaatgtagtttaatcatgatttacgggggcccggctctttttcctacacctgcctgtgaacatctcctaattattcatttgagaaaactctgaataaaaatatcaatcttgaatatgtgtgtgttccgaggaagaaggccagccatgtccaaggaaatgttcagtcctgtttcatctaaggaaaataattcccaaatttcatccacaggctgatgcttaggagagactgaagtgcttttggatgagttcaaaataaacactccctcctaagttatctcttttgtccttctggagaaaatgagaagggtaaatgacgttccatggaatgatcacctgaggaaagcaaaattaggctgaaacaccccc

SEQ ID NO: 105017 - DNA, 1059 bp, Homo sapiens
acgatgtgcagtgactattgacaactagatttagcagcactctgtccagtacaatacccactaggtagctaaatttaaatttgttaaataaaatgagaaaaacagtgcctcagttgcataagccacacttcaagtgctcgagaacctcttgtgtctggtggctactgaactggacagtacagattatttctgtaattgcagtaaattctattagatatcactagtctagtcatctatacagaatgatagtattatgttaaacagcctcatttttaaaaatcaaagataccgtattcacaaccacactggtatctgctgtttacttctactcttaattccatgcaaggatgaattcagaatgctcatctaggagacctcttagaaggagctcgagttaagactgcttgtcaaacaagttccctgtgcttttaagcactttctgaaatacagagtttattccttggctagcaaacatcttcagagacagagtaagtagtctgatggggaaaggagaatgacaatagcccatttggtaccagggatagctgctgagttgtctctctacatagaaaaaccttactgttaaacactcaactgtgatatggatctaggcacctctattaattgcttgagttgctacataaacagaaaatcactaggcaaagaatatacctcttaggcaagaattcctttgcttagaagtgtgcagaagaaaatctgcctatatacaaaagagcaatggctaaagtgattgagagaaacttaacaaaggtttagatattcaagaaaaactggagtcaaggtaacataaaccagagatgtgtagaaagctggaattaaatgtatgaacctagagaattagcctgttttagtacattctcttgaaaacaatgtttttctaatcagtcatgaattttaaagctctcaatcgttaagataattgaatagggtaagatttgaggtgttttttttttttttttagaggggggagggatagtatttccttttgatttcaatgagaaatgagttccaagactttaaaagcagccattaaacatc

SEQ ID NO: 105018 - DNA, 1096 bp, Homo sapiens
agataactggtcttacacttaggttagcattatgattctaattttaaaagcaccattatttgtaatacttcctaaacataagcgaagtttaaggagtgatagttcttaatactagtctttacttcctttcataacttttaaatctattgaaaaaaaatctagaaaccgaagaagacatcttttgatcaggattcagatgtggacatcttcccctcagacttccctactgagccaccttctctgccacgaaccggtcgggctaggaaagaagtaaaatattttgcagagtctgatgaagaagaagatgatgttgattttgcaatgtttaattaagtgcccaaagagcacaaacatttttcaacaaatatcttgtgttgtccttttgtcttctctgtctcagacttttgtacatctggcttattttaatgtgatgatgtaattgacggttttttattattgtggtaggccttttaacattttgttcttacacatacagttttatgctcttttttactcattgaaatgtcacgtactgtctgattggcttgtagaattgttatagactgccgtgcattagcacagattttaattgtcatggttacaaactacagacctgctttttgaaatgaaatttaaacattaaaaatggaactgtgttctctgtctctttactgaagataaaggtgtagtaaaagctcccacacacctttaaaataaatatattttattctttgccaggagactccatggaaaaaggtaaacagtatatgaacatagaaagcattgttaaacaaacaatctcaatgtacaaacagagccagtgaaagtacatcacagacttgctaatatatcaaaaaaaaaaaattccactagtgcttaaatgagaactaagaaactgacacttgtatctgttaaccactctaccacagctttcactctgcttcatagtgattgaacaaggtcaaaggaggcagattctatgcctgtttctttgggagttgttaatattaattagccccttggcatcaagaaggctggaaaaaaaaatcccaatatcaggcatgaatcaggaaggacactagagttacatggtcca

SEQ ID NO: 105019 - DNA, 1042 bp, Homo sapiens
agcagagagaaaccatttcattatttaaggcgactcaatttttttttttgaagatagagttttgctcttgttgctcaactggagtgcagtggcgcaatctcagctcactgcgacctcccgggttcaagcgattgtcctgcctcagcctcccaagtagctgggattacaggcatctgccaccacacctggctaatttttttatttttagtagagatggggttttaccgtattggccaggctggtcttgaactgctgacctcaggtgatccaccccgccttggcctcccagagtgctggcattacaggtgtgagccaccacgcccagccaggcaactcagtttctaatcagctataagaaattccatttatataggactctcttcagtttggtttgttggtaagtatattgacctgtgaaatggaaatttgcttactaggaaaaccgtcttcagatacagtccctaagcccaagagagccccaaaacagaagaaagtagtagaggctgtaaactctgactcggattcagaatttggcattccaaagaagactacaacaccaaaaggtgaggattatcttcttataaccctttaaacatatgctgtgtggaaaagattgaattttttctacctcattgaatttagagaggctaggtatctattttgttttaaattgctttactcctcagtaagcagtgtgtctaggaatcagtgctgaatatagtccaaaggaggcatagcaatttagttcagtcactttgttttacaaattaaaaaattgaggctcaaagaggttaaataagaatccctaagaatggtccaaattctcccctgcagccaactcactgaaagttgttattaaaaagtcagatcagtactccacactaactgtgacacttatagtaatgggctagatccaggactcttaggctagaactttttttctcacctaagaaataactgtattcagggccacacaaggaacagcaccagttctccatggcatcccctctttaactccagaatctggaaagcccttgaagat

SEQ ID NO: 105020 - DNA, 1016 bp, Homo sapiens
tcaaaaaaacaagaaagtttagcacttttaaaataactgtaaaatttgttgtttgtgattgcaaatatgggaaacattgtatttgttgtcatttgtataatggctgtatgagacaaggccatattgactactttcctcagtgtttttgattaattattaagtatatcaataagtacattagtttatgctctcctaacatgcacagtattatgtggtagcctcctggaaagtgtaagacagacattaacactaccagataactaaggccaaagttgttggcttttattctgtaaatgcttgcttttatttcttatggtatttttagagatggttggaatatacttcaaatgctttatcagtaataataattcatgtatacaaagctaggatttgagtttaacattcatttttatttttcctcctagccgaaagacctaaatacacatttgatttctcagaagaagaggatgatgatgctgatgatgatgatgatgacaataatgatttagaggaattgaaagttaaagcatctcccataacaaatgatggggaagatgaatttgttccttcagatgggttagataaagatgaatatacattttcaccaggcaaatcaaaagccactccagagtaagtaatgctatttagtgatgtggtatagttaattgttgtaaacatttgccaaagatattatagtgagctcttctaagaaattgttatcattctaggcaagttcttcttcatgaaggaatcaatcttgttaatattgcagctgttcccatcacagttgctgtagtttaaaggaaggattggcaaactttttccataaagggctcaatagtaaatgttttaggcttcgtgggccatattgtttctatcacaactacttaatgctgccattctagtaaaaaagcagccacaaatgatatgtaaataaatcagtgtagccatgttccagtaaaatattgtttacaaaaataggcagcaggtccatgggatatagttggacaacccct

SEQ ID NO: 105021 - DNA, 1020 bp, Homo sapiens
tctataaatatggatacataccttattgctattcttttgctttaggtaccagagtgagaaaaacacctacatcatctggtaaacctagtgcaaagaaagtgaagaaacggaatccttggtcagatgatgaatccaagtcagaaagtgatttggaagaaacagaacctgtggttattccaagagattctttgcttaggagagcagcaggtattgtaacacatttaatattactgtatattatagtttaacctatacgttggtattgttagtattatcagtgttgtttaagtactaagccattagtatttcagaagttaaagttaggaagaaggaaaaaattgccttatagaacagtctttctagcaaagttggacataaatttctctaaagtgaatcatgtttctttcctgatttttattataaagtttggtttatattccttccacagttttaagatgtttgggaaaaaatgtaccttgccacaataccagcaatgatagatctattaatattagaagtgctttgtggttttgtttttgtttggttttctaccccttatatcatgaaaaatttcctcccgctttaaaagtctgagtacatagctctcttttagataatgatagttgtgcgggtgaactgcagaatcccattttgctgttataataatatagtacttataagaatataatttgatcctttctgaattttcattaaggagaagtgttgaagttattaacatctagtgagttttctattttgtacattcttctgaaattttgttatttgaaaatttgtcctaatttattaaaatgaatgatacaacattgtgggtgtttacctctgggaagtacatttttaattatatatcagaccttaaattctttggttctgcaatcaccaagtgattgaatttctttccctagtgtacataggtagcataatataggtgaatctttaatatgagtaagttatatgaaaatggtttattacattaaatgctttaaaattgtatttacatac

SEQ ID NO: 105022 - DNA, 1077 bp, Homo sapiens
gcctgagttcaatctaattatattggcacttttaacttctcatactttctgactttaatttacatttaggaggttttttttcatattttctattacgactaaagcaatagaaaaaaataacttcatacttattagcagaactgcctttgtatatgatttgctaggattttgatgatactaggttatcagaggtcttgattccataatatatcacgggatccaagaattggcagagacttctcaggtcatttagtcactattgccccctcgtattacaaatgggaaactagttagatgaattgggattacaatccaggtcttctgatttagaattctttattttttttccattatttaatcttgaattagataagttaaaaggaaagctttattctttactgagtgaataacatttgtttcagtattttatgaagtagtgattatcttttctaagaagttgtttatgttccttctgccttatgattatactttagaaagtggaatctcaagaacgagaagatgttctggctggaatgtctggaaaagcaattaaaggtaaagttggcaaacctaaggtgaagaaactccagttggaagagacaatgccctcaccttatggcagaagaataattcctgaaattacagctatgaaggcagatgccagcaaaaagttgctgaagaagaagaaggtatgacatacctcttgtcattgatagactcatttctataatgaaatatatgtataatttaaaaaattttaatgcgtgtttaaatcatgctttgttttattcaaaatatatttcaatggtaataggaaatccttctatgacagcagttgatctatagaaggaaaacatattggtaaaggatcacatattgtaaagagctacttaattcagcttttaaaatgagaaatagaaacactccactcagctgccttctaagttaaaatcttggaagccggccgggcacggtggctcacgcctgtaatcccagcactttgggaggctgaggcgggcggatcatgaggtcaggaggtcaagaccatcctggcaaacatggtgaaaccccgtctct

SEQ ID NO: 105023 - DNA, 1041 bp, Homo sapiens
atgaaactgtgcaagacattctgaaagaattctttgatttacgattaagttattacggtttacgtaaggagtggcttgtgggaatgttgggagcagaatctacaaagcttaacaatcaagcccgtttcattttagagaagatacaagggaaaattactataggtaagatacaacctttaaaaatttgaacattagttaaaatggaaaaaaaactttattaatagaagacatttttatcagtagaatataagcaaatacaaattgaatctcttatcttgatcctaactttatttttccctcacatagagaataggtcaaagaaagatttgattcaaatgttagtccagagaggttatgaatctgacccagtgaaagcctggaaagaagcacaagaaaaggtaatcatttgcagaaaaagacattcagagaagcttttaaaagcaacttccaaaacaaacaaaaattcaacccctaaattttaaatttagtactactaaaggtgctgagttgtctatttagagactaaagtcttctgtttatccacagaacagataaagtacaggaatttatagtacacacccaccacaaagcacttggccagtgtgactcaaccagagcctggagaaatgactccaggtgtgagaaggtagctcagtctccttgaccttttttcctgagtctgccattaaaaggtgttgtggtggtggtttttgtgaggtacatgtatattacctgggaatcagactggttgcacccagaatcagcctatgttcacagtatggcatccagtcaccactcacttgatctggttttggttaatactgggaagacaagagacaaaatgttaattattatagacagtatttatcaaacaccaagctctgcctcatgcttagatttttagccagagatttaaaccctggaacttcagattaaaagtctgatgttttattaagtaagttgcccattgcagatcacaaaatagtaataatagttaaatgaatgggatattgaagctttgagagtcccctcaattagctt

SEQ ID NO: 105024 - DNA, 1795 bp, Homo sapiens
agatgaatgatgaatggaatggggttgggcctgaatatgtgtcaggacttgtggatagagtgaaagtgagaatattcaaaatagtcaaacaaaatatgggagaagagtagtggttttgtaagacaaatcattagagaaaaaattgaaagccagattgggtccagactatgaaatgctttcaatgtaaggcccaaggagtttgaatttaaaggatattgatctaggagagaagtaggtgtaggggaagtaggctgaaagaaagtactgttctaggaagactaggaaagatgatactaacattttgagattggaggatgttcaggttgtatgaacagaagctatgaattcaagcttaattgatcagttggaaagggacaattgaggatgagaaattctgtttcagttgtgttaatctgtcaatgttagaccatagactcatggtactggtactcaagagagaagtcaatgctatttacctttttctctacagcttccaaactacaaaaactttaaaggcacgattcaagaacttggtcaaaaccagtatgcagtcagtggtgaaatatttgtagtggacagaaacacagtagaaattacagagcttccagttagaacttggacacaggtcagtgtaaatatgtgatctgcctgagggaagggcagtgtattaagcaattttttctggtaaggatgattccaccgttgttggtcctaagcgtgcgtagtgttaaaaaattcctgtaccttcttttacccttcagttgaatttgtgctttgaatatttaaatagtatttatatctaagtagcgtagtatgacttatgttaggtaaggcttttatagactattatctttgtatttatttaaaataaaaggagtagaatatgacagtgtttttaattcttgtaaatatggtcagtaaattcatgtcagcatcagctttacaaatctaaaagtatgcatgtcacctcttgacagttccagttgatgtcatccttttcatactcagcctttatcttgccctttagagtatgagtgggtcagcaccattacttcttatgtcttttcccaccaccgagatccctgtgtattgccttctatactgattggataggagatgatagagattgaggtttcctttttaattccccatgagagttgagaattttcaagactgtatgacttgtagtatgagaacatgagagtgtgtcatgaaaagaatcactaatttttaaatctttataggtatataaagaacaggttttagaacctatgctaaatggaacagataaaacaccagcattaatttctgattataaagaatatcatactgacacaactgtgaaatttgtggtgaaaatgactgaagagaaactagcacaagcagaagctgctggactgcataaagtttttaaacttcaaactactcttacttgtaattccatggtaatttattagatttactgttaatttaatctttcttgcatggtataagtcggattattataattggtttcatgatgggagtggctatagtaagcctgaaggcatttttttttttttttttttcccatcctgcagatttgctgaagattctaggggcacatttctttcttctagtattgtccactacccttattctcaactctgtgtttatgcatctgggcttgaaaacacaggatacacacatcttcacacacattgactaaaagttatgagagtggttattgcagggcctttgtgtactttatggccatctctattagcattttaactgtagagtactcataactcta

SEQ ID NO: 105025 - DNA, 2503 bp, Homo sapiens
tttcctgatgtgggatacttagaatagatttcaggctccttgatggcatgctggcaatttagttagctacaaatggcgttttggttgtttgagtgtttggaaactactgttaaaggagtttggtaccactaggtgattctttaaggccagaatgttgtctttcaattggcagttcacttttggagtagatggagatggcataaaaacatcttagtatatacctgcagatggctttctaggaaaaaacaaacaaacaaaacaaacgtgttagtatgtactcactttgttacagaatctcaagtaacaattttactggtgttcttgaaaagcaaattgtatctttgctttattcccctgaattgttacaactatatcttgaagtaacattttaaaagagctcttttaaaaataggctttaaacctggccagcggaaagttttatttacctgtttcaagaggaatgataaacgtgaagtaaaagttgcccagttggctggctctgttgctgagatgtcggcttatcatcatggagaagtaagcattaagattggaatcaattgagaactgtaattattgtcttgaagaatgataattacacatagtatttttcctttagtaaagtctttggaaatgtaaaagaattaagagaatatacagattagtgagattctaaagcctttattcttcacttggattttaattcaagttggggagtaattatagaaaatttagaatattaatgttatgttctgccttcttctgttgtatagcaagcattgatgatgactattgtgaatttggctcagaactttgtgggaagtaacaacattaacttgcttcagcctattggtcagtttggaactcggcttcatggtggcaaagatgctgcaagccctcgttatattttcacaatgttaaggtaaatatttgctgatataatggtataaagtttgatttgatttggaaccaactaactaaatgttcgatggaattatagctgtggagagatgtgattatctggttattctacttagaaggtgaatgttccaaattatttgaccacaaatagaatgaagtctgttgaccttaatttttatgaattgttggtgaaatcagtcctagtgaattaaggatgtttttctcaccaactttactctttaggctgaagatgggttatgtactttatttagagtaataggaaattctttaaaagttatcaatattaaatcaggtaggtaagtacataagtaaaataggactattttattctgggcttgtaactgagagaaagatgcatttgaataatacagttaggcaaattttattattaagcggatgtaatcaaaattattaaaaatgcattctcttcaaaagatttgtttttgcagtgtgaagtttttaattatgtataaagttttctttcccaaagccatgacattttttcatttgcttctttttgttttcattagcactttagcaaggctactttttcctgctgtggatgacaacctccttaagttcctttatgatgataatcaacgtgtagagcctgagtggtatattcctataattcccatggttttaataaatggtgctgagggcattggtactggatgggcttgtaaactacccaactatgatgctagggaaattgtgaacaatgtcagacgaatgctagatggcctggatcctcatcccatggtaattatttggaacttattatttatttaacaaatgataatgtgtaaactacaaattcccgtcattttagaaaagtaatggaacatttttattttagaacatattgtagaccgtaaagacctaattagggtataatttgatatgtgcctacagtaaaaagtataaactttggaatgagttttggaggtaagtttcatggggagaaactgtttatttaaatttagaaacacctcatattccaggttttcaaacctctaaaccctatattattagaaaacaatccttttctgataaaattatgtgtaaccttgtttctgttctcaaactaccgcttaatagtttgtaaggatgcttaaaaacacattgtattcattagtgtaccatttgtaaaaagacagaaaacaaactaccttgtatatattttaatatatccccaaggctgggcgtggtggctcacacctgtaattccagcactttgggaggccaaggcatatggatcacctgaggtcaggagttcgagaccagactgaccaacatggggaaactccatctctactaaatatacaaaaaaaattaggtgttgctcaggctcacgcctgtaatcccagcactttggaggccgaggtgggtggatcacctgaggtcaggagttctaggccagcctgaccaaaccaggtagaaccctgtctctactaaaaatacaaaaattagccgggtgtgctggagggcacctgtaatcccagctacttgggaggcagaggcaggagaatcgcttgaacccaggaggtggaggttgcggtga

SEQ ID NO: 105026 - DNA, 2108 bp, Homo sapiens
ctgaggagtgggtcataggttcgttagaagtacaggaggcctaggacttgtaactggcatctgaagtgtggggagtcctgtgggattgagcccttaaccaaccctaaatacttgtgctaactccaggtagttagtatcaaaattgaattacattgttgaacatccatttggtgtctggagaatcagagaattggttgctggtgttgaaagcacctgagaattggtgttagaattgaagtgaggaaagcaaacaaacaaacaaacaaaaaaaacacagcggttggtttattggctctgtagccaaaatgtcttatttttttaaaatctcaactctcgttctgagactctattactcttttagaaaatagggtttataatacagataaagtattttgctactttaacaatacaggatttcagatttcatatatttttttttctttagggtggacggcacgtggattatgtggtagatcaagttgttggtaaactgattgaagtagttaagaaaaagaacaaagctggtgtatcagtgaaaccatttcaagtaagggatgtgttatatattgtacatgatgcatacatatgcattatatatatactgaattactaaatatcagctctgatattgacttttttgggtatgttttcaacaggtaaaaaaccatatatgggtttttattaattgccttattgaaaatccaacttttgattctcagactaaggaaaacatgactctgcagcccaaaagttttgggtctaaatgccagctgtcagaaaaattttttaaagcagtgagtaaaacttgtattttttttattgttgttattaagagttgattaggtagttttcttgatttactttatttgtgattagtttctttcatcgtattaactgtgggtataagcatgcttgcactacaaactaatatgcttaatttgataactttaaagggtagactttaatgtttcctaaaacaattgttttgccaagaactaaagtagggaattatgtaactaattgcatttttagctttgtattgaccattgtaaaggtcagatttcccctaacagatgtccagatccttatgcaactctttcatcttttctactctcatttcaacttgatctactgattcttatctttatacatgtttaaaaattgtggtaacatgtataacaaaatgtactattttctacatgttcttaaattgctttgctttgcacataatttttttaggctaccttaacttctctaaaataaggtgagagcacaaataaataatggagatgaatcaatcacagcctctcctctttggaattttggtggggaaatgctctataactgccctagaactaatgtatttctcaaattccaaaaagtagattatcagaaacaaaaacaaaagttgttttttaggttctaacttaaggcctgtagaaatagtacttttggatctaatcttaatgaattctgagtacaaattatgctatattaatgctttcccaaatttctgtcctcataacaattgtttccttgatgaagtgatttgattttaaattttatactttttcattttaggtgcactaagtttaaatttgacaacacagttcacctcttttgtttatgtcttaaacattccagaaaactgttttatacacctaacatcaaatcaccgaggatgataaaaaaacttttaggacttagagttggagatgcttaactttcttttcctttttctgtctgggttaacatcttgccacagattgattcactgcagagtacaaacaatatgtaatgttgaaatctttattaccaagctatttaaagaataaaagtctattcataagttaccaaggttatcctaatgttccttttaggttaatactttttgtcatagtgaattaaagactcacgttttgtattgaaggatatcagaaatgtcaacgtctggaatttgccggctagtaggttcatgtgtggatctgttttcactgtgttaattttaataaaattaatttgtaacaagagcaatgcatattcctcatggagtttattataatagaatgtttctcatatgtaaaagttatcctttttcatgtatttat

SEQ ID NO: 105027 - DNA, 1040 bp, Homo sapiens
ctcctacagacacttatgtctctccagacttcaggatggccagctctcctgtgatctcagttcttcagtgggttcatgaaaaacccattaatttgttgtctgatcacccgttttcttacaaggatggaagctttttttcctgctagttcattatctgtctgaactgaaactggaagtctaccttatcattttaaaaatagaaatttctgaaatattttataacaatttacctgtcccttcacatcctctttttgtcaagtacacatagaaatgaatttcttttttaaaggtcaagggttaaggaatagatctgggaaatgccactaaggtttggatcggtgcacttagaactgttgtaagtgagaggaaatgaaagtatacgtactgaaggtgattcacctatttgagctgccagtgtaagatttttaattgtttttgttttttaaattaataggtaaatggatttcgcagttatgtagatctttatgtgaaagacaaattggatgaaactggggtggccctgaaagttattcatgagcttgcaaatgaaagatgggatgtttgtctcacattgagtgaaaaaggattccagcaaatcagctttgtaaatagtattgcaactacaaaagtaagtaagcaaattatttgtttccaagtcagtggtagaacagtacttcaataaaaactacaaaacaaataacaatatccacaacccccaaaaaacccaaatctgtttttgttaaataagaattgacttatgaaaacaaaaacctattttctatgaaattgctgtattaaaatttatttaaacaattattgagaaataaatttatatgactagtgtttgtagttgaacatatttatattttatgaaatttagaataacaaattcctttttctgtaacttttagccccaccttccccaacctctggggagaggagagggggctggtgactgagttaaaaatcaattatggctatgtgataaagctctgtaaaaactcctgaacaatggagttcacagaactcctaggttggtg

SEQ ID NO: 105028 - DNA, 1117 bp, Homo sapiens
ttttaacatgagattattatcacagtaatacagttgcctcaggaggattggttctgggatgccctttctataccaaaaatcagaggaggatcaagtcccttatataaaatggggtagtatttgcatataacctatacacatcctcccatgtactttaaatcaactctagattacttataatatgtaatacagtataaatgccatgtgaacagttatgctgtattttaaaaatttgtattttttcccaaatatttttaagctgcagttggtcgaatctgcaaatgtagaacctgtggctacccaagggctgactgtatttactatttttttttgtctgtaatattatcaaggatttgtttggtttgttgtgaagttgtaaaattgatatagtttgataaatgaatgaatttaatgagtgtagtctttatatattatgagatatggaagcattatagaaatatttgaatttttttcttttaaagacatggatgaataatatgatgaagacttctgaagccaaaattaaacattttgatggtgaagattacacatgcataacattccaaccagatctgtccaaatttaagatggaaaaacttgacaaggatattgtggccctcatgactagaagggcatatgatttggctggttcgtgtagaggggtcaaggtcatgtttaatggaaagaaattgcctgtaagtgtcctgtaaaatagttttaatactatgttattttatagagagaatattgttgggtcttccttttttaaagctcatctggtagtctcttttactggtgtgttcagatgattcacatttaaagtgattattgatacatttggccattatttcttcaaataatgcttctgtcttgttctttcctttccttcttggttatatatatgttacattatttgatactgtctgcagttcttgcatgctttgtctattttattcactctacttccactttttgtattggtttaatttctatcccctctcttcaagtttagtcatttgcagtctctgcatcaagtttcctgaagagcctgtcaaagacattcctcatgccttctatgttttttgtttttaacatttccatttgattatttcttata

SEQ ID NO: 105029 - DNA, 1020 bp, Homo sapiens
ttcagaggtcatgtattttgatttttaaacatacttaatgatacagtttttaaaaataaaaactttaaagcggaattgaaattgcatactgcttgtttaaatgcacaaaatctctgtatctcctattatctgtattctgtttctttaatttctactaaaatttgaaggcctctgaagatattttaattctcattgtgtcttttgagttattttttgattctgaaaagataggccatcacaatatctttttagtgggatgtcatatttgtcagcattaaggaatcccagaaggagagaagtatattctctgctgctcttaagaagacaaggaaatttgtagaccttggaaatttgatttgacatcctcatctgctgtaggaatgtttagaattaagatcaccaacctgtgcctccttgaaactggtagagaaactgggatcagtattgggacacccagagctgatatgtgaggaattattggcatgatctacaaatgtgtgaaatttgaggattttataagccatttcagtcatatcagtgtttattaactacataggttaatattttgtgtaggtcatttttgtttatactgtagtcttcagtagcttaatggtgggaagcttacatctggaagcttttggggctcctgcacctagccaggttcagtcattgtgattctgtaacttcaccagaactcaaatttcttgggaggttttgaggaccacaaaaattaacttgagtccaggtgtggtggctcacacctgtaatgctagcactttgggaggccaaggcaggctgatcacctgaggtcagaagttcgagaccagcctggccaacatggtgaaaccttgtctctactaaaaatacaaaaaaaaaaaaaaaattacctgggcatagtggtgcgcacctgtagtcccagctactcaggaggctgaggcaggagaatcacttgaaactgggaggtggaggctgcagtgagccaagatcacaccattgcactctagcctgggtgacagagca

SEQ ID NO: 105030 - DNA, 1032 bp, Homo sapiens
tggctcactgcagcctcgaccttctgggctcaggcaatcctcccgtctcagcctcccaagtagctgggactacaagtgtgcactaccacacctggctaatttttttttgttttgttttgctagagataagatttggccatgttgcacagactggttttgagctctgggctcaagggatctgcctgcctcagcctcccaaagtgctgggattacaggtgtgagccactgcgcctggctgcaatttagttttttacattgaatcggctgtatttccctgtttctttgtattgttattttctgttagggctttggcatttgaaggcttagctaactctctggtctttgcggtctggtttcatactgggaagactttcttcatccagttagtctagctagagaatcctgagacctcacaaatcttttatggggatgcatcctctttgggtttgtaatttcttaattgaagaggtttgcctctgtccatctgtctgctccctctggtgtgtctttgtctgctttacttgtggcgtctcgtgctgtagtaaactacagtactggagctccaccttgtgtctgtttctgatactgcagggtctgatgctaaaccaaagcactttgcttttgttttcaatggccctcaacctggcaccctgttcaatgtcagtacttagattcagtcaagaagtttctagggtagcactgccctcagctgttccattggaggtatattccttttctgctcctccccagggagaaggtggaagttgttgttgtcttgtttgtttttctcaatcttgccttgctggggcagataggagggaggacatgagctttgatgctattttatgctcacctggggtgctggaacttatcacaaaggcagttggattgtttgttattgttgaatccttgtcttcatggggaaagaaaggcctggggtttcttgttttgccatctggctgaccacactcaaatgttacctgttttttttagacattatcttagcaagaatggtaagtctttgaacttgat

SEQ ID NO: 105031 - DNA, 1028 bp, Homo sapiens
tgccagagcgtaatgtgtacttgaaactttggggggacaaaaccgcgaacgtaacatacagcccccgcttcctctcttttctttttaaccagactcttccggggcagccgaacctgaaatggtggggatggcgataatgcaagtgtgtctgtgtggggcagcattttctccaaatgtagttcaagaaaaccctgggaaaaggggtgtgtgtgtgtgtgtattctaaatgcagctctttctggggctttaatctcaaagaagaatgcattgggatttctacagcaacttgcacttcaatttggaaagcctcattcaatgcgctcaattgagagcgcattggggatgactttcacagcagttaatactgtaggtcgtccctctgtcagggtgagattattaaaagaagtgcttgtctacgtcagcatcgcaggtgtaacggggtgagggctgaatggatgtcctggagaggtgactgaagtgcttagtcctgaagttaaaggatttcgacgctcagttcttgctgggaagtagaagtaactgcagcggaaggaggaagggagactggattcccacgacagatcgataattcgccggcatttcacttgctcagcgtagagttcagaccagggtcatttcctatacagaaaacctaggtatttcggagaaaagtaaaaagtgttacatttttctggacttttgacggtctgttcccccgtccctgttttaaatacctcaagggagctttcatataggcatttttgttacttagttcgttttctctttgtttgggtgaggtttgggtgagttgaatagcaatttgtgctatattgacaactgcttcttataaaaagggtgctactgacagcagcaaaacattttaatcacttatgtttgcgtgccagggtacattgcaaaataacttgccatgctcttattgttgaaattctttgaatgttgtatattactccgattatgtagaatgaaagtatgaagggactagggccaggagagaaaatgtcagatactaa

SEQ ID NO: 105032 - DNA, 1123 bp, Homo sapiens
ccccatcctcatccttagaggccccaggcaaacgcttcggattcccggttaggtctcagagtaaacagcacgcttggaggattacaatcgacccgaggccaattcgaccctttccctttgccgccctcaattgacccttgaagcagcccctgctctcccttcaaatggaaaacccacagacacacacacaaacaaaaaccccaagtcttcctttcggttgctacccgcaatgacgtttcccccctcgggtcccgcccctccagggggcttggaattttgggattggccgagaggctgtggcgacaaggcccggattggacagcatggcgctgactgacagcgggggcggccgccgcgccctccctctctccccggtgtgcaaatgtgtgtgtgcggtgttatgccggacaagagggaggtgaccgtggcggcggcggcggcggctctgtttattgtccctctcggtgtgtgtgtgtgaggaaatcggggctgcagcgaggctaaggctgcctttgaagcagcggcggcgaccgggacgactactctggcgactcgagtggctggccttcgcggagtgtgagaaggacaaggcacctctgcgtcctcgccacgtccgagcgcctcgggctccccggccgccctcgcggctcgcacgcccgggcttcagcccggcctgcagcggcgcccgcgggcgggcgagaaggcaacgccgccgctcggccgccgccggtcgctccctgctttctcctcagccgccgcgctaggcccgggcgacgcggacgccgcgcctcgagtttgagggcagccggcggcgcggcctcctcagcgggctcggctggacgtccgctccggatcttcgcgatggggcgcgggggtcggcgcggctaggagtgcggcgagtggagcggtgggtgcggagcggcggggcccagcggcccgcagggaggcgggagcggcggctgcggcctcagggcctgtgagctggaggcactcgccatggccaagtcgggtggctgcggcgcgggagccggcgtgggcggcggcaacggggcactgacctgggtggtaagtggctggtccccgggacgggcggctgcattgttccgggcccgcggcgggggcg

SEQ ID NO: 105033 - DNA, 1070 bp, Homo sapiens
aaatgaccatgaagaaaattgtttggagataattataaaattcagtgacctttgagaacctgaacattatagaaaagctggcaataatcaaggacttactgaagtagtctgttggttcagtgcatgcttagttggcagttaccaccctgtgctagcatatttcttttgctagctatccatcatgtaaccctcatgaaaattatctttatacgtggactataataaaatattgaattaaaacctttcttccatatgtgactataatttggagtaaagtcttgttgactcaatatgggattttaatctaaaactgtaagtatggttttaaaagttaaataatgatattcatgattaaatgctattcatgattatgataaaatcttgggcttatgatagtaatttgacattttctgatcagccattcatttcttcagaagtggttaaattagagtctcctaatatttttaattaatgtgaaagtacagtagctcataaattatataatgcatgaaaatttatatgattataaatattcaggcatttaagaaataaaatgaagtattttgccttacatctttttagtggttattttggctaaataaaaatcttttttctaaacattgaaaaatacttgaatagatatgagttatgaaaacatttaacattgacaacataaactaggatacattttaaattccataatacgtggacattttgaaaatgccttacctttgagttatatttttatctacctcattgaataaaatattcttgattttgaaactatgtaactatattatacagtatctatatgttgtatcaagaggttttgtgtatattctgtataacctctcaaatttagtgaacatttattaagcatttatgtacaaagcattgtgatagcactgtggaggaagcagtggtgaaaaagacatagccccaagcctccagattcctttgtgatattctgcaaagtgagttctcaactctttatacaagaaaaagacacactcaagagtctcaccctgtgccactcaatagaacgtgacatgtattataaaatatataat

SEQ ID NO: 105034 - DNA, 1066 bp, Homo sapiens
taatttactaaactgagtatacatattcttggtaactttctaccacctctaaaaatgagtctttgacagaatatattgtgcaaaaaaagatgataggaattttctgtataaatagggtgttttatctccatatactgttctttaacataagagaccttttttattttgctcatagtatgtttgaatgtttaaacatttaagtattaaatcatgaactctatcttattctttaactttctagagtcttaaaagctgatgatgcctttaggactgaaaattttaaggctttaataaatgctgtcagacatgttcaacagctactataaaccttctcttaaacagttaaaaccacagttctgacccagacccacacaatataattaaggcagttattggagtaagctagatttgaagttaacgtaatttcagcctatcatattttatacccacacttttgagggacatttgaatctagtgagctctgaaaatatacaagatatagaagtgcatattgagagataaatttgagtatatctgttaatgtttatgtcttaagattactttccttaagtcttttagttcttttaattcacctttcttccagtaacctctctgtttggctcttctttcccagatatccccctttgctagccattcctttaaaggagcagttaacctgtgtgtaacccagatgcctaatagtttaggatgggtgaaactaatgactcccggggaacactggtggagtcctgagtcccacatcctccttacaagcggctgtaagaggagcatgcagtaggaacatatatgaacaccagaggatgttatagtggcgttgtccaaacttgagtggagcaattgacagttccacatctaggtttgtcaacaacaaataacagttggctatacatatctactctgagtagtttaagaacattttctttggagagtgattgttcagttgttacataatctctaactcactgattctaaaaattttcagattaaattaatgggcatacctggaagaaaaatagctataggttggttgtcaaatagatggtga

SEQ ID NO: 105035 - DNA, 1052 bp, Homo sapiens
aggtaggtcagataaattatttatggtcagctccaagaaagcaagttgtggggagattagagtatatttttagtttccatagcctgccttagaaataataaaggctatgggagttatgagccaggaaccatgaatgaaaatctggaggtatatatacacatatcataatatcacactgagtcagagaaggccttgcagaagaagtaatatctgagttggcttttggagaggaggaagagggaaagtttcttagtatgaggacaggatatggaaggggaggttgtttggggacatgagaaatagtgtcttcaaaagcactgaggtgagagacatctggtatattcaggaaaaagtgagaagtagagaatatggaggagaatagtgagaaatgagactagagaggtaaataattgtcaggtcccagagactttgattaccttgcaattatgtaataggcaaccatgaaagtttcctattacaaatggagtaaattggaagtatacatggaaatcttaaaaattcttatccaaattctacaaatggaataaattggaagtatacacagaaatatttacagtgggaactacaagtggattcatgtttgattttcaacataaaatggaataaccaaaaacaagactcattgcaagtaccggtttaccagcaacaatttgagattccttgaaatacagctgctttgctgggtatctgtgggaatgacggacttcagggtgcttgctgtatggtgaactgaacttgagtgaatcttagcagcctcagtagaacaataattttaagagtgtattaaagaagagcttcaaacaatatagtccaaactgaacctctagggagccatagcagcctgacatgtagtaatcaaaaaatctttgagcaaaatcttctgtagaatattagttacataaagccaacatgcaaattgttctcagtcctgaaaatagtggttacagccacaacctaaagacaagttctatttttatatattgtgaatagtatggcttatgcctaaaccgtagacacacaggtcttgttct

SEQ ID NO: 105036 - DNA, 1054 bp, Homo sapiens
ttaccacttggcccaagcctcactccctcaggtcccagcaaattgaatccatttccctctttatagattcattgtaccatatacctctctttcatgacatgtattcaacaaatagaaatgaaaataaattatttgtctctctctaataatgtttacattagattgtaaacaattcttagggagagaccttgtctttttctactcacttttgtactctcagtattcatatatctggcatagtacccgatacatagtaagtgtttagtaaagattggtgaatgtaaaaatgtacgtggcataaattctgcatcaccctagggctatgtagagcactgtaagaacctcactttgttgagtgtcctttggatggtcttagatactttttggttttgatgagttttatccctctctttgtcactacagtcattttagcattttggcggggtgagggggcgggtgcatggcattatgtcaagaattcattcagcactcagcaaatatgcacattgtcaaatattgtgcttggcagtctgatgtaatggtgaattaagaggcaagcctcaaggtgcgtatcagctggtaaagtgaaagacatgtgggtcaactgtttagattaatgggggtaaatggtagaagagtatgtgtttgtttatgatactgagagaaagaagacagaaacaagagccactaacaccctgaatctgagtgaaaaaaacctcatactccaagtattttgttttgttttgttcactctacaagtatttttttttttctgttctctctacaacaatcaactcagacctctgaccaaatatgtggaggggtgggttcccccaaataagcaagcaagcaattctgcagcagaaccagctgagtgacctctaatccaatcaattctaacatgatcttcctggagataacattagataccaaatgttgagggtttagtccccaagactctcccctccccacttcagatgccaatcacaagctccagtttgttttacctgtgcttctgaccaactggctataaatcaggttcctatgactctct

SEQ ID NO: 105037 - DNA, 1030 bp, Homo sapiens
aacccatgtatccagacgctcagtctagggctcttggccctgggtagcgttttgaaaaggctggttatccttaagtactgaagattgataaagcccacttacttacttaaaagaatatgccctgaaatgtgttttctgtgccactgacaccagaaatgctatttagaagaagttatcagtaatcctgacaaaggatgcttcctgcagctcaaatcaggctggaggtgcctttatatttttcattgaattactgttttggtgactcgaatgaatcatcaattcatttatttgtcttcaaatgtctgacggcacttaaggtctaaaaaagaaggtaagtttaaacagatagtttgatgttaaggtataaattgaaagtatgtaacattttccctgtgttcattagcagctcatatcaagcacccaaaggaacaccttggatgtttttccttaggcccttaagctatttaaaagaatacctcctaggtgtgttgtggtcttttacaggaatgtgtttctgatcatctgaatcttaatcatgtccaactgcctgcaaaatttcctgaaaattacaagcactcgtcttctatgttcaagattatgccaacagttaagaagtaaaaggaagtttttcggaactgtgccaatatccagattgcataggcgagttgtcattacaggcattggcttagtgactcctcttggtgttggaactcacctggtttgggatcgtcttatcggaggagagagtggaattgtttcactggttggtgaagagtataagagtatcccttgcagtgttgctgcttatgtgccaagaggtagtgatgaaggtcagttcaatgaacaaaactttgtgtccaaatcagatatcaagtccatgtcttctcccaccatcatggccattggggctgcagaattagccatgaaggattctggctggcatcctcagtcagaagctgatcaagtggctactggtgttgcaattggcatgggaatgattcctcttgaagttgtttctgaaactgctttg

SEQ ID NO: 105038 - DNA, 1136 bp, Homo sapiens
tgccagatgtacatcttcttagaatagatgtctgcagaaaacatatagacatgctagcagtaactgctagattttaaattgagctgcctaatttgacttattttatgcaggaaaaacgaaatatgtggaaaagatggcagaaaattcaaacaaaatatataatggtttaaaaaaagcgtttgataaagtgaatgagatttactgcctatattcaacaaattcaatggataattgctcaacttgaccactgttttgcctagacagcctaaacttgaatctctaagaaattcctcttggattaatctgattgtagcttggctgccagacccataattctaagagacaggaagattccatctttatttatggagaagttgagaatttaaggctttaattcatagggaaagtgactgtgagaaataccaaggactttgtttttcagtctggattctgagttgcaaatagcagaaactgactctgagctgaaaggagatttattagaaggatatgtgtattctcacagaatcagtgggaagggaggagaactaggctctaaaattactgagaaactgcggaaacaatttgtgaggatgccttgttactgtataatgctgcaaatctaaatctagaaatagtgattattccagtgaaaaaaaatcagtgtcctcgccttgatggaaagaggccaatgcaatcagtctgttacaggatagctacctggttgccctcaacccagataaatagttttatatattaggacttagggctgcttggtgttgctggcagtttgagcactcatcagtggtagtgcctggttgacttttatgggggagattcttctgtctctgttgccatagccactggttcatgagttaactggctgaagacagagattgaccgacatgcactagatacattgtctgattgagtttgctccatagtgaaaccttccggtgaggattcatatagaacataaataccctccactctgggtccattctgagaaatctacatacatacttctccctcgtgatttcttgcacttgttctccagtcttgatccagctacactatcagtcactccctatgaattgggcttgcaccatacactgaacagtatttctggaaaaagtgaa

SEQ ID NO: 105039 - DNA, 1115 bp, Homo sapiens
gtttttattttcctgctgctatgtgttgtgtggttttttattggggtggctagtttgttattttaactgtggctcagaaacagtgtctgttagtaaactgaaaatgattcccaaagggaagatgtactgtggactgttgatacccaatgtttctgctacaaaacctgtgaaaggggtatggtgtgtggccagccaagtcaggagggccaagcaattggcagcagacaacagcagagaaaggtgggaaaggtgggggcaggagagaaagaggtgtaagagaagcatggcaaaaaaaaaaaaaaaaaaaatctatccaaaggaagagaacccaatacttagcacagtaagactaagagatatctgatagtaaacctaaaccaaaggataaggggaaaaaaaaatcccataagaataagagaagacaaaaaaaagagaatgggagtaataaagactgaaagaagagggcttataaggaagaggaatgtactaaataatacctcatagcatagatcagttcaaaggcagcctagctccccagccagagggcaaggtctctttctcacatatcagagtgccacattaatgtggctttatcaatctccaggccaaggtcttctactctgatttactccatagtgccctttgacagtctgacaaagcctgcgggccctggaatggtgtttaaatgcataaaatataatacataagattatagcacaaaccaattttattgaaatatctgtttatcgacttataaaagaaaccactgttactaatatatgtgcctcttacataataatgcctctataacaagatcttgtagtgggactagtggctactattgtttcgaagtaggaatgggcataaatgctactatgagataactgtggcagctgtattgtgatatgaaaatatttatattggtgacataatcactagtatggctactattgaggtttatggcctgtgttcaaatgggaatgagatggtacattgccatttaagcttcacaaacaaagttgcgacttttttttccatgcaagttcatggatgccttgaattctattggtggatgccttgaattctattggtagatgccttggaggtctctaacc

SEQ ID NO: 105040 - DNA, 1056 bp, Homo sapiens
agctcccagtggcccccttggctaggttcactgtagccttggccaatatcacctgaaatgagggtgaattatcagactacattgcatttcagccaaaagtttcaacttcccctccaacaatttctcttaagtagacttgccaaaatagtttttaaagattcacttcgtttcccttcccacttcccagttatcaggaaatggctttggcacaggcaggtagatggagaaccatgggaaaaggtcaggatctgaagaatttttaaagtagataataaggccctaagtgataaagagggaactgtggtcatggagtgtttcctaaacagatggctcatgttatccagtgttgggagaagataacagaatgtccctgtcttggaaattagcatgtttttgtttgttctatttgatgaaatagaacctgcttagtagaagaagaaaactcttctaagaaaggctttgaccttgtaggggtggcaacatctcagaaaatgccctctttttgtgcacatagactatttgggaaccaggcaacctagttctagttccagctttgactctaaccatctctgtggcactgggctggttacatcaaatgttctgggctctacttcccccgtaagagggaaattaggagttaaatggtttctaaaatccctttcagttatatgggtttataatgtcaaggatgtgtctgacattgttttatttttactccatatgatgtcttctctgtttaagttgactcagactcatttctttgcttagggcttccagcccttatatgttacagatccaacaatgatagatggacactctgcagtcctgagggtctgttacatctggagcacttctgggagcctacaataaaaggatgagggggagtgacacaaaaagagcaatagctgactggtaaagggacaaggtacaaaggggtgaaacaattaataacttttcttgcagcaataattgccatgcgggcaagatgttggaagatgaagaaggttcctaagattttgactatgtgcccatcttgtgtccaactctttataacca

SEQ ID NO: 105041 - DNA, 1013 bp, Homo sapiens
gagcccttatagactctcagacactccatctccctaagggttgaaaatgatgtcttttcttctaagttggagacaaagtagaggaaaagagagaaatgctggtacatttaaagtgaaaaatttacttagtacacattcagtctctccctgactctcactctttgtaaatattttaccctcatgttttgattaggtgtttctcaaacttgtaggccaggctagcatcacaggttcagtaacagtgcatctgggacaccaggaccagtcctgacaggttaaacaatggtgacctcctcacagaatctgacctccttctgacagtggccatccctgggtggctttcccggagaacagaggtgtcatcctcttcatctttccagattttagttttcatgaattaaatactgttgtttccatttccccaatgtgagaagcttcctccttttgttttgaacctgattgtgcaaggaggagccggtaattagtggctcaccctctctcctgctctttctccatttccatatggacttccataaagaggtggcaaaatctgcattgttaagggtagagtggcccacccccaggacttttaggttcttgagaggctcccatcatcttttagccatccagatcttcattgagcaaacatattctgagcacagactatattatttgctccaaggcagctctgcggatgcccacagctgtaacagtcagatggtccgcaggccccccaacacatgggtgtcttgctctgctctgtccagtcctcccatctgtgacttttggtgttggtgaattggaaagacgaagaggaggaaatgctcagggtggattgtgcctctgcttagactgaatgttactaaatcagggaattgaggagaccccacctggttccccaccaccttcttcctcttacatgctgtgactctgcacaaagcaaaagccataggcatggtaaaaatgtaaaacatgggtgtacctgaccaaaaacaggtttgttgagctgaata

SEQ ID NO: 105042 - DNA, 1128 bp, Homo sapiens
ttgtgaaaaatacggtgctgtggcaccttattctcattgcctgtggcttgagtaactgaagacgttttcatgccatatgaaaggtatttagcatgctgcattgattccttatcagattaaatctttgcttttaaagagaattgatttttagcccatagcaattcttgaaagtaaacactccaagatgaagctgccctttcccatcaaaggttagacaccctaaatccagaaaaatcttcaacgtgtaggagacctgttcacaggtagctctaggttccggtgaagtggctgcagcacagccttcagcatcacttgctgcctcttctgcttgcaagcttggtggtggatctagcgcgtctctggttgctacggcgattccccggcaggcgtcatccgtcgctatggcgttctgcactgcgcagcatggctgctcccgattggctgaggcgccccaggtggcggaggaagaattgtcggcattggcctggccagcgctggttggtggcctggaggaggatttgattggaaaaccaacggtgcagctggccgcggtgtccctgaggttgaggggaccgggaataggctggggggaggacgggacgggctgagactggacgggacccccggtctgcagcagcaggtgacagcagcagggacaatgataaggagattggcctgaaggagggaccgtccctcccgcgcggtgagtaggcgggagccggtgctcggctgtgccggcgagcagcttgagtcagggtctccggggagacgtcctcaggtccctgtggagcggccccgaagcctcgggagccagcttcactagacaagaggcagaggtagagaatgcggctgtggtgggtaagtgagtcactgcgtgaggcagtcttttcaaagcaggtgggtttgtgttggacggatggatggtgggaaagcgccatcaacgatgcttcttggcgcttccattttgataacggaattattctggttaaatggagcctgaatgtgtctcttccaatctgctccgacgcctctggaggttcattcttcatctctatgagcgtcgcttttctgccttctccttacaggatgctgctttgactttgcccctctgcttttctgccctacttc

SEQ ID NO: 105043 - DNA, 4576 bp, Homo sapiens
ttctgaccatatactgccctattttaaggaccccctctttagttgtaagaaaaacatgaatttaaattgcaaagaggatttttaatatttgcaatttttaaaaaacaatttttaatatttgcttttccagttatgtttattgatttagaaaagctaaaattagcaagtcataagtttgtagtgttaatagtaatctcagaaggtttagtatactcattgttagccatgtttagaattgaatatttatattttaaaattatttattttaattctttgttttaaatagtcctgataaacctgtgagtgtgaaaataagttttgaagatgaaccaagaaagaaatacgtggatgctgaaacttcattatagaattgaaccaagaggcattatacatatagatatatacatatgtaatgtgtgcgtatcatgtcactatatataagaatattgtatgtcatgctgtttatgtgtgactaccgggtttttaaaagtagtgtctggagtttgtaatgagcaccgtggagactatgtatttaatgaaatgctctctttgaagtgaggtacatggttcttaactattcaaatatttattctgttagaaaaaaaaattttctgttttgcaatagaaggatgtggagaaatgctttcagtctacttttcttaaatctctgttcatcagtggcaattcgtaaaaaccttaagtgatactttgtttatatgtttataatttttaggtgtttcctgaaattttcacatattatttcacttttgttagtgctttatgggaagaatagggagtctataccagtgctgtgggaaaaatggtaacatttcagggcttctctatttgtgtttcatttctgtagatgtccatcgtgtttcactaactggcgttttcttagccatagagatgactgtagaacaatagaaactttaataatgatagtttttaacttttatgtttaaattttttttaaatcttaaaaccttcatatctaggtatccattgtgacagacaagtaaaattgcaggtgatttgataattaagcacccataccatttataacttctgaatttaaaaagttatacaatgccagtttgcaatagttgattttgatgcctttgtagaatattttttctgaatccttatgctcttttaaagccaatgattcccactctgttctctgccttgtctctctttgtcttaaaatgctttagtttccatcaggttcaagttcttgactattattctcttataagtagtaggcgtaaataatcaggagttagaattctctcagaagggtctatgatcagtattactttattaagaattacctttcattttctctttatgttattctttcacttttgtagattacatttaatagcttgttacctgtgattttattttaaaatatttattttgatatgatgcttaaatattatataaacatttggaaaagtaacaaatagagtaaattgttaatgtaaatagttggtgcttactttcatttatgtttattatcttaaagcaattgatagattttacatctttgatataaagcactgccatatttatattttaaaaggaaattagacattttatatgtagctcagattaatgacatttttattttgtgtattagtttttgcttttctgagctttttaaagtctaacaaatctttttagtcatcttttatatacttttagttccacatgaaataaatgttgttaagcctgtaggactggatgaatggggttgtgaaactgatttgacaagagaataatttacaaaaatcaaatgagtattgagaagccacagaaatatcaaaaatggtgacatcactattaggatgaaaattttatgaaattccaatgctccctttaaccatataattaaattacaaaggtatacataattaatctaataaaggatcatgaggaatgccaaaagctgaaattttagcaagtctggtgttttaaattcattataaactatttattaactaatgtaatgtcctcctctaagaccatattgtaagagtcttgttaaaatgatggattcaacttctgcctcggatgagaggttggaaatgtagctgcttttctttagaaaatatgtagctgtcatcatttggtactgcctaaaaagagttagactctattggcaattgatagagtattacccacggtgcttattattgtttatgagcttccattgtaatgattcctttttatttgtagcagcataattatttccaaagaccccagtatttgctgctatttttaaaactcccctgatgtacctgaacaagaggatttcctcacatcatttccttgtgtctggacatcaggggtaacaactgtacttactttacaggaagaaattttaaaactgaaaactacctgggatcatagtgtttctgtgattttatttaattgtgtatagtaattatccagtgccagaaaaaccgtcacttgcaaaatactttgcactcaaaatgtttttacaatgcttctaaatgttactggtttctgctttcttttgactacttgactgacaaaatgatctgactactccatttaagagcaaaggtaactcatgtttaggtaattaactgcttgttttaagtgattatatttcttccactgtttttgaaaaataatcaaagatagcattcattgagagacagtgacagatataatttactacatatattgatttttaaataaagttgccttaaataagtgtatgtaagcagtagtagttgctatgtactgatttacctcaaggtgcaaaataattaaacctgtacatattccatttacaaaataaattcagccctgcactttctttagatgccttgatttccagaatggagcttagtgctactgaataccctggccacagagccacctcaggatattcttttctccaccctagtttatttatttatagatatctgtttacaaagtctgtagtaaatcctgatgctgaccatctgaaatgtactttttttctgaatgctgtttcaatctaaaatagcagcttttgagaaaacaatgatgtaaattccttatgataaaaggatgattctatatattctttaatgatattaaatatgccgaagccaagcacacagtctttctaaagtgtgtgtatgtttgtgtgaatgtgaatgatactgatcttatatctgttaaaagttgttttaaaaagctgtggcatcccattgttcatatttgccaagtcttctgtaaagatgtctaggacgaaatattttatgtgctaatgcatgtatttgtaaaccagatttgtttaccactcaaaattaacttgttttcttcatccaaaaaagtttatttcttccacgtacttaaattttctgtgtgggtataatatagctttctaatttttttctttcacaaaggcaggttcaaaattctgttgaaagaaaaatgctttctgaaactgaggtataacaccagagcttgctgtttaaaggattatatgatgtacatcagttctataaatgtgctcagcagtttaacatgtgaatcctgttttaaagtgctcagatttcaactgtgtaagccattgatataacgctgtaattaaaaatgtttatatgaaataacttaatgttttaaatttatttatgtagatcacatcatttttatcgtatgcagtgcaaatatgtgaaatgtcttttggtttattccaacaattatttattttagaaagtaagtttaaagactttaaggacattcaaagtttaaaatagtgttcaaattgcaaaatttggcaatcttcatataaattggtttcttttctaacttttcaaaaactaacattaaatgtcaattataggaaaacatagttggaaatgtaatcatccaaagatcatttttaaaatgaaatttaattagcacatattgaacatttgacttaattgttaaaccccagttttgttttgtttttttaatcagatttttgcacactgattagtttttgtgttgtggcttttgttgctttattattcaaggttttttttttttttcttccccatgggggagattgtcttccaatgtttaactacgtttaaataaataaaaattgaattttattgttcatttatataaaatctgataccttgatgtaatttcacaatacagttccaatttttatggcttttataattacaatgatattttcttctataataaaatccaaagtaaacatttaaattgtagaactgatatttttcatttatatgaagtataagcctctactgggtctatattgtgaatcatcctgcctttcaaatttgtttcataattgttagatgaaaactatttttttggagatgttactgaagttgattgagcaataaaagtctacttaattagttgttggctattgtctttactttgtactctgattattagaagagccacatctctctctcagcttgagatgggataggagaggaaggaaaatgagtgatgtctgtttccggcctcctaatattcctaggcttcagtaggagagagaaaagaggaaacactgagaaaa

SEQ ID NO: 105044 - DNA, 1050 bp, Homo sapiens
taggtagaattctgaggtgctgtgaaatactctatatacacaggacttctactacaaaagataaatattataccctaaatgtcagtattgctggggttgagaaaccctgccttatccaaatgacattctgcccatattgtattgtgataaggtttcacagaatgttatctctcattataaacctacataataattgataatcacatttatgtagttaaattgtagttaaatcttaaatagtataagtgacagtgatttacataaagaaatgaaagttaaattagtcatgttttacaagtggttgtttttattttatgttacaagtatgtgttcatgattataaaatttttcagtaatggcagttatatttaaataatgtcagtttgggtttctaagtctgtaaaatgttataaattagtcaattctcttggaaaatattctgggaaaagtaacctcttcacacatgtgttataaaggaagctgaacggatgcttcaagatgatgatgatactgtgcaccttccatttgaagggggaagtctcttgcaaattccagtcaaggccctaaaatataggtgagatatgactttatgctctaaaacttttatatgcatgtcaaatgtattaataagtcatataatgcttctttaaagtgatgatttctattttataaaagatgatacaatctgcatatggtgtatcaactaaaggagggcttcacacaatttgaaaaggaagtcccttgctcctttcccacccaagctggacttggactaacccaagctggacttaaactaacttccatgccaagccaataaaatttgcttgtcttctatcactccatctatcttagtgaagtttaaaatcagtacatgagtctgagaatatttccattttcccagtagtgtggctttttcctttgtgcccttcattagggctggggtcggtgggtgctggaaaataaacgttttcagtaatctttgtcagtgtccattcaaataccagtaattcattttctgatagccttccaatatgtaactatgtttagagg

SEQ ID NO: 105045 - DNA, 1476 bp, Homo sapiens
ggttcaaagcaggttagagaagaagctgcaaggttctttaaggttaagacttagaaatcacatagtgtcactttggccttattctgtgggttaaagtaagtcacagggtcatcctggtttcaggggggaaggaggcagactccacctctaggtggaaagattgactgagtcaaatgacaggaggtatagttatagggataggaagaattactgtggccatctttgaaaataattcaccatgtagttcaagatttaagttatttcccattcgttgggtatttcttggaacagatcaagtctatgttatggaaatttagtgcaatacagcaaggagactttttgaaaattatatttaattttttaacagcctactcatccagagagagggtggatcataagcccactgggagataatccttggtggaccttattaatagctgctattcctgctttgctttgtaccattctcatctttatggatcaacaaatcacagctgtaattataaacagaaaggaacacaaattgaaggtaattttagaattttgccttaagcattgtgattcttcaagggtttgagctgtttttgtaatgattagaacattaaaagatgtaagatgaaaattagcttcttccctctttataattcgtgtagaattttaaattgagggaaccatttagacttacagatatttatgttcatttcacttttcagaaaggagctggctatcaccttgatttgctcatggttggcgttatgttgggagtttgctctgtcatgggacttccatggtttgtggctgcaacagtgttgtcaataagtcatgtcaacagcttaaaagttgaatctgaatgttctgctccaggggaacaacccaagtttttgggaattcgtgaacagcgggttacagggctaatgatttttattctaatgggcctctctgtgttcatgacttcagtcctaaaggtaaaatttctttattgccgtgttttacaatcttattataacatttatacttagttatgtgaacatgaaacattaaaatatacttaaaatacctaaaattaggtttgttttccacagtttacttgggaaataatttcattaggtttttagtatagcaagcatttcagtggtaagctgtatatatttttaaaataatgtataccaggtgtagtggcttacgcctgtaatcccagcaatttgggaggccaaggaaggaggattgcttgaggccaggtgttcaagaccagcctgggcaacataatgagaccctgtctctataaaaataaaaataattagccaggtatggtggcatgctcccgtggtgccagctgctcaggaggctgaggtgggaggatcgcttgaacctgggaggtcaaggctgcagtgagccgtgattgggccactgcactccaacctgggtgacaaagtgagatcctgtctcaaaaaacaaaaaaaattataatatggcaaa

SEQ ID NO: 105046 - DNA, 1041 bp, Homo sapiens
ttttttatttatttctttaagaatgagccttaagatcaacaaagggtgactgtgagtaggtagggcttgtcagttataaagaattaatggtagtataacttattgggaatctatatgtgctatgggggagtggagggagacagcagtaactgctatggaggttgagtagataagctttagtggagactaatcttgctaaacatggtggaatcatcttagatttttaagtaaaatagtgccctcaccaaggacataactagcttcattaactaaacgttttgatatttgtattggttttattttatttctataacccaaactttattccattctgttgtttctgatgtattttccactttctagtctccatgcttctcaatgtgggaaaaaaagaagttaaaatctaccacattgtataattgatttagtaaaatgtaagcatgaaattcaggatccttaaaaatgtatcctactctaatttctcagatgtgtatgtactgaacctccaaaccccagcaatgaaactctagcacaatggaagaaagataatataacagcacacaatatttcctggagaaatcttactgtttctgtgagtatattttgaaataaagggttttgtaatagatattgatctggttcttttagctttttctaatcagacatccattttctcttgattgatggatcggtagtatgttttcagaatgtagtgttattttgaccagatagcagttgctacttttttatgtatcatgcgctcgaaagtgtaggctgaaaagaatgaaactggcacgagagataaaggtggattatatttgacttccaagatatgaacagtataaagatgtgaatatacttctgttttctaattctacttagattgatacgttcaaaggaagtgtttactgggactgtggctacatatactgtcctttacaatattttatatccacttgtcctgcctttttatctgttcatctgctccatcgacagctaatttagatcatgaagtgctgtgttaatgtcctaatgtctaag

SEQ ID NO: 105047 - DNA, 1038 bp, Homo sapiens
ataatggtgggagaggagggtagtggtagtgatggtaatgatgttggagctggttactgtattgatacatatgatgtctggatctttagagggagtaagatgcaattgttttttcatatagacaccatacctgtcatttactcataactgatttataaagtgagctgtaatgattttgaaatatttatcgcctggtagattttcactgtaaatcttttatataagtgtaataaactattaataattaatactaattaatttattaataataaatctactaataagctagtcttcagccgaagcagaaaaagatatagagttatttctagatgttattttgtcattctgtaattcattctcttttaggaatcgtgttttcttgctgttcccattgcttgcaatgaaaaattttaggtacaaatactattccacatatgtttatcatattcatatttttctttctaaacagagattatcaactttcttatctgtctttaagaaccagtattggtctgtggacttcttttttgtgcattgttttggttgcaacagatgcaagcagccttgtgtgttatattactcgatttacagaagaggcttttgcagcccttatttgcatcatattcatctacgaggctttggagaagctctttgatttaggagaaacatatgcatttaatatgcacaacaacttagataaactgaccagctactcgtaagtatttctcttttctcctaatattaaaatgtgtttttacagagatgtcagagcctcagaaaatgaattttttttgcagtgtgatagtgtaactagctataactacttaactagccatgtgatagtgacatggttgtttcagatgagattttgtcacagcattcaatgaacaaaaatatagttgatcaaattcagtattttttgttcactgagatagcttattcacatgtgtatgttttggtcttctgtttgaattggattggccagtttaaatttgattggcaactgatccactatatatttgaatcaggcaattatta

SEQ ID NO: 105048 - DNA, 1141 bp, Homo sapiens
agaaagcattttttcttgtgtatttaaaatgtatttgtaattttttatattttaaattaaaaactcaaagtggtgttggttttataactgcttgatgggtatttttattttccagatgtcttacatgtattatagtacgttagagaaatgtttatgatgtattgcttttattcatttcttttttccttaaacagagtgcaatagagtctctttttggagcatcattaactgggattgcctattcattgtttgctgggcaacctctaacaatattggggagcacaggtccagttctagtgtttgaaaaaattttatataaattctgcaggtaagtaatagccctctctacttatcacatgtgttatatatgaaattgtttattaacttagaagggaattatttaattgcttaaaagtaatttggtcaatatatgcattctcattatttttgagctactgtatgattgaccatcctctggccccttccattcttaatccagtaacttggagatgaagaaagtaagattgtccttgagtataaaatcagtggatttgaatgctgataagcagatcacttgagggctaaatacaaatcctttgtgctaacaaatttaaaccagtaagaaggtgttaatctgaattgggttgaagcaatcagagtgaagtgtcagtttccatcggtgaggttgttcacactgtagaaatgaatatagggtactgtagctgttagactttgaattcagcatggctaatactgttccttattttatttatttatgtattcatttatttgagactgaatctcactctgttgcccaggctggagtgcagtggtgcgatcttggctcactgcaacctctgcctcccaggttcaagtgattctcctgcctcagcctcccaagtggctgggattactggcgccgcaaccacacctggctaattgttttattttcagtagagatggagtttaaccatgctggccaggctggtctcgaactgacctcaagtgttccacctgcctcggcctccccaagtttgggattacaggcgtgagccactgctcccagcctctagtactcttccttttgtgacataaatgaagtttgtatattttagtttgaaacaacttgatgctattacat

SEQ ID NO: 105049 - DNA, 2181 bp, Homo sapiens
ttttttttttttgaggcggagtctcgctccgtcaccaggctggagtgcagtggcgcgatctcagctcactgcaacctccgcttctcgggttcaagcaattctcctgcctcagtctcctgagtagctgggactacaggggcccaccaccacggcgggctcatttttgtatttttagtagagacagggtttcatcatgttggtcaggctggtctcgataatgtgacctcgtgatctgcccacctcagcctcccaaagtgctgggattacaggcgtgagccaccgtgcctagccaggctgtgatttctttaggggaaaagacaggtaacagtatggcagtgaacatagaaacagttcaaaaattagaaaaaaaaaaaaaaaaaggtcttcatatggcaatatctgcttttcagcccaagattaggagaggggaaccttaattttataccgatttgcctgtgttaatgtcttttttgacatctccttgcttcatgtctcaatgttttgctttttttctctgtatgtataccatttagacatttttttcctttgtttctgctttttgtttttttgagacagggtctcactgtgtcactcaggctagagtgcagtggcatgatctcagctctctgtagttttgacctcactggacttccctcataacctccggagtagctgggactataggtgtgtaccaccacgcctagctaattttttgtatttttttgtagagaccagcttttgccatgttgcccaggttgttcttgaactcctgggctcaaaacaatccacccacctcggcttcccaaagtgcttgtgttataggcgtgagccatggtgcccggcccatttttttcctttgacttaagctctgcataaattcattcctaaatatgcttattgtaattgaactaaggattttatgatggcttagcagtgtcttttaagaacatttttctccacagacaagaaaacaaatttagcccatataattaacaaatgtgtcattaacacggacacttctcctttatgctgccaaaagataaatttgtttatctttgagtttgatcctgtttttattctaatagttgaattatactttcattgcatactgtcattttgtgatttttgattttggaagatgctgttctagctgatgatgagaattgctacctattcattgactatattctgtgtgccagacaccatgcttgctaggtgtttttgcaaataatatttatgttctagttatcatcaccgccatttcaaagtgagaaagcttaggcttagaaaggttaagatatggccatggctgaacacctagtagcagtcagtcttcccactggaaatctagtttcggaagccctcctctttgcctgttgctgcgctgcctctcatttcagcaggattgtttcttacgagcttcttttctccttccctttaccaattaatgggctggcttttctggatagtacgttccagttgaccttgatgtttgtatatggtaaactattctttccttactttctgattctttccccctttttctagtggcatagctaatcatctgatagcctaattagttagaatgtaatggtggtggttgtacaaaattagtatactaacgttgatttaaattctcttagtctttcattttctctatcttttcttgccaaactttagtgatactttgtcatttatggttgctataaatttttttgaggagatttttctcatttattttgttaaatatttcagttttgataattgattaagcctatcatattagattaatttctttaaaatatgtggaaagttttgctctttagaaatcagtttgagaaagatagtcacatgttgatttatcacctattcgaaagatctttttatagcagttcttttttgtagcaccatattatttactattttttatttttaaaatgaactatttcagccatataaaagtattcaaaataatacatatccttctgtactcacagacttaagaaataaaacatatatagataaagttgaagccctagtatgtgtctctcccatttactctttgctcctttcatcccacagcacaggttgagtatcccttatctgaaatgcttcgaaccaggagtagttcagattttggattttttttaggattatacttctggttgaacatccttaatc

SEQ ID NO: 105050 - DNA, 1505 bp, Homo sapiens
aacgtgacccaaagcagactttccccaaaggtaattgctgtggaaaacatggggaagccatttgaacagaagatgcacagttgaggtaaaaaaaaattaaaaaaaagtttactttggcttgctggatgaatggttttataaattgagtaaaaggcttggattgtcttttgaggtggggtggactgggagaagacaacagttgaactgattctgggtgggtcatgggggtttttatcagtggggctacttcatatcctgtaaggtatcataggattagttagagccacaggatgaatattaactcctcagtcctggctggtaagcctatactcgactggaagaatagaacataattatggaaactgtggctttttgaagtggcatttaattttgctgttattaagtctatgtgaaaatagctaaaacttttatttggaaaatataattgaaagcttcatccattctttgatatgactaaaatgaaagtttttatgttttcctgttcctggttatactgtattcagagctatggtgctttgtaaaatcttgaaaggcatttctttgttgttgttgatatgcattttaatggcatttaaatgagacgatttgtaattcttaagtgcattttacttaattgtatttattcttgggagaacattcatttttttatagatcaaaggttaaaaaataaccaaagctaaggcatgataattatcgaattaaaatatttcatgatctaaacatgaaataaacctaacaactgaaattttctttcaactctgaatttattttggattatgtaaaatctttttaccttagtctttaatcattgtatcaaaggtccatatttttagtaagttgctttatgtgctgtcacaaattgtgcatgtcactctgctagtccccatggaaatgtgttttatctgttaccatcatggaattgctgcctctttgtccgtggactgtcattcattacctgcccatctaatcttgctatttgatatcttgtacatgtgacaatgtgtttggcattggaggaatatagataagtgtaagaagagccagtatctcctgtcctcaaggattctaagtgaaaaaagtgaaaaagacaaaagtgattaagtgaaaaagacaaaatagtatatacatagtgctttgccacacgtgagtgagataaaggaagagctgtaggatttgaagtaatagaaatagaggaagcagaaatattatagaagaaagtgaaaaggatatgtattagttatcaggtgctttattagaacttcaggtggaaatggagatattaggagatacggtcccagagtgtgtagagtggtgaggaggaaatgtaaagattgggaatcgtttatataggagtgaaggttgaaatagaatagaggaagttaacaagaaagataatttacagggagagaaggagaggggaaaagtgtgaaattacccagatttatggaatgaaggagggatgggatggaggaggaaaatgattt

SEQ ID NO: 105051 - DNA, 1071 bp, Homo sapiens
tttttgtgggaacatgtttatcaaacagctcttattttttaagggaaatactttagtagaagaaaaatgacatttgcttttctcttaatgtaaagcgtaattttcaatagttaataggagcagtatttttaaagttttggtgggagagatgcttttttggaggttacttacgtttgtagctattggtgaataggaatttgaaatggtatgtatgaatatattttatagtatattgataattagaacataagatgcaaaaagctaattgcaaatttaaaatattaatagaaactgacattagcttctatttttaaagagcaatctatttcagaagagagtttattttaggaaccattcttttctaggagaactgattagatacataatcaatataaaatctgatattcactctaattgaagatgccatctcaagttttcttaaaatagaattctgaaaataatgttttttgtgaaattcaggaaaagagaaagattcctgtgtttcacaatggatctacccccacactgggtgagactcctaaagaggccgctcatcatgctgggcctgagctacagaggactggacggtgggtgcaaatactgatattttgaagggtttgggggatgatttgatgaaaacataaatattatattttttccaagtgtttggaacctaatcttgtacagtattttttcatatgtataaaaatgtgcattattatatataaggaaaatttatatgtataaatatataagaatttataaataattttaatagtatgtatcaagctttaaaaggaaaataatggactgtatattcagaatattgcagttatatagtgtgtaggttaatttccattgcttatacagaaggttcttgaagaaggtgtagagtcttattataattcttcatattgagttagagaattatgggaacagagagtaattacaactaataatttctttgtatatgtgcacagatttaaaactcttaaatgagcattatatcatgaggtaatcttccatggacaagcatgattaaaccattgtattgctctctggaaacctagc

SEQ ID NO: 105052 - DNA, 1049 bp, Homo sapiens
cttacctgtcaccattgcattatccacaatgcttagaattgtattttagcagttagtaggtagccagtaaatattggtcattaaataaattatttaagtaaagttgtttgcatatccatgattattttcttaggataaatgacatttaaatgtcatagaagtagaatgacacgctacagtgttttattttctaatcaattactatttcccaggcaaaattttatttttaaaaaattgttctgtcttaacatgtaactgttctctttcattgtttgttattgttaattcatctgataatactgagtggattaccttttatagttgttacccaggctgggctgaatacctgcctgagataagagtttaggggttatctttattgtgaagctatttatgatatccagagtggatttactatgtgtagaaatttttttcaactttaaaatcttttactcaatatttttttcacttagattttccatgatgtagcttataaagcaaaagacagaaatgacctcttatctggaattgatgaatttttagatcaagtaactgtcctacctccaggagagtgggatccttctatacgcatagaaccaccaaaaagtgtcccttctcaggtaagaatccagagctattcttctgtgacttactttattttaataaaattttttttgattaggtgtgattcaaaaaccaaaacagagaagttttatccccacctcgtcctgtttaccttcttacccccatacttacctcctgtgggtggaccattttttactagttttttgtttatccttttcatttttcattcagtacttgaaactatgaacatgtagtcttgtttctgtcaccaaaagttagtgtattgcatataccgttctgtaccttgcttttttcatataaaagttgtatctaggagatctgacataagaaatcatgaaaatattccttattctctttttcacagctttgttgtattctatgcatggatgtaccataatttattctattcctgggttctgatgttaccagtcttttgctatttc

SEQ ID NO: 105053 - DNA, 3364 bp, Homo sapiens
cctttgaaatccaaacaagtatcatttctaatccaaataagctatttttatgagtttgtctgactcttagagatggagtgagtttcttacagtcacatagatacaaagtggcagagagtgcataatttaaacacagatccctttggttataaaactcttactctgccaatttcattgcaaaaaacttgcttgttatattttaaagttggatttcttaggagtaatgacaataggtattatagacataaatgttaacaaagaaaaatgaaaagtctttaggaaacttctgattatgggagattatgttaattcaatctgcatttagttagtgtagcttttttctgagttacacttagggtttgtcagagaatttattgttgaaagcatgctaagtacagctaggcttcattaagttccatgcatttcacatgtttatgataattaaaagtatattccctaagtatttttaatgataatcagactcaggtcttccatcttttgtggttcacaccaactcacgttttatttctttttgcaaaaggccacaatttttgtaaattctaattgtattattttaaatattaaaatgtatagctttggtattgcttaaaatgttgttctagttttgctggtatgttactaacaccgggcacttattttttttaaccttgcacatttgcttttataatattcataaatcatcactttcagaatgtgagcagaatcaggttgcaaagtgaattttctccttactaatttggaatttgtctttaaacataggtattttggcctctccccagtctgctcctggaaacttggacaatagtaaaagtggagaaattaaaggtaatggaagtggtggaagcagagaaaatagtactgttgacttcagcaaggtaattctatcattaactgaaaattctcataattattcttactgaggaaataagtagtaatttgtggctaatattattaacattgatgatagtaattttttagtagactggtgcttacaaacctgcatgtgatgtctgtgatatgttaatttaaggtaaaaactgtgagaagggttacagttaacctgtgagtacttgaataactttacaccattactagtgttagaaattctgaaaaagaatatgtgaataatacgatatttccatccatacctacccatagatatcgtgaaacgtcagtactttttgaactacagtcatttgttctggagctaccaccactagaacgttaattctgggagtgatgttacagcactaatgattcagtctttcctgggctgtaatgcgatcccagaattactgtcttatggtgtcagtacttttggaatgtcactgagaaatatattggtgcttccccatgggtaggttaaaggcatggattacaaaaaaatacctatgtgaactatgatttttttattttggtaaatgagtattttgttgaaatagataaaccttaatttaaaagaacagggcaaaagactactaagttcaaattgtaactgaatgtaaaatgtactttatgagtatttcttatgaacaattgattctatctagccactaattttttagtagtattaatttgctatagtaaaataccagatgctcatggtattttaatatttttgtatccagtataagactttttaataaatgtaattatgtcaagctgatttcatttcttaagccttttagtctttgatgaaaagtctacaagatatattttacagaaaaggagtttaaatggtttgcattatagctttgttgagtgttgtagtctaaaactataggaagcctagcattacggacattggctgtgcagaaaggctgttgtattttaaatttttctgatctatcctgatcacattttactggtgctcatgttatttcagatagtgcaaagtacttagtaacaaaattgcaatttatttcttgttaaatgaataaattaatataatttacattatagagttcctctaggcatggcagttgccgtttatttttgttcctctgtcacagtcttacttttttttacttggcctatctttgtgtatacttccttgtctcctgttgggcaggagtctgcctcctggcactgtagttgtggcacactgggtgtgggactcaagaggcccgctgtaagtgctggttttacttttcatagatagccctgtaagtggttgtttagtgacttgtgtgaaactgcatataaatgaagttcacataatttggtatcatgtgtaaccttttccttgtaattatacacagaaagctaaattttactattatagcattatcatatatctgtgccaataagggctatagatttttgttttaaataaaaacaaggggccaggcatagtaattcatgcctgtaatccctgtgttttgggaggctgaggcaagagaatcacttggccaggagttcaagaccagcctgggcaatatagcaagccccccacctctacaaaaaaacaacaaaaattagccaggcgtggtagcgcatgcctgtagtctcagctactcgggaggccaaggtgcaaggattgcttaagtccaggattttgaggtttacagtgagctatgttcctgccactgcactccagcctgggcaatagagtaagaccttgtctcaaaaatactactaatgaaataaaagtaatgattttttttccagttaatgaaaagactgggaaatgcccagagtaattttttggtttgtttttagggggactttacataaaatgtaaaggttttctaaggttaagtaatataaaaccatgaatattttttagcactgtgtataatttcatgaaccattgttagtttgtgaactacatatttgtccttaatagtttttaatgaatagtgcagtattcattgaaaaatttctcaagttcatgtttgataaagattgtgacagttaaaacagtagcattgattcaaataagtttgcttgcttttttgtatgtctactccattctttatatttgtgaaaattttgacattttaaacattcattagatcacaagttttgattagcaaatagtagtcttataaagcagtttttctttcctgtttctctctagtcttacaaataccacggaaactttatttttaattatttatttgtcaataggttgatatgaatttcatgagaaaaattcctacgggtgctgaggcatccaacgtcctggtgggcgaagtagactttttggaaaggccaataattgcatttgtgagactggctcctgctgtcctccttacagggttgactgaggtccctgttccaaccaggtaaagagttagttccaagtaacattctctaagcattttcaaaatctacaagt

SEQ ID NO: 105054 - DNA, 1584 bp, Homo sapiens
aggaagacttagaagcagcgctgaaaggcgaggagcagaagaatgaggaaaatgttgacttaactccaggcaactatccaaaatcctccatgtgtggtgctttctgcctctgagtcacttgcacttggaatgccttttagcacatagcttaagcagcatatgtagataatgcttataatttattttgacttctgcatgtttttttttctttatgatagattgtgttaggttggtgcaaaagtaattgcggttttcgccgttgaaagtttgctttactttcaatggcaaaaattactttcagtggcaagaactcaattgcttttacaccaacctaataaaaaagagtaagattattaaaaatttgagttacaaaaagactacaaagaagactacacataatttaagcccttttaaaaagtttcacttagatttaaaggtcaagacatttgaacacttcagtaaaacatagtcattttttataatgttttaatttgccatgaacttattttatatttatttatgtatttatttttattagaccgagtctcactctgttgcccaggctggagtgcagtggtgtgatctcagctcactgcagcctctgctccctgggttcaagtgattctcatggcctcagcctcctgagtagctgggactacaggactgagccaccacgtctggctaattttttgtatttttttgtggagacatgttttcaccatgctggccaggctgggtgaactttttttttttttttttttggagacggggtcttgctttggaggctggcatgatctcagctcactgtaacctccacctcctggactcaagcaatcctcctgcctcagcttcccagttaactgggactcaggggcgtgtcaccatgcctggttaattttcgtgttttgtagagaccaggtctcaccatgttgcccaggctggtcttgaactcctgggcttaagtgatccacccaccttggcctaccagagtgctgagattacaggtgtgggccattgattgcgtcttgccttggtagcttggttttgtgtgtgtgtgtgtgtgtgcatgcagttcactcataaggtgaatgaacacatacaaataaattatagtgaagtgatgtgccttaaatagggatagagtcatactctgtcacccaggctggagtgcagtgccacaatcatagctcactgcagtgccacaatcatagctcactgcagccttgaactcctgggatcaagcaatcctcctgactcagcattctgagtagctgagactacaggcacatgccacaacatctggctaagttttttgtagagacggtatcttgctgtgttgcccaggctggtcttgaactcctggcctcaagcaatcctcctgccgtagcctcccaaaatgctgggattataggtgtgagtcaccaggcccagccatacctttttttctatttaatgcttttctccaaagaatgtagtacattttaggctttttttttttgcttgggcgggtggggtggagagacaggttcttactctgttgcctagactggagcgcagtggcgccatcttggttcactgcagcct

SEQ ID NO: 105055 - DNA, 1044 bp, Homo sapiens
tagtatgacttttaagtgttctaccaacaagcaagcataggtgatagggtctagtttttctaaagttgaaaataatcatcttttttatcttccacttggccatgaaaaccctttttaatccatttaaaattatgccatgttgtatttaagcaatcttaagagtaaaagaatacctcttatggaccaaaatgcaatgtaaaaacaagccaatgtatagcgcattttaactctcttttttgtcttttatttgttgtttatattctctcctttggtgaaataagttcatttatccagagggaccctattcagtctttactcttcgtatgcagttgttcctcactattgtccaattgtaatttgctcatcagaagacattgactgttttcttttaaatgccattttagcatgttcttttgttgaaatatagttataatttgagtttttcctgcatgtagcttattgtttaaatggtgtttcctaatggattatagtttaactatttctgaaacctcttgagcatgtaactttgattaggccatatggaattgaatattgtatttgcatgtttttcataaagaatgttattcttttaagatacacttagtacaaatatgaggggtttaattaaaagtatgcatgaccttttgaaatattttagacctactgctatattgctgttgttggtgagaagtactttattcttagctagtgaaataaaaaattatatgtatttgttttaatgtatctgctacatatcagaaatgaaaagcatactttaggacatttattaatatttttagagagctcaagaatatgtatcctttaaaattgacattgtgtttctctttttaaaaaatttctgttatttgtctttttttaaaacttcagagcagcaccacctgtagatggtgtcttactgacttaatattgtaaatatttaataccagttttaagttagaaattattacttaatgttaacatgaactttttctctaagagataattgtctgtagctgtttggtaaaatgtaggaaaaatacgcta

SEQ ID NO: 105056 - DNA, 1424 bp, Homo sapiens
tctgtgtgaatatacagatttcttcagtagtgttaggaggtatgttgggaaacccagttagagatgagattgtgactagccttgaattattggattttttttttaagggggggatcacagggtctctcactgtcatccaggctggatggagtgcagtggcacgatcttggcttactgcagtctccgtctcctgggctcaagtgatctcccacctcaacctactgagtagctgggaccacaggtgtatacaccaccacgcctggctaatttttgaattttttgtagagacgggttttcgccatgtagcccatgctgttcttgaactcctgaactcaaacaacctgcccactttggcttgccagagttttgggtttacaggtgtgagccacggtgcctagccaagaaataggattttatttggtaggcattttggtggtcttgatggtttttaagttgaggaatagtgtgatatgagatacacattcaggaagatcattctggcaacagaatgtagggtggctttggattaggaagagtttagaagcaagtaggccagttattggctaggaacagtctaagcaaagaaagagctctggtaggttgagcaatgaaaatgaaagggggagatttgaaggataatgtggaggtagaaagtagaaaaaggcagctgtaatcagctttttgtccactaactaaaattaataaaaaccaaaattaactttggtagtaatgaatttgatggtgggactaccattgtagattgctcccatggaaaaacaaaaaatctgtagtatttaatcttcaagagaaccatgaacttaatacaatttctcaggctagaaatacttcaattttagcctactgttagatttaactgtgtgctgcaaatatttgaattgtccttactttcttgtctcacatgaataactgaaaaattaaggttgggaatattgaatttgtataatacatatgggtttcagactttggtttgcaattatcacataataccatgtagtacttttagtatatgttgtataatctagtgttcatttgtttgctaaactgtagctgttgtgttaaggttaacagtttacctattaggctggtccttccagggttttttttagagtaaccatgtagttttgaaaatttgaccctcttcttccaagttagtaccactatttaaaactattaatatatattttataaattaaaaagtttaatcacctcagtaatgtataaaatggcattgccatcagtttccccattccccacatccctttcacaacctgattttactcctcttcctagaacttatgacctcatgacgttttatctgtttgtatgttggtttctctacctctcgaagagagcagaaacttggctctgttttgttatttttaaattgctgtattcccaacaca

SEQ ID NO: 105057 - DNA, 1044 bp, Homo sapiens
agatatctttttaggccaggtgcggtggctcatacctgtaatcccagcactttgggaggctgaggtgggcggatcaggaggtcaggagttcaagaccagcctgaccaacatggtgaaaccccatctctactaaaaatacaaaaacaaaaacaaaacaaaaaaaaagatatctttttagatgtgcaaatacttacataagtgatttgtagatttagtgtaatcatctgtcagtgatattagccctgggcacaatattctgtgtagtgctttataaaataagagaagtaactggagactaccattgttaattacgtgaacttatattctttatcagagtagattttggagtacttttgtatatatcacttttttctcttttggaaagctagtaatatgtttctgaaccttttaataggtcatagagctgtatatattggtgttcacgtcccgtttagtaaagagagtcgtcggcgtcataggcatcgcggacacaaacatcaccaccggagaagaaaagataaagaatcagataaagaagatggacgggaatctccttcttatggtaagagaaaacagttcttctttagcagtttaaagttcctattttcctggaaagtattttcttttaattgaatatttcttttaaaaattgtatgtatgcattaatgtagtcacattgtatggggaatgtattgtattggggaatatcaattgaagtaataattttttttttataatttttataagaaaaatctttataggtcaagatctctttcatgtaagtgaaaaaataaagggctttgttttcttcattgtatcccatccttgaaattgtaaaagttatgcctagtcacttaggctcaaatttagtagtgtttcatttcctgtactaaatttttaattacttacatatgcaatggatagacattgggaatgctaaggctgtcatggaagtgattaaagtttttttccttcttcttttttttttttttttttgagatggagtcttactctgtcaccccggctgggctggagtgcagtggt

SEQ ID NO: 105058 - DNA, 1201 bp, Homo sapiens
ctatattgagttattgtttattttaataaaaaagagatggacagagaaacaaagtttgatttatgttgtaaatgttttcatttatattctaagacttttttttaaactctaaacgatttttttttttaactctaaaaattggctttaagagcctaggcttgttagggtttccaaaaagaacctcagttatctagaagcttatggttagatcctgtgaattataggagctagggaggttaaaatttttagcggtaattttactaattcaaatgtacagtcatacatttaatgtttaatgtcaaccctcacctatacataacctggatattccttcgattcctttggttatcacaggccctaagctctgcatactttgtacacatcttcaagtttggtatcaagtttgagggagagattaagtttaagagagtttgagtaaataggcttttgatagaataaagtaagggcagaagaaaaaggaaagaaaaagaaaaagattaaaacagaggacactagaggcaatagtaaaagaagaaaacacaataagcttaatctaccaatctttggattctagcgtgtttttatttattttatctatccctttctttctaaactgcacactcatagcatttatttttatcttggtgcattggggcttctgtgccaagacccattagtactaattggaggaacaactttgtaattcccagtgcagtgatgggaatttgactctttaatttccacttttctttatgttttgaaggaaatagtttcattaaaataaaattgagtttttttatatttatttcttattactttttaaatgagattcacataacataaaattaaccatttaaattacacacttttttaaatgtattcactatattatgcaaccaacaccactgtctaattctcgaaacatatctataattccaaaaataaaccctgtataattagcttttacatttggaatttttgttttctagtagttgagatttaattccatagacatttatcgagtacttaccatgtgctaggctgagtactgggagaagtttaaacaaatagttcagtatgttttgttaagttgtccctcttttaatttaaaaggtgattatttatgaggttaatatattggcagctgaaataagatgtcagagtatcacatttttaagccttacctgggaacatgagtgtc

SEQ ID NO: 105059 - DNA, 1044 bp, Homo sapiens
ggctggtctcgaactccgacctcaggtgatctgcccaccttggcctcccaaagtgatccaattataggcgtgagcaaccaggcccggcttcaaagactttttgagggaagggtatttgttctctctctagcagtggcatagaatcttgtgtataataagttaataataagtagttaatgatgattagaatgtccttttgaaagttattacaagttgagaagggaagttaaagctaaaattttatcctcttaaaaatagcctatacaacattttctaataaatatgtttagtctttttgttgaactgaaaagagaacaaaattatgaaggtgggattttcacaactgcagctagaatttccctagaggttaaattttggcatgaattttactttgggggaaaagaaaaagttcttttaacttttgttagctcttgattaatcagttaaagtggtactgcatgttgagtctgcttatttttgacaattttatgtttgaccataattcagtccagtatagctgtttcctgttatttaggagacttaagagcaaagatcaagaaagaaagcattacatgttgacatctaaggattcctctcacatcacattttctttaatctctgaccctagaaggtctgtcttttgaggatgaaatgaatatattaccagttatttggtaatttgcatggaaaaccatttaaaaatctttgccatttcacttctcactctgggatttttgaatggtcttctgtggatttaaaaagcttgtaaacataattttaaaagaatgcaattagctgtaatgagttcagttatttgagagaaagcagtctgttttatattttgttgccatttcaaaggatgcatataataggtcctcaatagattgtgatctcatgagtcaatgagaataatttgtttttagggtcctgatgaagaagctgttgtggatcttggcaaaactagctcaactgtgaacaccaagtttgaaaaagaagaactagaaagtaagttggtttaaaataacttacttcgcttagtaggat

SEQ ID NO: 105060 - DNA, 1169 bp, Homo sapiens
ttggcggttttaagcagattttcagatttcttccaaagaggatgttttaaaatgttttaatttttcttaagccattttagtgagcgtacttaagcagttttcagtatcaaggggttaaagcatagtccactgttaattgtgaaatagggaggatgctttaatgttgttgggtttttttttttttttttttgaggcagtctcgctcttttgcccaggagtgcagtggtacgatcttgggtcacggcaacctccgtcccccgggttcaagcgattctcctgcctcagcctcccaggtagatggaattacaggcgcacgccaccacgcccggctaatttttgtatttttagtagagacagggtttcaccatgttggccaggctggtctcgaactcctgacctcaggtcatccgcccacctcagcctcccaaagtgctgggattacaggtgtgagccaccgcaccctgcccgctttaatgttttaaatgacctttttttttttcctcatttttcagagaattttatgtgaactagtatcatttggttctgattctgttcactcacattttaggcagtagagaagttgtgttctccctctctctggattccaggactgtattgcttcttttcagtcagatttcccaatttggaaaagctgtcgaattgtgtatcatctctgattaggaacatgagaaatggttatacttttgacagtagattcacacttggaagatgcctcttttatttcgttacagaaaggagtgtggaatggttttcaaaagagcatgaaagccgggcgcggtggctcatgcctgtaatcccagcaatttgggaggctgaggcaggtggattgcctgagctcaggagttcgagaccagtctgggcaacacggtgaaaccccgtctctactaaaatacaaaaaattaccagggcgtggtgctgtgcgcctgtaatcccagctacttgggaggctgaggcaggatgaggcgggagaatcgctcgaacccaggaggtggaggttgcagtgagccaagatcgcgccactgcattcctgggcaacagagcaagactccatctccaaaaaaaaaggctctgagaaaccttataatacataaagacattaaactttgatggggagagaatgcagcttaatattacgtggtattgccaaa

SEQ ID NO: 105061 - DNA, 1070 bp, Homo sapiens
tcttgaaaaaatgtaacttgtcttttgcttttgctataaagcctcataattgtaagcctcacttggaattgatttgtgagtctttttttgttgttgttgtcagtcttattttccagtataggttaaatccttttataaatagcatggtttagaaggtttctaagttttagcaggtaatctactttcttttaagcagtgcatgatataacacaattctgataccactgacattttgggaccatgatatttttccatgattttgttatgattttattcattttgcacatatttattaaatatcctataggtgccaggtaatggggatatagtcaaacaaggtagacagcatactgccttcgctgagtttattttggcgtatggtgtgaacacagtgatggcatttacatttctgctttccatttgtgagtgccagttaaaacatttcatcagtctgtaagaaattaaaaaaaaatagtcattagaataaatgacagacccggacaacccagtatgaattcggtagtgattggcaaatggaagtttttttttgtgggtctgtaagtaggcattctgtttggggaatcacagttacgtattgatactaggtattgatgtggcaccctaggaatagtatcagggtttcagttacccttttgccttattctaagtatctctgggccgcaatccatggagttgtaataaagggagagagcaaatctgaaactgtaggacaaggctaggtgctgtggcttatgcctgtaacccctgtactttgggaggctgaagtgggaggatcacttgagcctagggggtttgagaccagcctgggcaacataatgggaccctgtctctacaaaacataattacccatatgtgttggtgctagcctgtagtcccagctacttgggaggccgaggcaggaggatcacttgagcctgggaggttgaggctgcagtgagctgtgattatgccattgcactgcagcctgggtgacagagtgaagccctgcctcaatacaagatgaaacaaagctgtaggacatttgagttagattgatgaattgttttgcc

SEQ ID NO: 105062 - DNA, 1434 bp, Homo sapiens
ctgtaatcccaacactttgggaggacaggacagatcacttgaggtcaggagttccagaccagcccagccaacaggacagatcacttgaggtcaggagttcgagaccagcccagccaacatggcgaaaccatgcctctactaaaaatacaaaaattatggtgacgcctgcctgtagtcccagctactcgggaggctgaggcaggaggatcgcttgaacccaggaagtggagattgcagtgagcggagatcgcaccactgcactccagcctggtcgacagagtgagactcaatctcaaggaaaattaaaataaagttgttctctgaagagcaaatgtctcattccagtaatgacccactcaccaggaatatggtggagttcagtccaattcagatcagccatatccaaaagactacaagtcattactaagttgagcaaaagagtttttatctattagcagaaagggcctctctggcagcagagattaaaaattggcccgacttcatttccatacttcagggaatagcaaattgaagatttacttatctaggacttgaattccttctttgggaccaagttaataaaagaccaagaaactcctgattaaactgggtaatgaaggattctgtagacagggctgcacgtatcggctttgtttgacttctcttttctcagttaacatctcagagctggaacattccacattccccagcagcgtgtgggggccgactaaagtttgcaattccgactaaaaatcaccctgcttctggcttatctgaatcccttacccaccccacctcaccaccccactcctatttattcagcaccacactacccaggaaatacactagcaaattgtgcaatggaataaaatccacactttactttagattcttgcaactgtatcatatgtaatagtatcactttttctacattttggtcaaataaatttttacataaactacaaaaaaaaaaaaagaaaatgatactaggctttggggttggagtgtattgccttcagatcagatacttggctctgattcccataatgtctttaagaatttctatcactactctctctttttcccctcctttctgtgctaagtataaccaagaaaaggggcttttgaccatttccagatgagggttttaaagtggcagcagagagagaatcccttgggactggtatcatattggcagcacagatcatgactaaaaaaagactgcacagagaatggggaatttgggagaaggtttgccaggtttgcttttttggtagaccttttccagcagagtcaactagtcaatgcttccctactaaacccttggagtgccttgagcctgtgtgcctctaagtggacatggatccattctaaaacaatcagaagagtacttagaaaacatttatcttgtggccaggcatggtggctcacacc

SEQ ID NO: 105063 - DNA, 1112 bp, Homo sapiens
tttagtagggaagcattgactagttgactctgctggaaaaggtctaccaaaaaagcaaacctggcaaaccttctcccaaattccccattctctgtgcagtctttttttagtcatgatctgtgctgccaatatgataccagtcccaagggattctctctctgctgccactttaaaaccctcatctggaaatggtcaaaagccccttttcttggttatacttagcacagaaaggaggggaaaaagagagagtagtgatagaaattcttaaagacattatgggaatcagagccaagtatctgatctgaaggcaatacactccaaccccaaagcctagtatcattttctttttttttttttgtagtttatgtaaaaatttatttgaccaaaatgtagaaaaagtgatactattacatatgatacagttgcaagaatctaaagtaaagtgtggattttattccattgcacaatttgctagtgtatttcctgggtagtgtggtgctgaataaataggagtggggtggtgaggtggggtgggtaagggattcagataagccagaagcagggtgatttttagtcggaattgcaaactttagtcggcccccacacgctgctggggaatgtggaatgttccagctctgagatgttaactgagaaaagagaagtcaaacaaagccgatacgtgcagccctgtctacagaatccttcattacccagtttaatcaggagtttcttggtcttttattaacttggtcccaaagaaggaattcaagtcctagataagtaaatcttcaatttgctattccctgaagtatggaaatgaagtcgggccaatttttaatctctgctgccagagaggccctttctgctaatagataaaaactcttttgctcaacttagtaatgacttgtagtcttttggatatggctgatctgaattggactgaactccaccatattcctggtgagtgggtcattactggaatgagacatttgctcttcagagaacaactttattttaattttccttgagattgagtctcactctgtcgaccaggctggagtgcagtggtgcgatctccgctcactgcaatctccacttcctgggttcaagcg

SEQ ID NO: 105064 - DNA, 1007 bp, Homo sapiens
tctactgagtttgaatgttctgctgccattagtacactggtccttacgagctcgaagttgcagaatactcggctgtgaattggaggagtggcagtggtaggattgaggcttccatcttagatgttacacaaagagaacaacttggagaaaactccaatgacatggatttttttcttttatttgtttatttatttattttgagaaaaggtgttgctctgtcacccaggctggagtacagtggcacaatctggctcactgcagcctccacctcgccagctcaagtgatcctcccagctcagcctcccgagacttgacatggatttttttaaattactaggttcccactgagacacagctaaagtaaagacacaacactagacgctggatgatcttctccccgaaaattacgatcacatggatccttcccaggggcactaaacaaaaacctggactcatcaaagaggtcaggacagcataaggaaaactaactccaggcttccagtttattatttgtatgcctaaggcttcattcctcctctttcatttctataaagcaaagtcttgtattttcctctccattgtacatgctttgtaaagatagaactaaatctacacctgttctagtaaacaaaacatgacagacgaccaaaagtgtgaaagccaaaaccatgtgaaaaactgcctcaaaagatgagcagcccatttggagggaaaatatgtgggttgctagtgggaggttctcactattcatttttttatataggcttttaaaaaggggaaaaagttaagaggaggtgaagtggggagatctagctaagatttctttaaaactttttaaaagtcagattgttattaatctatggaaatatcacttgcaaatattaaaaatcccctcagaaataacctccaagtcaatcttaccggaaaacatgatatgcaagagcaaaccagtcacatagaaggaaagatggatgacccctgtgacctggagggtgacaaggaaggaa

SEQ ID NO: 105065 - DNA, 1024 bp, Homo sapiens
aaaatattaatggatacctatgacaagttctggggcttcctagactcctcctctaaaccatctgatataccaggtcactgggattctaatagagtgctctctattaattaattaatactgcattaatacactgtgcaatgcctaagagtaagatgagcacctcacaccatcctctgcattcctaatgtagacccatctcaacccagcagctgctcttggatgctatcaccaaagcattaagtaagtccttctcactctggatttcctaaaagggaatcagactccagtacacagtctgctttcactttttaaagtgtaagccaagcaccagtccccagtatgtcacagttcaaggatttccaaggagtccttctgaagacccattattatgcctggggtttaacagaaacaactctcctctaatttccccccaaagcagcatggtgggggcaggggactcagaactacaagccttctatccaaacaatcctcttaaccagtgttctggttacactgttccaccgaagtgcccctcactggacttgaggtgaataggtacaggcctgccccctcctccccaaataggctcttggcagagaggtgcacacagggctcacagcagaattttccagtggtagccactttcctcttatctgtgctggtaaattctaaagtgagactctaaagtaagaaattgtgccgtgctgccctaaccaaaacatagttaaggacaggcagacactgaccagagattactggccttgcatgctccatagctaaactctcgaggttttccggagaaaccctaaacagctaaaattgtgtcttttgatacttccgtggggcttattctaatacaaaatgtccattctaacctctcagctagctgtcagctcattagtttacccaaatatgttcaaacaagatgacctgtttttatactctactggctcttctttcctctcttttctttctctaaaatcacgtttttgcctttgatctttgactgcatcttttattcaac

SEQ ID NO: 105066 - DNA, 1085 bp, Homo sapiens
atgtttctgttgaaaatcttattcacacatttgtgtgcttgtcttgattatagaaaatttcatttttaatgcctccctgtctttgctttacttcaagcccacagactcaatcatcaggtcacacacatgcatcatgcaaaaaacaatcttgaatgacaggaagcaaaagtgaaagctttaataccatgtggaaatcaaggcaaaagccaactttttggataagcagacccatcttaaaagcatagggtgtgtggttgtggcaggtggtgacgatgatagggaaactttaactcccacattagggaattaataggaaatggctaaaaggaaaattcaagttggactatattatttaactatttgaaagcaatgacaaaggagacagcgaaagcagctaagtggttgattctgaggagtaggaaggagtgggaaaaagaatatggcccccaaggggctaactttcataataaatcttgttgaactataatatacaattatgtgcataacttgataaaatagaaataaaatgaaaggagccctaaatctgagccaaggctcttcaattctggcctgccttagctgattgctcagattttctctttccttctcttatgagttgtctttcccgtatttattcttctcttggtttaatctcttaattttttaatttttttttattttttgagacagagtgtctctctgttgcccatgctggagtgcagtggtgcgatctcggcttactgcaacccctgcctcctgggttcaagcgtttcttctgcctcagcctcccaagtagctgggactataggtgcgcgccactaccgcctggctaaattttgcatttttagtagagaaagggtttcaccatgttggccaggctggtctcgaacccctgacctcaaatgatacacacgccttggcctcccaaaatgttgggattacaggcatgagccaccgcgcccagccctaatctctcatttcgatggtgtgtcctataattgtttcctgagaaaggatataggagattaaaatgttaagctcttacatatctaaaagtgtctttaatccacgctgacattttactc

SEQ ID NO: 105067 - DNA, 1050 bp, Homo sapiens
ttttactggttgagaacagcactgtattcactggctgctgacaatgtctctcgttgtgctctgctatgttttaattatgtttgacattcatctcacactattatccagtggcaggcaattgaagaaatgcagcttcatttgaagtcaaacaaaagtgaggacacacgtaattatatagtaatatatagttacttggaagctagaagatttttaggtttaatatacctgtggcttcctacatatcactccattcccatgccttgttttgattcaattgtaagaagcatcagccgacaatttaattataaacatctaccctaaaccaggaatagtccaaaaagaacaaagaatctaaaaaccagattagaaatcagaaaaaggtggttccttttaattatggattttttcaaatatatacgtatgaaagtaggaagactagtataaaaactccatgaacccatcactaagtttctataattattatcacatgacataacttgtttcatttataaccacacctactttttacccttgatactcaacctagattattttaaagcaaatctcaggcatcctattatttcacatataaatacttcaatatttatctttaaaagagaacttttaaaaaacagatagattgccattatgatatgtaaaataaaagtaacaataattcatcaattcactaaatatctagttattgttcaaatttctccagttgtcttataatttttatttgatggcagttttcctttgttgttgttcaaatgaagatgcaataagaatcacacatgaaataggttgatatacttcttaagtctcatttaatttatagattcttcactgtttttattttttttgcttgctatttattttgtgaagaaccagggcatttgttatgtataaatttccactttctggatttactgattaattgttatgtaacatgttatcctagcccctgagtttccaacaaaccaataattagacttagaggcttgattagattagatttttttcttcaagaatagttcatgagtggggctg

SEQ ID NO: 105068 - DNA, 1119 bp, Homo sapiens
agaatctgcctagatgtttgaggagcacagattatactgaacaatccacccttaataattaaatagaatgttataatcataaatagctctgccttgcagtcatttctgtaattttgtctgacattcatattgtcatttgattagttaatcatccattttcaaaggtgtgaatgtgttttcacacttctgctaagacagtgttaactatgaaactatagatagcaatagagattaattatctattgcaccagttcccacaccttgtgcttaccagatagaggaaaagagtgcatgccttaacacaggtgtgatttcaaaaaatgggaaaaaaactgcttggtcaaatgagcttaaggagtactttcaattgatctttaaaacattaacagcatttacacttttaatttcatttcataaaacaattgatctctcatgtatagcaaggcttgtttcctgagtgaattggtgcatatcttcagttacaaatgtggaggcattttacaaatgagtcagtctttcatggaattagaaaatggaacagaaactctttttcaggttttaacaattgctataacttcaatagggcaaagtcagaaattatagacttgtcctctgaaaggttaattaaatacagcgaaacttctaagcagtcaagtaactcaaaataataatgaaaatataataatggagaacttattattataagcacaataataataatgagctctccaactgacttttgatttgctgctgctcccttaccctaatgatgaagtctgttaatttagaatctgcctcatcacttctttggagatctgatttttctatttcagtgaattagctttgatgtgaagggtgtcgtgactgaaatgagacactaagggatagaagttgacctttaaccacattcatttttgaagtaaaaataagctcagattttaatccaccatgaaagataacaatttctagattagtattagcttcggtcctacacttgatcattaatgttgttagtcttctttaaaacgtaaaccaagcactgaaaatgaactaaaatttgcttctctcattcagaaaaatgactctttcatctcatatgctttcttgcttctttagata

SEQ ID NO: 105069 - DNA, 1047 bp, Homo sapiens
taaatgtgaaacttgttcatttaagaaattatggccacaatggcggttgtaacacagttctaaaattggcatgtcttattgcataagttaatttcctgctttggtatacttttaaatatgttgtccctttctggcctcctcttggttaaagcagtgtgggtggaagaggaacttttcacacctagcaatctgcagaatctgaggtccaagaaataggtgctattgggaaatgggcacatctagtgtgaacaaggtggttaattaacagtgaaagctgataggacagagaagctcagatgaagcatactattgtgggatatgggtgttacttgacccagaagctaagcagaaataggcacatctacctcactgatgtactttccgtattttgtaagcgtttgagcttatacaaaattagattgttagtggctgacctaatatttgatgtttattctctttgaatgtgtttttcagccagctgacaaattgctccccttgcttttaaaaatatttttttcccgtggtaggaagcagaatcagaattccctttgattttactttctgataaaaaattgagaactgaattttcaaattttgctggttcaaatggtgcttctgaaacacaaacttactgtctaaaggttgtttccctgcttcagcataactgtggaagctcatttagccttgtttgcttaagtctcctaaggcccccactccatgtgcatggtggtgtcattgaaggtttagagcctgggttacatgatcttggcattggcactttattagaagcttgggtcatttcacctctgtgagcctccacttctttatctgcaaaatgaaatcaaaatacttacctgagagaactgttatgaagactgtatgtattcattgccctcatcttcaggtttcacagacaggcaggctggagcattgcggggaagaaaacatctctcctactcttgatttccctttttgtttttgttttgtcagttctagtatggcttgaaggaaagaaggtgaattttcctattttaagatgtctcttcg

SEQ ID NO: 105070 - DNA, 1478 bp, Homo sapiens
tgtgtttaaaatgcagagaaatcacacacgctttgttttcatatggacttgtagttccaccttttcttctgttagttcttttttaggctactcttactactaggtagaaaaactacttgtgtgtctcttaatcttgtatctcttcatctattcttggatctcagtatcggtgaaaatcctcttttgtggattatattaataagggaatgatttagatgccaactttgacaagattgcatggaatatgttataaagtaaagatgttgtagtatagtttgcagaaattttaagaaacatgttgcttgtattcctcacatttttgttgttgtatataaaaaaacattgcaaataggatgagttttaatgactaaaataatcacaatttcataaggttgtaagttttgagtatatttgcataggcttttattttaagtaaaccagagtcttatttttcctttaatctggtgatttgcttgagactttattaaagaaagatcttttttttttcagaccagcatctcagacatgtcgaaaaagatgttttgatccctaaaataatgagagaaaaggccaaagagaggtgttctgaacaagttcaaggtaacattcaaatattcatgtaaagatcaaatttatttttaataatatgatctgaatttaatccttagccccagaatcaagtagtcaatgaattaatatgtatgaattgcttctcaccctttcgctgaaataccagtatttcagctttcagaacttccagtgatgttcaattcatttacagtttaaaaatatttccctaaattactagtaaaaaacattttttgtttttttaccctcagaggtacagttatatacatggaaaaacttggtatgagtaatttggagaaacaagttactcttacgatttttataggggaggaagaaacatcaaatctaacatatacctgtttcccatctgtcaccatattcgcatacatatatatattctaaggtgattttctttggtgtcattgtctattactgaattgttaatagaatcctgataggacttacagtgagtctggggtttttgttttgttttatgtttctaagtggaagatatttatgtaaatacatacactagacagctacaagtgtatgttttctttggaaaatgttttaacatgaaatactcctatagatctagagacatcagtgattaatatgtaatattctagtgaaacatgtaaagaaagcagtgaaaggtgaatagtgaggccataatacatttgtaaatgatgagttattagaaaagcacatggcaatattactttagaaatatctttaaaaaattctgtctcttggaagggccatcaaaaagaagtaataaacttttatgggcataggctattttcctggctttacttcttcactttccctgtggtcatctttattgagggaccacaataatttttagtgaggatgatgggctgcacttc

SEQ ID NO: 105071 - DNA, 1046 bp, Homo sapiens
tgtcaactctaatttcaggactgggtcaataacatttggatactaggaacgcttttgttcccttccctgtcctctgcccttagagaggacctttgcaattgatgaatggaggcaataaaataaagagtagttctttggaatcaacaatgtgtgatggtaatttttgtttcttcaataacttattatgacctattccattttaaaactcatataaataaccatccaatggttttactcttgattcttgtgagttagtttaatcagagtacctttctttaacacctacccccagatgtcttgagacgtcaacctattgacacctgcaggtagtgcatgtatggcattggtaggtgtcatgtttatggtcacaagaggtacatcctgcacattcctcatacaacttaaaaaatatatatcctgattcaggtgaggggagataaaacttaaaaaccctataataaagttgtagggctttttactgctaggaaaatttacttattactgatatatcagtctaaagttacacatataagttgtatgtgtgctgtcatgtagcatattgtctttatacctagaatgaaagaaagctagctaactcaattacagatttaatttttactgacataattccaaggaaaatgcagaatgattgtatgactttgagttttatttttggtttttgaaatgaaagcgtagagtataactttaaaatatttatttgtgttacaaaactagtgttttataatggtacagaaaataaagtgtttaattttcacttcatcaaaagttaagttgtttaggatgttgacgtagttaagtttttgctgttttaatatacttacggtttctgaagactgaaagcatcttaaaatctgtgactcatttggattatttaaatgtattcatctatattagaatgtaataatataatttgaatatcttatagataattatgtattgattttttaggccatgtgattcaaaacaatattttagaatctaaaattgataagagaataagaagtctttagtattttctaaccata

SEQ ID NO: 105072 - DNA, 1048 bp, Homo sapiens
attctcttactgactcctttcatcccttgggccctcttttcccttattttaatgtttcttttgtatttatgttgcagtctttatgatctgttgtccaataagtgggatatagctctgaaagaattacataaagtacaaggaagcatgggttatttgtttgtttgaaacatcacagagctgtaggtaaataacaaagaagcttgataaaatgcgctcttctgtcaatcacacagaactgaagtatgttgtattttgtgaaattccaaagataagtgaatgaacaaaaaacaatcaagtcaagaatgcttagaatgttctttaggaagtttacaggcaggtaattatcagaacagcattgaaataggttgcagggctgcagactatatacatggtcaaagtaatcactcttctgtccaactgtgttacttgaagctgccaaaaatctgcctttttatttgttgtttgaggtgtaccactcttattacatgtatttttgtcattaaccagtgcaccagtattaactaatgctgaagtggatatgcaacacatcttgagactggttttgatatactaaaaggaaaataatcaccgcatatgatgaatagctgttatatatgagtatattatacagtctaagaaatacaagtagatataaggcacagtttctgcactttggacttacactgaactatctcatgggttcccaatcaccattggattggttgattcactaggaagactgacaggactcagcatataatcctattcatagctaaaggttattacagcaaaaagatacaaagcaaaatcaacaaagggaaaaggcatatgggaaagttcagaagaaaccgtggcacaagctccatgagtcttctcctggtagagtcactcagggtgtgcttaatttctccagcactgtattgtgacaacacatgtgaaatgttgtctaccagggaggctcattagagactcagtccccagaatttttattgagaatttgttctcaataaaacatttgggaaccctctgcctaacatgtaccaaaatt

SEQ ID NO: 105073 - DNA, 1083 bp, Homo sapiens
ctggtttaatcaaattaaattctagaaacacaggaaaggcttgcctaaattaactaattccgtaaatttatgaatacttaccatgtatccagccctgcacgtaagctgtctacataaatgtgactgaaacagattcagtctgcattcttattgagtttaagtatggcaggggagatagttatcaaataaatattcaaattaaaattgattctataaaggaagagtgcagtgaggaaatgttaacaggtattatttctaagtgttggtaatattggcaattttaaaacttgattccttttctgagttttttctaggatttaaatatatttcattggaaaaaggtaacaaagattgagtagataactagacattgcttcagtaatttttaaaacttctgatattgctctgaatgcacagaattaagtttaatttacagaattaagtttaatatcatgtctgttaaatattattggttgcctatcacatgttcaatactgtgagaagtgctgtagatacagagttgaagtctgagacttgcttttgagtaccttattgtgtggttgataagagacaaaccaggcacagaaaatagaattacaccatattaaacaatttataataaaatacctacatgttactttagaaaaaaataagccagtgaattctgatataggcaggtgagacttaatgaagtatgtgggttatcaactggaccttgaagtacggctaattatttggctaagtatagggaaactggaaaaacatttcagaccagagacccaggatttaaggcacagaggtgagaatgggcatgtttgttgatacagcagcaaagagattgaccttaggaaaccagtggtgcattaggggattaatgatgtagataaagactgagagtcaaggctgattttggagtgtcttaacagtctgaaacagaagtttagatttgatttctggttaaaaaaaatcagaagaatttgaaatctgttctttctacctccctttattcatttttttcctctttctcttctgtgtatttcccttcctaggaaaatacttcatacaaataaaacggaaagatta

SEQ ID NO: 105074 - DNA, 1014 bp, Homo sapiens
ctcgtggcatattgaagatgcatgcattttattttctattgtaatttaaaagtaaaatcagaaatactgatttctacttgactggagagatgatttagtttgaatatcagcctgatcttaatcaggtgagaattaattgagttggaggtattagatattcagtgatgttaactgaaccatgatccatctagagagaagctttcttttgtactgtgttagaattatcaaatagctcatgcactacaatgtaaaataatcttttcatgttcatccttctaccttcttgtctcattaaatgcaccactaaattcattctatacacagactaatctttaaagtagcaagctaataaatcacaagttaatagaaaattaaaagcataataattttgtcataagatgctgctgtcacaattttataatgatatattttctagttactaattttaaaaccaagtgattaaacctctgcttttcaagtatacctgggacattaaaaaaaactcttagtttacttttttttatgttcaacattgcaagaagaaagtgagcaattcagaagtattttaatgtttatcttcagaaataaaaatagagtctgtaacattatagtggtctgaaatgtggcatgggcttttcatttattttaagagtgtgacagcaatatcataagtgttgtgaaaatataaatggtgagataacacctccatgggacttgctcttaagtagtaaaattgtaaattctttaaataaactgcagctagaactgaaagcatcgatttgccttgttaactatggatactatacttattaagtgtctaattaaatttagtataacatgtctgttatttcctcctttttttcccttaaaactgaaaatttggacttatttattagcaaagtatcacgttatcattgtcagatttcttcgattttggcagttggtgtgacagtgttaaattaaaagaaagccagtagtgtgacttttgatagtgtcgttttacactggaatact

SEQ ID NO: 105075 - DNA, 1041 bp, Homo sapiens
ttattcatctttaaataagaaggtgttctgctttgttaattactattgacatttccatgaaatgaacgtaactgctatcctctctcattttgaaacattgtttttgctcctttatttctacctcttactttcatttttttccttaatacactatgatctgatttctgtcctcacatcactgaacctgctctttttaaagactctgatgggctgatggtagacaaatccaacaaattgttccttttcttttactggacctgtctctggcaatcccttcttaaaagtctcctctgtcttccctgataatattttttcccattttcccaaaatctctttgtacttctccatgtttttaatctactccttaatgttggtgattccccaagttctcttctcattcttaaatctgaggaagtttagtttgcacccatgaattcaattacttactatagaaagtaacatttgtttctttgttcaagtccaaaaatgaactgggctccttttgctcgtcctacaacgtgtctttgtgaattatacagtagtctagtatctacagtcttgtctcctaactctaattggttatttcctattgatttctgaaatttcctgcacatcatctcttccttttcattcctacagctcctcctttggcctgcgccttccatcatttttgcctggattattttaacagtttattggctatcttgcctctaaccttgcttgcctccttttgtcctatctgccacatgttgtcagattcatccaagacacaaaactgatcttacaggtgaggtgctctattaattgtgccccattttcttcaggattgattttaatttctgagtatagcataaatggcacatcatgatttgacttttgcccattccatcttcatttcaggccttttctcctatgtgcataatctgctatagtggtacctatctacttggcaggttttcctgcattaatttttcctcatccatgtgtcttcccacacttgccttctatatggatttctgttggtctttcaaaatacaacgc

SEQ ID NO: 105076 - DNA, 1860 bp, Homo sapiens
tcttaggttataccatctttatatgctattgcgtttcaatatttaagatttaaagtgattttttggtcacagtgttttgttgataaaatttttttagaattgaagtttgaattctaagacttgaaacaacctgatcactgaagccaactttgtcccagcacattccttaagtcctaattgggaaaaaaaaaaaaaaaaatgaaatagttgaaaaactctggggtgtaaacaaatgattgtaaccctacacactattcaataagtagtagaaggagcatcacacagatttcagtctaatctgcccttctgtgggccataatataaacataaatgtgtgtaatgataaaaagtcattttcttcaaagagactacagctagctgcacattgtgtagagcagcttctaaattgttagactttgtgttgaaatgtaatattctatttattgagaaagtgatttaaaattattatttttaatcatagaaatcagggtttgggctgtattgatattgtcgatcatgaaatgtccacacttattctaagtggccaattatttggaaataaagaaggaaataaagatggcttcacatggaaatttaagttctttcagggtggagatttacttggttcatacaccttttgcctgaattaaagtatttcatgtaggaggacttttatcctttttgatagacagtttcatatatcttgaactcaatatctcagatctcttctactgtattactgaatagcatacatacatagacaatgttcgccattcactagatatttttttctattatcttacacttattcaagcttgtctgtgattaatggaattggtgtcagatgctggaatttattctgaccaatgaacacagctgactcaggggagtacaatctcctgccaagtaatagaaccaaacccaatatgcataaaagaaatacaatactccaggctttagctgaaggaagcaactacctgtgtaataacaaagcagcaaaaactatttctcatgtggctgcataggctgtatattatatctgatctctaatgtagcttactggtttgccttttttaaaaccaaaattggaaattttcctttgtaaagaaaaaaagtcttatgagataattgcttgattaatgttttgaacaataccaagaaattgtttaattaaaataaatatttttgtttgaaattgaagtggatgtgaaatattgtccttgcctatagatctcaaaatctagtactaattgttggttgttaatatgattcatacaatagacatttgttaaaccagcttttgagtggagaaaattattttccatttaaacagtacagtgatgatagctatcaaacaggtatactaaaaagtcagtgactgtgacagtttaaagtgttagacaaatgatgtataaggttctttagtaaggaaagattagccaaaaattttttacccagctagaagcttttaaatctacacttgatatctctgttctaggtaaaattcaaacaaccaaaaaacagtggcccatctgtagcttatgaatctatttaaaattgaatattttatgttgacttctttcatactagctgaaacttgctctaaagagcttcctttggaatctttagatttctttttataaggttcaattcagtacatccataaatcgacagaatgaagaaaacataacaaaaagccacctattccttcctcttgctcccttattagctaaagtaaaatttacatctgtaagacttactgagttgctgccaaaatggaactgaattcttaaaagcaggaacatgcctatgtgaaacattagaaaaccaaaataaatgggaaaattcagacttgaagag

SEQ ID NO: 105077 - DNA, 1015 bp, Homo sapiens
atttatctcctagtcacagtgcctcaatgatcacactaacttggaaatcttaatttcatcaccagttctagaattcaaattggtgaagtgttatcgaattttatgatcacaaatgtaatgaaaactgacatttagtctgtgttttctttttagcctgtgcccctgtaggatgcagtgaagaccttggaagagacagcacaaaactgcacttgatgaattttactgcaacatacacaagacatccccctctcttaccaaatggcaaagctctttgtcataccacatcttcccctttaccaggagatgtaaaggttttatcagagaaagcaatcctccaatcatggacagacaatgagagatccattcctaatgatggtacatgctttcaggaacacagttcttatggcagaaattctctggaagacaattcctgggtatttccaagtcctcctaaatcaagtgagacagcatttggggaaactaaaactaaaactttgcctttacccaaccttccaccactgcattacttggatcaacataatcagaactgcctttataagaattaatttggaagagattcacgatttcaccatgaggacacttatctctttcagtggtcctcccaagaaattatttaacaaactgaaaggagattttgattaaaattttgcagaggtcttcagtatctatatttgaacacactgtacaatagtacaaaaaccaacatagttggttttctagtatgaaagagcaccctctagctccatattctaagaatctgaaatatgctactatactaattaataagtaaacttaaggtgtttaaaaaactctgccttctatattaattgtaaaattttgcctctcagaagaatggaattggagattgtagacgtggttttacaaaatgtgaaatgtctaaatatctgttcataaaaataaaaggaaaacatgtttcttcaaattgcataatggaacaaatggcaatgtgagtaggttacatttctgttgttat

SEQ ID NO: 105078 - DNA, 1044 bp, Homo sapiens
aaaaagaagtaatgcccctagtgaaagcactttcaagagcattttggagattattatctagattgcagtttaaacaaaagtttctctatttgtacaatgtttctcaatactcagaacttaccatatttgttactttccttcccttagcaacaagagcaagacccaacaaacctatacatctcaaatctccccatttctatggatgagcaggagcttgagaatatgctgaaaccctttggacatgtcatttccacaagaatactaagagacgctaatggagtcagcagaggtgttggctttgccaggtaaaattctttctttgtatgtaatcgttctttcctcattgttccttttaaattccattccttttttagtactagagcccaaagcaatagaatatgcaaaaaaaaaaaaaaaattaaaagtagcttatcaaatctgtcatccctctgtgtctttgcttggagctaaataatttcaatgtaattataaataaactgtgcttgttcaaatgtacgtagaatgtgtttatgtgtcttgagtcataataacatacatactcagttcccagtcctctctgtgcctgtggatcaacaaaatcagatgctgccaatacctgacagagacaataaatgcccagtaccccaaagcaaaagagcccatgtggtgaacaaagcatctaagtgtttttgcattgatttccaaaaaagggtgctagcatttctcagtaaagagaaaataaaagaaaggaaacatttagagaaacaggaattactgagaagacccagcaaactcagaaatacaagggaggtcaagaagccatttgcatttaagaggccctggctatgtttttgatattttaggcagaacaggggaaaaaaaaatattcctttcattgtaagaaaaggaagagtaattttcattttaactttgaaggaatgtttacaaaagaggatttcagccaggaatggagtttaaatagttgtacctgctgtgctttcatgaaaaacaaagctaaagagaccacagagtaaaagaaactgc

SEQ ID NO: 105079 - DNA, 1046 bp, Homo sapiens
ctttgtggatgactacctgtcacgcccaaatcctgcaaacttttctacatagggaaatgaaattgggcttatttcccctgtagcttttctcaagagacttcatggactaatttcccaataatcatagtagctaccacttattgaggtcttgctactgcacggatcatgctgagtacttcaggtgtattaaccctcaaaacaactttagaaggtaggttatattatgcttattataaatcctccagagtcaataaatttgcctaagtccacctagttagaaaatgattaggctggggttggaaccaagatggtctggtttggggatctagattcctaattgttatactgtactgagactagtctgccttaattgacataaactacttgtccattatagcatgggtgttggaagactagaggttaagagaaataataatatccaacatttttctagtgttttagcattcttcatatattatcccattgcattttcttagtgtaataaaataacactcggtttatacaccaggtagtcaaacatcatgcctgtcttgtgatctcaatggaaaaatgaagtgtatacctcaagtgatacagtcttggctgaatcatggaacaattatgccatcaggaagtttaggtattctgagtaaaacaggcactttatttgaaaggactgggagacttcacagatgcatcaaatatgttgaggatataaatgccaggctcaggtggatttactgtgaagtgcttgaacttaaccttcaaggctacctataccctggtataggtccatctcctggctctaggagaggccctggcaatgtggttaacaagtgtcatcaagtcaaatactacgaaatcttgcagtgccctgaatcttacagctcacatataaaagaaacctgataaaagttttccaaatttgaagtcaatccaaaaaatttatatgacattacctgtaatgaattatgaagctgaaaggaacttttccaaattattcaagaataaattacaaattctgatctacatttctaaagggaaga

SEQ ID NO: 105080 - DNA, 1043 bp, Homo sapiens
accaaaaaatataggagaattatttcagaggtatggcaatcagttaataaaaatatttgttttttaaacacttcatatttgtagtatttatagcttttaaaaatttgttgtttgtatgatactatttaaaattttttttccagagatgagatctcattctgtcactcagtctggaaagcagttgcataatcataactcactgcagccttggagtcctaggttcaagcagtcctctagagtagctcggactaaaggcatgcaccaccaagaccggccagttttttgttttttgttgttttttaatttttgtagagatggtgtcttactatgtaccaagtctggtcttgaacactggggctcagaggaacctgtccacctctgcctcccaaagtgttaggattacaggtgtaagccactgcacccggcctgtatgccattttaattctaaataaatattcactttattcttaattttatattcactttattcttaattttgtattcttcttcttaaagagtgcccctgaaatttacaagcttcagattccaaagacctgagtctttgactaatggtaggatttgtttgttggtttagaaaataaatgttaaaaaatgcctcttcctccttccccccattgcaaacagagactgaaatctgcattgttatttcacaaaaccaaaatatttttcctccaggtttagctaaacccttcatcattttcctactttagagccccatgccaagtagaaaagaagttgcaaagatgtaattatcacaaaccttcatcttggatgaaagataacctagctctgacccttagtttgagattagaaggactctacctaggagacagctggtaaagactaaggtatgttgtaccaggaatctaggtgtctgggtgaccaggctgtctttcttcccactggggctcattttccttctatacagtgacaagaattggactaaataagatttccagtattttctcttctgaaacatttcattctttgttatccctgtactattttgttagtagaataaa

SEQ ID NO: 105081 - DNA, 1015 bp, Homo sapiens
gtcttgaggaacttatttgtctgatgctcagtgaagacccaataaatttctcttgaattgctcaacatttgttttagacttttctgagagtgccactgtaggctttttcattgatttgctcctttattttaatatcataaggcagctttttgtgacttagttacttttgtcttccagaattatgggtccctgtcagttattaatgctcttaattaacagtagccacaataaccagtccttacaagcagtttctgatgtttccaaataattttattttctgacttttttttctttgcctttgacatctgaactatacttggcaagaaaaaaaaacataaaaactttccattgcaactcatatctcatggtgattcctgttgcatcaaatcttaagttatccatcagaaaagttacgcaaaatctataaccatttggttttatttttgcccttgaattatgctaccgtaacacaaacctgaactcttatatttgtcatctgtaaaaatcacctaattggtctctgcttatggacaccctttgttctttctctgtcaataacacaggcattgccctcagttaaatctccccccagatggcattttgaatagctggcctctgttagaaagccttccatggattttatgaatcctagatcatcacatggccttccctttctctttgagcatgggggctgcctcagtgtcccttggctcctaagagagtgccttgtgctgatgggacacaggaccagtttgatgactacgtgcacagatgaagccaaacctcttgcccatcatctattccacccttcacatccctcatgccctggttccacttgaacccagctgcctcacacatcctttttgcttacaaatttcctagcttgtgaccattctccaccacctccccccaagttttaccattctctatttgtgccctacaacggctccaccctttgaaataacgcctggtctaaatgttactttttctagtgggccttccttgattatccatc

SEQ ID NO: 105082 - DNA, 1029 bp, Homo sapiens
ttctgatcccaacattttcctcctctgatgttggtcatgtcctcctctgtcacttctgaccatgagtatagggattgttgttgatagtcagaggagaaagaactctctgaaatgcttggtagaaaggaaaaagcatgaaagctttctagaaaggtaaaggagtttcatcagagtaacggtaatacaatgtgagattcagaatgttcttcctggtttagtaatttcaccttcacaagaaggggctacatcaaggcttccccagggtagctttgcagctacagtcagattgtgcagattcactgagacaaaggcctagggagagaggagaaagcacttccttggcggctgtgttgggccagctttactagaagtggagtctgacacacttttgtgcaatgatttattgaggataagctctcatgagaaggaagtaagagaagcaggaagaggcatggaaggagttaagtgaacttgtatttcaagagaggtctaacctcagcttgatctcactggaagctctggagagtgtgaattgcaccatagttacccaccaagagccaagagaattggactgttaaacttcaacattaatttgtcatcggctatacgctgcctctgagagtaaggcggtcatgtccacgaatctctaggataggcaactcccattggccaaggacaatcccccagaaaagggtgaaggtgtgagcccttatgagccaacacctgtggcagctgtaggctgctggccctagcttggtcaaggggaccttggcaggcaccaactgcagctgctacataagccaaaacaattgaagatggaaggtctgtggactgtaccttatctaaggaacaatttatatcatatacaaatcctatcctttactattatatggtagtacatatatctcaaggtatggtaccaagggggcatcatatttgattagattggattacaagataaatctgaagaggaacatggaggtagctcagttcagtatattcattttatagaagagaagaagtacatga

SEQ ID NO: 105083 - DNA, 1532 bp, Homo sapiens
taaatatttggagattttgcaggaaaatctggatccccaggtaaggatagcagatggttttcagttatctccagtccacgttcacaaaatgtgaaggtgtggagacacttacaaagctgcctcacttctcactgtaaacattagctctttccactgcctacctggaccccagtctaggaattaaatctgcacctaaccaaggtcccttgtaagaaatgtccattcaagcagtcattctctgggtatataatatgattttgactaccttatctggtgttaagatttgaagttggccttttattggactaaaggggaactcctttaagggtctcagttagcccaagtttcttttgcttatatgttaatagttttaccctctgcattggagagaggagtgctttactccaagaagctttcctcatggttaccgttctctccatcatgccagccttctcaacctttgcagaaattactagagaggatttgaatgtgggacacaaaggtcccatttgcagttagaaaatttgtgtccacaaggacaagaacaaagtatgagctttaaaactccataggaaacttgttaatcaacaaagaagtgttaatgctgcaagtaatctcttttttaaaactttttgaagctacttattttcagccaaataggaatattagagagggactggtagtgagaatatcagctctgtttggatggtggaaggtctcattttattgagatttttaagatacatgcaaaggtttggaaatagaacctctaggcaccctcctcagtgtgggtgggctgagagttaaagacagtgtggctgcagtagcatagaggcgcctagaaattccacttgcaccgtagggcatgctgataccatcccaatagctgttgcccattgacctctagtggtgagtttctagaatactggtccattcatgagatattcaagattcaagagtattctcacttctgggttatcagcataaactggaatgtagtgtcagaggatactgtggcttgttttgtttatgtttttttttcttattcaagaaaaaagaccaaggaataacattctgtagttcctaaaaatactgacttttttcactactatacataaagggaaagttttattcttttatggaacacttcagctgtactcatgtattaaaataggaatgtgaatgctatatactctttttatatcaaaagtctcaagcacttatttttattctatgcattgtttgtcttttacataaataaaatgtttattagattgaataaagcaaaatactcaggtgagcatcctgcctcctgttcccattcctagtagctaaatccatttgcctcatttggttattttgcaatttatgcagaaaacgtcaccaagtaaataatctccaactttttcatactgtctttctcaactgacagtctcacagtccttaaaaaaaaaaaaaaaaaaaaaaaaaagtcacagaagctcagtaatatgagatgaagcagatgctgctcatggcctgcctgccatgct

SEQ ID NO: 105084 - DNA, 1113 bp, Homo sapiens
ccaacagtttaatagccgacatttattgaacgtacacattttaatgagaattaggataaaatattaactgcctctgttatacagagaaagatgacatgcttttcctcatagcccaaacggtacatgctgaaatgacagcagaggatttttgtctgtgttccctgaaccaaagttttatcagtctaaaataaaatttgtgtttttattttaatttgtttggatatttctattttattgtctttgtgtatctattccctagtaagttctacgttatcttcttttgcttcctgttttggctgtttaatggccataggcctgatctgaaaagtgacaaagtgaaatagtcccaaattgttgcttactagtcatgtagcattggacaagtcacctgcatgggttgccctttctgctcttaaagtcagttgttaatattaaaaaagcttatctgaaagcattttaggaaattgttaaggaacgtgcaaatacagggtagtggtaaaggtgaaaagccctacgaaaaccccttgatttttgaccttcatttattcactcattcattcagcaagtatatattgaactcctttatgccgaccactgtgagtgaactgggatgcatggggattcagctaggaacaggaaagacagggctcctactctcagagagttcaccagccagccctaggaagggaggtattaaccaaatcatcagatggttcaggaccaaaatgcagggtgacaaacactgtggaggacaggcacatggggaatttgatctacaccagaaggatgagaaacattaccctgaggaagcagcactggaagtgatgatgaacggacgaggagaaggagaatggaacgcgttacatagagaagcacgtgcaaaggcactgcagtggggcaggggaggcatacgagtaacccagaaaagtggctgcaatgcagacagtgggacaaggtgcagtaggagtcaaaggaatggccgggtagtgtaggtccttttaagaggtgttttttgcttcatgttaacttcagaatattgagaagccataaagggttttaagcagcatgtagtgtatttgagatagagggagagagttgatcagatgtgtgttt

SEQ ID NO: 105085 - DNA, 1623 bp, Homo sapiens
tcctgctggtcggtgcggcgctttccgcgtcctttaagacgagtttgaccgaggccgctccgcagttcccgcccctcggcccagctcagctccatgaacctagcggagccgcctagtaccctttctcgccgaccgcacaggcgcgcgaaaccgcgtctttcaactgacaatgaagccgtagccgcgcagctcggccactccgggcgaatcggcgcgaggccgggatggtgggggggagggggagacggttgggtcaagctccgccccagctcgcgcccctattggtgggcgcagcggttctgggcccgccccctaacggacctgtcgctttgtgacaggcggaggggccagttcctgtcgggccggaggcggagtcagaggttgcttgagctccgcccggactccagggggctcctccccctgctcctttcggctgggcgggcggcgggctagagagggaatgtcattgcttctcagagccgtggtgccgcctccgtctgctgcttctttcctggcgccctcgtcccgtcggctttcgccgccgccgccgcagctgcactggggatacggatggctagtggggcgccggggccatctgggttgagagagcggcgattgcggccgctgctgaggcggagactccccgccgccgcttcctccacccccagtccgccggcctcgcggcgctgagggcgggagcgcgcagagctcttccctcctcctttttcttcctcctcctcctcctcctccgggtccccgcccagcacccctcgcaccaggcggcggcggcggaggaggagagctagacccgccgccggggcacaacatggcggagccctcggccccggagagcaagcacaagtcgtccctcaactcgtccccgtggagtggcctcatggccctgggaaacagccggcacggccaccacgggcccggggcccagtgcgcgcacaaggcggcgggcggcgcggcgccgccgaagccggccccggcggggctgtccggggggctgtcgcagccggctgggtggcagtcgcttctctccttcaccatcctcttcctggcctggcttgccggcttcagctcgcgcctcttcgccgtcatccgcttcgaaagcatcatccacgagttcgacccgtggtaagtgcctcgccgcccctcccccgcccgtggcccgcggggaaccgggacccgctcctccgcccgccgcagctctcctcgacttggccccgcgccgccgcggagccccgctcgcgtcctggctgaggccggcgcggatcccggagctccgggcgcgccccctgcccgtgggcgaagtttgccccgtgcagcctgaggcggggcgtcggggtccaggagcgaaaccttgattctcggccgggctagtgtgaagactgccaggagtgtggatgcagccgccgggagtgtgggtgcagccgccgggagtgtgggtgcagtccctcgcagcccgctttggtcgctgagtccggacccgccacgccaggaggcggcaggtagctcctccgcggactgtcggtcgattccccgccctcctcgcccgctgctttcgcgttctttcatatttgcgggcgcgtttttgctagttcagacggaatcggccag

SEQ ID NO: 105086 - DNA, 1908 bp, Homo sapiens
tagtagtaaggagatttgtataataatggactgtctcctgtgccttaccgtgaatggagatttgtcagtatgaatctaatataatgtctaattcaggtgacttaatgagagaatcaggtttcagacaaaaaaaataccttgttcttgtttttttttcatgtcttttgaagatctcacgtagttaggcatctcattcattcttatctgattcttacagtcattctttttgaaaaggttaaaaggagggggatgtgtagattgcctgccattattactttgggcttttaaagcttttcggggcttttaaatctagttttcttctatagctactaatagtcgcaacactttaactggtctgtagctgaacactctagtgtttctagtttgggagttgctcagatcaccatcatatcatatagcaatggcacagacctttaataatatttaaatgttactctcaggctgtgcatccacaaaccgatttattctggcctgctcataccttccctgacctctttttccatatctctatcaatggtttcatttctgcaagtcgttttagtgaagggtttactttctctgtgagctatttctttaaattttacagtagttcttaaattgtgtaaaagactcaagttagctgctgaaagtgacgtcacagagttatacttgttttttaaatttgtcacccaagttatttatcttaccagttgtcataaggggtgatgtgtgatttatttattgaagtacactgcacttttttaacatttagcaacatttttggtaacaatttgacttcactttagtaattcctcccttatcagctgagttgaacagataggaggaagcagtttgaaaatatattgtctgtacttgccaaacgtttggttaatcagccactttaacagcacttaactatacctttttatctggaacaaaatgtgttttctacatatttttattgtaagagataatacttttactttatattagccagataccttctccatatccattatcttgttcaattgtggtagcctttcccatagaagcaatgaagttccctatgtgagagctcttttttccctgccttagcaggttataaagtgggttctccctagagagaattctctgagccttaggttttggctgtagttagcaaaaatgcagcagacgcctttttgctgggcagaaagttgcaagttagagttggaacttagaatgcaatttttccgaagaaactatggtataaattggttaattagtacagatgtgttttcaaaggaatgataaacctttggaacataagctgttagaagttggggactacttcctgtactttgaggtctccatgttttccttcactttgcagatgacaaaaagaggctgttgacctcagttctgaagaagacaaattggtagccaaaccagttttagaacacaaacgtccccaaatcttaaaaagtcactttgtgggatcattagcatcagcagtccagctgcacttcagaccaggtatcactgttactgattgcattgacaattaaattgtatgaatttatgataagattggtgctactcccatttcggttgagtgtgatggcttccataagtagtaatcatagatttcatgatgtataggccctacggtagttagggtctgtcatgaatgcccttgggacttttccttccccctttatggttttcatatcgtaaaggttaacttgggtaggactgcatgccccttactgccatgagtagtttgcataaagacaacattggttataaacattagaagctcaatataaggatttacatcataatctctgacccagttgttaatgaatatgggctaacttaactagcccttctgtacctaatcaatttttatactctctataagttttg

SEQ ID NO: 105087 - DNA, 1030 bp, Homo sapiens
caccatgataaagaggatttatttctacatagtgtttgttttctatattatttgaacatatgtatatacatgctgtttcagtatcctcagagtgaagttaggatcagattccatcattccaggttttggttagcaacttacctgagtgcattgtaaatcagtgcattagccccacatctgttaaatgacttgagtttgctgaatctggtgtctcagaagaaactctaaagtggttagatggatattgatgttgatgttggttttgttaggtgtaatttatgtgaaactcctaaattccttgaattattagaaggcttttataggtcagcctgttgtctctgccatctttcatccagaggtaatggtttagctttagtgtgattgcaacagtgacttctgtaaatccctgcaataaataggaaaaaagaaaaacatttccaaatagtataggacccactgatatactatatgggccaaattaatactgttgaaaggggaaaacctgtaaatggttaacctgctactctgtcttcaaccgtctatctacctgattctggtggatgctttttgtatttaaaccagtaactcttctgagaaggcttctgttgtcctcttcttacctacttctgaccatgagtaatttctgggaatttagaaattgatagaaagtggaatactgtagggttttttgtttgtttttaaagtcgaatatattaggaggtgaggattagcgttgggggagataggatcagttgcccagaggctcccatatttaggtaaatgtatgttaatctgcatttgtaggcttgccaggaaatctaaccattatttagaattttatgtctttggaaaaatacttccatagtttcagatgaaaaacatctaaacatgttttggaatataatgtgtacataaattagtgaatgcctctttatgttgttcaaggttgtactatttgtagacaaacaaatctctaaacaattgtgactgttggcactaattgaccactctcaaccatgtctatttcttt

SEQ ID NO: 105088 - DNA, 2024 bp, Homo sapiens
taaaaaaattatctcaaggctgaacccttgaggtggagtcatccttgactagagtaactttgacaactttgttttaaggtactaattgtccagagatttaatttttctacagaaaccaaaaatacaagaaagtgggtgggagagaagagagagacatcgtctttaaggagacaaatgataatcagataaatgcaaaatgactggttttaaactatggctttttgtcaactattaaagtattgtatattaaaattggcataaagaaggcattggttgcttgatacttcttgaaagcaggaaagagaatactggaactggaggtctgagctgaggaatttaggaaaaccctgggcatggactgtttgctgtattgatatatttgtagagattgtcaatcctggttttgaggtattttgttgtttatttgtgtagatgtagcaattttgcatatattgcatttctgtcatagttaattctttgttgaagaaaaatttaaatctaggactgtctttcttcaaactctgtttagtcagccagtatttctacagaattcaaacttaatatttaaaccaagtgtcttagggtgggtatacgtactgtatcccatcttcacaaaatcccatgtgtacctgccagagagtaatataaatggctcaaattaggctctatttggatgatggtccaactgagtgatttaagctatttttaacgcctctagtgtatttcttgtagaattcctcaaatggagattcttttctgagatatattgactgttaagaaaaattccaggctggctgggtgtggtggctcacgcctgtaaccccagcactttgggttacacgagggtggatcatgaggtcaggagttcaagactagcctggccaacatggtgaaaccctgtctctactaaactacaaaaattagctgggcatggtggtaggcacctgtaatcccagctgctcgagaggctggggcaggagaattgtttgagcccgggtggcagaggttgcagtgagccgagattgcgccactgcactccagactgggcaacagagtgagactccatctcacaaaaaaaaaaaaaaaaagagaaagaaataaattccaggcctacttctctcagaaatcacaattgatcatctgtgtcttacgtgagaggtctaggtacaggttttattaatacaaaacaaactaaattttacttaggactgtttatttggctaactaggccagagccattttgaagattttaacacctgtgcatgtaaaaacactcaaggagacttaagttatttgttctttgccaaagttggtaaggtactgttatgattatttaaattttggtgctcatttttcctctaatgaatataataataacttactactattattgtagggaggcaaaagattctttaaggcaagaacatttttctaatctttctagaatatcctacacagtattaggaacatagtgagtgcacagtgaatattaagacagatcctttatctttaatggtaaccacattttatgttttggtcataatagtaatagtacagtaagtctctgttgtgcaatactttgaaattttggatttgactgtgatgtcagtaagatcacatgtgcagtgaacatcataatcccagtttcaatacacatgtcatattattctttatagaagaagggaagagttgatgaagaaaagggataatgcttatggaagaaatggtatatgtgagcatcatgacagccatcaacaattgggagatgaatggctggatggataacttaggaagaactttgaggaagattttagtttcttgagtatttcttccaagtacaagtaactcttacagaggtctgtctccagtgttaactcactagttagggaacattgaataagagaagacagaccagttaatatacaaaaaccatatgagttatgaaagttttattatttttcaaatgagaaatgaaaaaagacagatgacagcaatagaagtaaaattcacaagatgccatttta

SEQ ID NO: 105089 - DNA, 1916 bp, Homo sapiens
tggttttttttttttttttttaagctcatcagctatcgttagtgtattttatgtgtggcctaaggcaattcttcttccactgtggcccagggaagccgaaagattggacacccctgctgtgaaaacaatatattgctaatttttgctttgtttggagcttaaaaaatggtattagcttatttatcctcctctttgactttcatttatacatctgttagttgacagacatttgaatatccagttttttttctattgtgaaacatgctactatgaacattaaaactgttttctgatgcatatgtgtggatgtttgctggggtatatacctgggagtgggattttgtcaaaatatgcttcagttatttatgaaaatataccactccaaaacttagtgacaaaacagcattttattatttcacaattttgtgggttgagtggggagtccttcagcttcatgtgtcagctgaggtgctgagatgattgtagtcacctggaggctcaataggctgtagtcagctgggactagaatgtttgggatgcctggacagctgagagtcatctggaatcttgttccattgggacctcagctggggcttttggctcctccatgtgactgcttagtctgcctcagcattgcagcggggttctgagaaagaacatttcaaagggggagaaagctgccaggtcaactaagggttaagcttggaatagacacaagtaacttcagctatattttgttgttctcaaaatacacacagacctagctcaatgttgagaggagatgcatatacaggtaggggcagaattgtttaaggtcatctttggaaacacttaccacaatgtgtttatcatttttatctcccgtaaaatatctgttcatgtctctcccaaagttttagactgggttgtttagtctcactaatttagtaggaggttatatgtatatgtattttgcatcctaagtctgggttaaatttgttgcagatatcttattccagtttgtgcctaattggtccttaaagcaatcctattagatattttattgcccccattttacagatgagagagtactgcttagtatgttaaaaggaaaggccttgaagtcagcctccagggtgacatttttgttacaaagaatagcatttgcaaaggtgtacaattatgaatcagcatgatgctttgctcaacctacctgttgtaccccttcccctccaaataattgaggcttggaagaatttacaagtatttttatttacttataaatttttatgtaactgtgacttttgctatgagtggactgaggacgtttgatgtgagaggacttgcctggagtgacagagtaggcagtaagttcagccccaagttctttctagtcttatctgccctccttattcctcaattttttttccctaaattattcgtttggatcaaccaggttctgccagcatattcaaaatccatcttaaatgtagtggcgaaatattttgcaaaattataatagaagccagagatttataattaatattcaaatgtttgcattatatactttaaaaagaacattgcaggtcgggtgcggtggctcacacctgtcatttccacactttgggaggatcacttgaggtcaggagttcgagaccagtctggccaatatggtgaaaccccgtctctactaaaaatacaaaaaatcagccgggcatggtggtgcatgcctgtaatcccagctactcgagaggctgagtcacaataattgcatgaaccctggaggcggaagttgcagtgagctgagatcgtgccactgcactccaacctgcatgacagaacgagagtccatctcagaagaacgctgtaggcacgcatcaagtacaactcagttggtttaaactgaaatgccacagaacaattctgaattccaaaat

SEQ ID NO: 105090 - DNA, 1135 bp, Homo sapiens
gaaaccagggcccctcagtcctataacctcaaggaagtgaattctgctagaagcctgagtgagcttggaagcagattatttccctaatttagcctccacataagaacccaaccctggtgacatcctgatgtcaaccttgtgcgaccctaaacagaagatccagctaaactgtgcctagattcctgacccatgaagctatgatagaattagtatatgttggtttaagccactgagtttgtttaaaattgctgtataagcaataggaaactaatacaaatacccttcgtaaacctttctttccatctctgaatgttactacctaacttctctctgatctcatgtaatcaaaaaatattgattgaatacctcttacttgccagggactatggctacagtagtgtgaacccaaatagacatgattctagtttagtgagggagttagacttgaaccagtaagaatgaccaatgctgtcaaggaacatgatacaatgagagcttataatagggagataaactaaacacattgtctttttaggaatccttatttgacttttaaaaacttatacttactacattgctttcttacctttttttttaaagcatatttctgccatcacaaaacttgttctatctttattttctgttagcattatgaaaactacctatgtgtattttttaacccttacgagtgttctttcctctctcaagaacacttctcctcttttcctgcctttttgctcaataattcatccaggtttaagttagatgtcagttgtagaagccatccacgagtcctttggacagtaagctttgtgaggacaggtccgtcctgtttgctagtatctttagcacccagtgtgatacataagataggctcttaaaaccaaataaggccgggcacggtggctcacgcctgtaatcccagcactttgggaggccgagacgggcggatcacgaggtcaggagatcgagaccatcctggctaacacggtgaaaccccgtctctactaaaaatacaaaaattagccgggcatggtggcgcgtgcctgtagtcccagctacacgggaggctgaggcaggagaatggcgtgaacccgggaggcggagcttgcagtgagtcgagatcgcgccactg

SEQ ID NO: 105091 - DNA, 1205 bp, Homo sapiens
acctttttaaaaagtagaattacgattattccatttatctgaaatccgagaacaaacataatgaatctatggtgaaagaagtcaaagtatgcttggaaagaagtgcctaaaggtgcatgtgggaactttcatcatgagggtgatgttatgcatacagttgtcaaacctcatctaatgaaacatgtcaattggtgtattttaaagcatctaaattatactttagattttaaaaatgaaaaaaaatgagcgaagaaggtatcctttagtaccccctgggttctctgcttaattatattttcttgttgcctcttcctcctgtgagattgtcagctctgtgaggtcagggaccaagtttgcctgtggttcttagaattgtgtacttgtatgcagaatgcccaagtttattggccctgaagtgaatagttatttgagatctataatctattcatagattatatccatattttatggctgcatttttaagaaaaatatttgcattattacagaatcttacattcagtgtttttctttatgtagcttctagctttttctgttctaggattcacaaaagacatctgtttaagtgttggtagagtagtcttgctccaactacaattttgccaaccacagtttgagatagcacagtgctatatttgtaaaccaaagtttaaaaatcagattttaagaaacaaattgtggtttattttattctccttaaaaaaatgaaaactcaatattaatcttgttttcttgtgaatcccttcctgccagttcttaactttttgagccaatggaaaaaatgagccttggtcatttaatctttttgatcaaaagcccttaaacaccagagtaatttgaaaaagaaccaggtggttacatagctttttgtctaactagtactatctctcgttgttgttgtttgtttttgttttgctgttttgttttccctgatgaaaataatactaaattttaaatgatttaatggccgtgtcaaaaacttgaaagataagtgtgtagatagtctgaatttcccaaaaccgcgtcagcagctccaaggtgtaatttctctgaaactttaagaaggtaactcagagcagatttttcagtgctggtgagttttaatttattcatcaagtagatggctttttattgtgatttatgttggaggtcttctaaaaaataattttgaaattctgcaaaacttt

SEQ ID NO: 105092 - DNA, 1074 bp, Homo sapiens
ggaagagattccgaaccaattgttaaactttaaatcccataaataatttattcaaatcaaaataccaatatataataattatggtgataataatggaagttctgtatctcttggaagatgttgcaaataatggacaatagaaacaataggcttaaccttttaacatgcctgcctgtcttctttccttccttgcattctctcattctttctttttcatgagaaattggtactttgctttctctcagattagttgttgatccatgtataacgtgtattacaaagatgaactggcctttttagaccaaatagaaattcctgtttcttgtttttatatctcagagttgtaaaagcaggaaggaaaaattatgtgagaacaaatgcttttccatttcttcattctttttgttacacttactattcaaatgatagcaggcagacattatatttctcattggacaatctcccaagtagttgtgtaacattatgtgacaaacttggctgtgatcagaggagggattgagataaaataagcatttgttggttgaaagaggaaggagttgttgtacatttttttgataatgaagtgtacacatacttactcataaccttgtaagaactaaacttcggagaagtaaagatgacaaattatagcttactgagaagagttcagttatctgaagattgacagtggttgaattggttaatataagaagtatgagaaaggtgccaaaaaggagagaaatgtgagctagagatagggactacttggctttgtttctttgtgatagtcacacttattggaggatttgtttggtaaaaccaacaattatgtatgacccttgtaaggtggtgagtgaggatggttgttactggtcaagcagtacttaataaaggtttctggccatgattttttaagacatacctataccaaagaattgaaatctgaaatggtacagtcagacatatattagacttctctgtccttttatttccaaagtaactttagaaagggcataagctttaaggttcaaagttgcatcttaacagatcttaagagaactacaccagtggttt

SEQ ID NO: 105093 - DNA, 4521 bp, Homo sapiens
gacacaaaggcaaatatttttaggatttgggacataaggagaaatgaaggtgaaagacaaagcaacattgtcttgtatcggagaaatatatgtttgatttttttaaatcaattttgccaggcttattcattttattagggtttttcttaacccaaagaaacttctgactctgttgattacttctagcataggtttgttttgcattttttaaattttaatttattttcttcttcttttgtgagtttattttcatgttctttttctgacttcttgagatggtttctcagtaattttcaacttttcttcattattaagagatgcattttaagcctagaaactacacactagccactgtactagctgcatttcataagttctgatgtgtagtattttcattatcatttaaaacaaaatgtatctttattttcattataatttccctgactcatggattatttagaattgtatttaatttcaaacataaggggattacccagttatgtttttttgctttgtacttcaaatatattgtggttagagaacaccttctatgtaatttcaatcctttaaaatttattgagacttgacttgtggcttaggatatatccaaatttttataaatgttccctttgtgtttagaaagaacatgttctccatgatagtaaggtgttgtgtttctagtctggggcatcttcttatccttgatgtaaatagagagaaagacataaagagatgaaggcacaatagtcgttatcatgttctgcattgtgaattggagaagtattaaatgggtagtacatacggcagatagctattatctgcagttcttgtggtgctaatcttatcatatacctaaattgtattacatttgataactatagtttttcttgtgcagtttataactttatcttaaattaatcctcagtggaagcctgttttctctaagagtcctgatgtcctgagatttgggatcatccctgtaataatctttcttatttgcctttgctggagaattttaggggtttcactggttttaggacagttttacttagtttgaggtttcttatacttaaggttattataaatgtagaacccacattgacacatttgaatgagtttcatattctcctttaggactttgtttctgctctgagcattggaaggcttgatggatgaatagaatttgtctagtttcataagcaggtcctgactttttgctggtaattaggtcttcactctgatccctgtgttgggtgaaaccccctcattttcattccttaaggcctgtatcaggcctggttatgtttggcttttttcttctctcctgtgggctcccatgacatcagcacctactttgaatttcctcttcatttttggcatctggagaataccctatcttgagcttgattatgctttttttgttgttggggttttatttgttgatttatttttggttctttcatttagtacttctatgaatcttggctgtttttgtgtgtgtcagttcagtctaccgtattatatggatatattgtcttatcttgaaaaatattttaaattcactttgtttttttttcccccccagtattgctgacaaaattacacactggtacctagtattgaatctgaagtagaacagaatttttatgtgttgagaatgtggatgaattatcatgcttttttttcctccccctccccctttctccttccatgcatgcagtaggtattgagcatccactttgtgccagttatttttctggatgctggggaaaaatttcctgctattctggagcttatattcttgtgagcgtaggcagttaataaatagaaagtaaataaataaaataaatagtacgtcaaatgatgataagtattatggagaaaaagcaagagagttaaagacgggagtgtgggggagagaggttgcagttgcaaattgtatagccaggaaaggaaatgtataacctttgtagtttctgttatggagtaaaaaaagagtcttttaggacttacctaagggagcagatgtaaatgcatgttttagtcactgaataataactcaggaagaatgtcctgttcactgttcttgaatccttttaatatttgatgttcctcttttagagtgagggtacgtataactgttaactggcctcttctagtttattatttcccttttatccctaagtactttatgtggtataaaaaatttaatttttcaggagtcccaaaacattatctctggattcaccaactgactcttccctcttttcctagctagactgttccctcttttccttgcttactttccaaatctagggcttgaaaggagggaacatttttttataaatatgacttaaataattttgtgtgtaatttttctttatcttccttttctcattttcttatgtacacacaagtatgggcaaaattggagtatgttagaactccaaactcaaggataagctagactaagaccctgttttgataaaaaaaaaaaaaaaaaaaaaaaaaaagttagtgggatcagtaaaaaagttacctacagttaacattgttaaacattttgaattttaatcattcttgtttcatattctccctgatctttttatgtattcctccagatatgagctagttctttgtatgcaacacaaaaaggtgtgggtttttttttgtagtttataaagaaggcaaattgttttgagatgttgctttcaaacttatgtaaggtaaacaaaatgtaatgatgaagagtacatacattaatatttttgtgtctcattttatatgtaattaaattttccatttttttcttcctaggtttacccagggttgatgataaccgctggccttattcattggattttaaatacattgaacataactgttcacataagagacgtatgtgtgttccttgcaccaacttttagcggccttacatctatatctactttcctgcttacaagagaactttggaaccaaggagcaggacttttagctgcttgttttattgctattgtaccaggctacatatctcggtcagtagctggatcctttgataatgaaggcattgctatttttgcacttcagttcacatactatttatgggtaagtgacatttaatgttttgctgccattattactcgtgacctttctcctgaaacactttaggctgtacgcagatttgtcttttacaaattatgtagttgcgtacagagatctgtattactgttcataatcaatttaataatggataacattttaaaatatgttaggcatctctcaagttatgtgtaaatatcctttttaaataagtcagaactccaaaagaagagctatcataaaacaatctgttgatatttttgtttctttgttttggggagataggtaagaaatagttacccaggaaagttgaagcatggtttgatggctaagaattttaaattgtttctgaaactagcattatttattttgctgctgccaggctatttaaacttaatgattttttcccctgtgtatgaaatatgatgctacttgggttcactttagagcttgcatttatttatgtatttattattttagctttagcttgtaattttccagtgatagaaattaccaaaatttgtgtgtgtcaatatgtttttgtatattttattaagtatatttttaggtagctaggtgaatggcagcataaattttctctttaataattattttatattgttcaaaactacttggctaatgagtatttttgctctagcatggaattctggaggagaaggttgcaatgtgatcagtatagacagtgtcttaatcttgagtttaaaagagaagaaagaaaaatacccattcaagtgaagatgataccaagcagtaggatgttgccagtgctgctgtacttatcaaaaagtgtttttaaaaactctttgtttattgtgtgcagctgaggagaaaaaaaaaaaaacaccttaaaatcgagaacctctgttgaatgccttttaataaactatataatattttaaatcataaaaataatacatgcgtatgtggctagatcctgataatataatgcttagtggaaaaataagttgtgataaaatatgtgcagtatgagaaatccttgatgtaagtttttaagcagtacaaatcatactatgtctgttaatagcagtttataaagaaagtataaaaatgtgatagataagctgcatgtacgccagctttgtgataatgggttttcctgagggtgggtgggtgatactgaggtgggcaatattaagggagcttcacctagctcagctaaaaaaattttaaatcaaatattctgaagcaaatgtataatttttgaatttgaaagtctgaatagctaggttcataactattttaatattctctacacttgtgtatgtttcaaatactttataataaatttaaaaaataaaatattctattttgtggacatttatgcaacagaaaaatacaaagaaaaaaatcacccacagtgaactaccatttgcatttttt

SEQ ID NO: 105094 - DNA, 1130 bp, Homo sapiens
taacaataacttaaaagtgtaaagagcactgtcaatgtaagctgcaatgccttatcagagagaaggtacttaaagattgctttggggaacagcaaacttcttcaatacttaaaatttcatttgaatttgagtcagacttttcagtgccttttcttttctagaataattcacttgagcacattaagtcaaggactatggtatatttcttctctatatctgtctcgtcccacccttggatataaaatatttccaagaatgtagacatctttaggttctgttgagattattacttatctgtcccagatgagagattttctttggttaagaataaacagaataataatatatgtgtgtgtatatgtatatacatatctttctaatggtaattttttgtggaatttttctcacacattggaattatcatctccagtaatgaatgccagtaactgtgcatccacaggatggcagtgtggtaacattttcatgatgtaataaatgatttacaacactattggtatcatgtatttccttagagctcaccactttgatggaatgctttattcttctaacttaaagggtaagaaaagtaggtttacatggatggatagaaaattgtaatagatgggtatagtagtttagttagggttcttaaagagttcattggaaggagaattggtagagaatgatggctatgggtttgtcttgttgaggtcttctgaaaacactagagaacagtaccagacattaattacctcttcgaagtccatgtcaagaaaagaagagatcttaagttttatagagcctttcccccaccaaatgtcacatgacctttcttcctaatattatggttatttgtttacatctctgatttttagcaatttatctgactcttagagggtaggattgatcttaatgggattttctgtttttagaatatattgaccatactcaagttaatgtttaaatgcataaattgaagaggtaatttctaaacatatattagatgctgtagtacaaagtctggcaaaaagcgtatgttttcattttgcagtggagattgtgtttctttatttattttgagatggagtttcgcttttgttgcccaggctggagtgcagtgcgatttcagc

SEQ ID NO: 105095 - DNA, 1050 bp, Homo sapiens
ctgggaagaacttaaggcctatttgttcatattcttcttggtgtctctgtgtcttcatcttttcctctgggtgttagaaggacccctctggaatgaggatcttataacctacttacaggaaggtcagagaattattttatgacctgcctcaggggagaacaaacagaaaagatgagagagacttcccagtttctgctggtttctcaaatgccaagatgccataatttggcatgagccctgatacaaatttagaatcttgtctaaatgtgtaattaaggtcacatcttattactcagttataaatagtaactatatatcaagattatcctgatcctaagtctttgtatccttcagcaaaacaaatcggagaattgtttttcagtgattttgaaaaattacttccctccaccccagaaaacccccctaaaatatagaggaaagggaggaacttaatgtgttaaataggcttgttattcaaatgggattttttttcccctttggtctggtacatgtgtaaggagtctgatcatttaggaaaaaaaaaaaaagtcacagaattttttggatgtattaattaggcaactgtcatttgacaaaggaaatgttggctagatgaaataagtagtctttgatatgaatggtgcaggacattctaagaagctctttcaaatgaaagtttttaaatgaccttggaaaactgctttgttgattatgtgacccttttctttaattaggtgtctttgcattgctgcaagcttatgctttcttgcagtatctgagagaccgattaacaaaacaagagttccagacccttttctttttgggtgtatcactagctgcaggtgctgtgttccttagtgtcatctatttgacttatacaggtacgtgttatcacctgtagggtgtgaatattgtctatacaaacaatataagaaaaatagccaaagtttctaaaatctgaataacagcatgactacaaagtgatttttttctttttttttttttttgaatagtatatcttaattttgtggcatcaagctctgataaatc

SEQ ID NO: 105096 - DNA, 1065 bp, Homo sapiens
tgctgacttaaactacagaacaaattgccagttgaacagagatttctgtattggaattcagagccaacattctcatgtctggatctagataattctctgaattttacagagggcatattagttttagttttaccagtgtagaccaaacagaaactatccagtataactggttaccttggaaggtatatttaaataagaaggggtagggagtaggtaccatttctacaaccaaacaagatttcttcatctaaaaggaactcctgttttatcacttaattgtaaacaatattaacttttttaataccaggtatgcaaaaatacacattccaattattgcatcagtgtctgagcatcaacctacgacttgggtgtctttcttctttgatctacatattcttgtatgtaccttcccagcaggcctttggttctgcatcaaaaatatcaacgatgaaagagtatttggtaagagaggtttttaatgaatactttgatatggaatagttatttttctttttgagattatttactttaaatttttgtttttctatgtttgactctatatattcaagataaattttctcctttattttgcataggtgcttaaccaagaaaaattcactgagaggctgggcatggtggcacacgcctgtaatcccagcactttgggaggccgaggcgggcggatcacctgaggtcaggagttcgagaccagcctggccaacatggtgaaaccttgtctctactaaaaatacaaaaattagccgaacatggtggtgcatgcctgtaatcccagctactcaggaggctgaggcaggataattgcttgaacctgggaggcggaggttgcagtgagtcaagatcaagccactgcactccaccctgggaatcagagcgggactctgtctcaaaaaaaaaaaaaaaaagaaaaaaattcattgaatttgtattaagtattttgattgttttaatttaggactagtatattatggtttctgagaggttaatgttgtagtttgtgtttgagaattgaaaattttaactttgttgacaatagccttgactttg

SEQ ID NO: 105097 - DNA, 2475 bp, Homo sapiens
tagccttcagccagaaatagttagagtcttttcctgtggttagcacattatccagaaagctctggctattggaaatttgtttcaaaaattttttttaagtttcttggcagtaactttgcaggttcctcctttgattaataacttacgttcttctcatcccgtttttgttttaaagcaggttttatgccagatattggcactggctttttatagattttaaatctataaatttattttgcctggagatgtcatgcacaaatatgtttttatctgccagctatgggttttttatgatgttattgacaaatagtgaattaagtctaattcttcataactaattaaatttgaatcatatacatttttctaaactgtggatgtgtaggttttatttagtgaacactagttataatttctaaatgtggctaattaatcagttgttcagtagtatcaatttagaaacaattagatcgtttgtgagacatttatataattccaggttggttttatagttttaagtatctagttcagtttcctgggaactttttccctccaacatattgtaagagaatttgtctttgcagttgctctatatgcaatcagtgctgtctactttgctggagtgatggtgcgactgatgttgactttgactccagtcgtgtgtatgctgtctgcaattgccttttcaaatgtttttgagcactatttgggggatgacatgaaaagggaaaatccacctgtggaggacagcagtgatgaggatgacaaaagaaaccaaggaaatttgtatgataaggtggggaatctaaagtaaggcctttaaattgtctatgtcctttcttaatttttccaccacagtaagaactatacatatcaagaaatgttattaaatgatgatttggacaaactgtgacttttctagttggtctccactgtttgcctcaaaatatgaatcctggtcagtcctttagctcagagttagaaaatagaatgtaatcagagaaggaattcctctttttggtaatttgttatctaaatacttaagatatatacccttgttaatatacccttccatttttgagagcaaaaactttatgctgtactaaattacataacatttggcactgtaaacccctctgaaaccatgtggacagacaggtgcttatccttgaggtccatactcagtgcatactttcaaaatattttggaagtgacatttgattggttgaacagtaaaatgaagggagcaaaatgccttttttaaaaccctccagttcgttagcaataggtaactggccaatacaggtaatttatttttaatctatagtttctcagttggtgcaagtgtgaaaaggacttgtaagaattagagcacttgtcttggatgacatattaaactttgctatttgaatattgcctggattttaaaatactaataaattaaacttcccagtatcagtaataactttgaaattctttccttctataagatgaatgtaattcataaagatgtgtgttaataaacccacattcctgatttttgtgtttgttgttattgttggggtttttttgttgctttgtggtttcttaaccagccttgaaatttagaagttgtgactttttctattctctcttcccttttctgttggggaaggtgattttttaaggtaatcgtagttttaacaagtctgttggttttagggtttcgaaatcggaagactgattctgttaatgcagttttttcctatactaaagtggtacatggtcaaaattatagctgagcattgccattttcaggatgtggaattcagattttataagaatttacatattaagatttcaccagaatggggtcatttggttaatctcctttgtatttaattaaagtataaggacaactgggtttgaaagcagcttcttactggagataattattttgctctgtgaccagtttctggattggtatattcccaggaaaccttattcacgtttgacttagaaaacactccatcacccacataagaatatctgatggttatacattttctgagtcatagaattaaattgatagataaacagtctctcaactttttccattgagtatcttaatgaagcaagtcaaataatgaatttgtctaaccaatttttttaatatctttaggcaggtaaagtgaggaaacatgcaactgaacaggaaaaaactgaagagggattaggccctaatataaaaagcattgtcaccatgttgatgctgatgctattgatgatgtttgctgtccactgtacctgggtcacaagcaatgcctactctagtccaagtgtagtcctggcctcatacaatcatgatgggtaagaaaataactcggatacaaaaacattttatacttacacttctttttcgttgtctcaaaggatataattaaaaaatagaatgttgtttgtgagattctgcatttgcttgtttttaattttttattt

SEQ ID NO: 105098 - DNA, 3609 bp, Homo sapiens
ttagaaatgcaaattcttgacctcaccctaatgttacagaattagaaacctggggctggggcctagcagtctgtggtttaatagacctaggtgattcagatgcagctaaaatgtaagaacagctgatttatgtattgccatggctttcaactactctttcacttgggagcttattaggcttgtacactattaggccctaccccagaactactgaatcagaatcggctttttttttttttttttaaatacaagatatgcaggtggtttgtgcacacacacattagtttgaataacaccagtctagctcttcattgtttcacttttttttttctcattggtagaggcttttacttaataactaccatccttaaaatctgaaagtattcagtggtttaatacctcaagattttaagttagcctcttcacatttgtgacatctcatttaaaagagtattgtgattcttttcagcaccaggaatatcttagatgattttagagaagcttacttttggctaaggcaaaatacagatgaacatgcacgagtaatgtcttggtgggattatggctatcagatagctggaatggctaatagaactacgttggtggataataacacctggaataacagccacatagcactggtaaggatttactaaatacaaggttaaaaaatctttattcactccttagcaatcaggcttcacttgtgactaaataggaaaaatgtgggtgaaaagtactctgctgaattctcaaaatacttttttacacatatgttcaataaagtgagttcaaggtgtgcttattttgtttttaagaatgatactaagtatcattcagaattgcaggctgatttctggtagattttatgataaatttagcttactgaagaattagacaaaatctgaaacttaaaatgtttggcttgtatttttcgtgttataaactaaaaattatttgcaaatatgtaaagtaaatgcactgtattttatggataggcaaactgttcctctagctattaaacaactaatctgcatagattaatgtaatcccctctttgtacttcaaagatttttaaatacaaagagtagtcttaaccaaatgaattctatttgtattactgttgtagctaattatcagatgcatgctagactggggagaagaaatgtatgtgctagcaagatcactggccagccctggcctgcggttgtgagaagttgttttttctaagcttgcctgctttcatcataaaatgttaatgttatagaacttaattattagcaaaatattagagcatgtattctgatttttgactgtaaattagttatagtagttgagaggttcataaattccaatgcatttgttgaattcatagtaaatcatttctgcaaaaaaattccatgtaaaacaaactcttgatgaattccatgttgtagtaaaaaatatacattgatttttatgaatgtgggaataatcaaaaacattctcatttttttttaaattctgcaggtgggaaaagctatgtcttctaatgaaacagcagcctataaaatcatgaggactctagatgtagattatgttttggttatttttggaggggttattggctattctggtgatgatatcaacaaatttctctggatggttaggatagctgaaggagaacatcccaaagacattcgggtaagaaactagataattccaggtatgtgaaagatagctcactgtgtcctcgtaattctctcatcttgctaattgcattgtatttgtttcatcatcctatccctcagattagttccttaccctggctttactatttattaaagatagtagaggcatttcctatattaaaactttttgaagtcaaaatggaactaatataccattcttccctatgaagcagtcccttgccaagacttcttacttttacgtctcttcacagcctctcatgtcatccctttctttccatttccattgcttccactctagtacttacccttatgcttgtaaacctgaaataggatagtaaccttgaaattgctatctttgccttgtttcctccctcccagtgtaagataaaattgatcgtgttacttttaggctcaaaagacttcaatagattaagggaaagggtcttaaaaccatatagacatgagttaaaactaaaactgtcaacttgggcaagttattttagcaagtcaacataatatgctttgagcactaggtctagttctaggatctggaattaaaatggtgaccgaggccgactaggttatcttttgccaaaaataactaatttatagtgccgtttaatgagaatttatagtaaagtagttgaagccccagcctagggactggtacaaaatagataacctctgataaaacattagtataaagtgtaaactctttagcttggaatgtaagcctctttatgttttgccttcctttgctggtgtcttgttcttctgccacctttgtctactctgccagtatgttctagcccctgaaacttgcttgtgctttctttccttgactcacctgacacgtgtgtttttactgttctctttcctggaataccttccctaccacagacttgccccctctccaaaagcccttttctggtatactcacatctgtactcatcaccaaattatttatacctgttttgcaggagtccccagaccccaggcagcggaccagcactggtccgtggcctgttaggaaccaggccacatagcaggaggtaaggggcaggtgagcgatcattgccgcctgagctccgcctcctatcagaccagcggcagcattagattttcataggagtacaaaccctatcgtgaactgcgcatgcaggggatctaggttgcatgttccttatgagaatctaactaatgcctgttgatctgagggggaacagtttcatctagaaaccagcagccctccgccatccgtggaaaaattgtcttccacgaaactggtctctggtgccaaaaaggttgggaaccactgcttttttgtattagattgtgtcttacctctttcactaaattgtgagcttttagaagatggacatccagcattgtgcttttacatgatgaaggcacaaaagataagagtaattgccactgatccagaataaaggaatcttttgggaaaaatgtatgcaggtgtcgtgtgatgcagatgaagtaaagcctcagatttcctggtcaaatgtcaatgctgtaatgtttcccttaactgtgattagtaaacattatttttttgtattaatcttctgaaatttaattctcccagtatggtttttatttgtggatttgctttagcagtcagtgttaaaactgtgacatgtgatagatcactgtttctaaatgtatgctttgaacattaatattacagaagtcctaaatttctgtgcatcttaaattatttttaaactttgtgaatagataatacactcatatggttcaaaagtaaagtataagaggatatacaataaatgtctacccccttcacgtgattcaaaaataaagtataagaggatatacaaaaaagtctaccccccctaaaaaaaaaaaagttcctctataggtaataacaatgtattgt

SEQ ID NO: 105099 - DNA, 2556 bp, Homo sapiens
tcctacctaaaggattatttttagagaatgtgccaagtgattatatctctcatttttgtagatggttacagtcatcctcattttacagaaaacagggactctaagagttactaagttaacgtgtttttctggcacacacctaatttcctggaggctaaatcaggagcagcattaccatttctgattccttagtctagtgttacatattctgtcttgcctggaaattttaataattacagctcagcactttgtggttgagaagagggctgaagattcattcacttgatggtgaggatgtctaggaacctagtcctttcactttgaatgtgttagtgtactcaggtaagaaacaccactaacagtttagtggtgttcactgaactattcaaggaatccagtcacaagaagagcagagagcttactaagtcatcatagttcagtaaaccatgtgtgtgtttatagattttttaatcagtaagaaacctgcattaatactatgtgttttgtttttttatagactaccaaaaggaagcgtggctacattaaaaataagctggtttttaagaaaggcaagaaaatatctaagaagactgtttaaatgcactgttctggttcctaacttgaagcagttgtccttgtgagaaccggtctttgcctttagctcatgtcgtgtttcacagcaaagagggtacagaaccatcactggtccaggttaatgtacaaaattttctggcaatgcctgattaaaaaaataaaattggcttgttgagaacagctgttttcgatttctaatgtgaagcaagacagagcactgctgtaaatgtctagcagcagattttttttttattggtacatattatccttcaaatctgagaatttggactaactgcaccaaagaaccctctaatttggtccctggcacatgcatacttgtcaatgtttttattcttttacaagacctgcattttatttgaattacccgaatagcaatatgtaaaatacaagtgacaaaatgtgatgagagcttcttgaaccggtaaactagtacaggtctgagaaagacatattagaagaatcattatacttccttgaattatatttattttcatgtttctctaatgcaaagaatgtttcatcaaatgtatattttctgttgcttactgtttgctctgagaagaagctgctgtttcaaagatggacctctgagtagctaattgattcaagtagtttttttatgttgacacattattactgctgttagcagtcgttttcaccaggtacttacagagcagatttcatacatcattcattcaagggctaaatttatattttttggaaatcatggcaactacacaggatgttgcttaccaggacggagttttggtatcttagtactgaagttagcactatgtttacatgcaaaagattaaggaaaaaacccttaaagtggacaggtatccaaagttcattttctgtgactcatcaaagtgacaaaagacttgtaacaactttgcctggacttttttcattttacaacagttcatccattcacaatgattttgttctctgctccatattttttaatcccttaagcatttgatgaaacactctttagtgctatatgcattttcttacttttgttaaaaatgtgacagttgtcaaaaaatgcactaaaatgtaaatggagattgaacaagttcactttccagcttataggcaactttatacagacttgaacattttctccagttgtttagtaaaagtgaaagagaaagggtttttcctgccacaggatataacttttttttatataacaagcataacacaccactgcttttggtggaaaagtgcagaatagtatgtaccttttatgaagaaaaatgtaatttacaatattcagtgagaatgttactgctgattttcttttccaaggtgtagaatattctttgatttatagaattcatttttgacccagatgatggttcctttacagaacaataaaatggctgaacattttcacaaatagagtgtaacgaagtctggatttctgataccttgtcatttgggggattttattttactttgttgctttaaaattcaatgcagagaagttgttgactgtaggggaaataaagttaattcaaattttgtgttaagtgttgttttttacaaatcttttggttttgaaaggaattggtactgaacacatacctccttcttccttgttgactttcacaaaggttttaaagaaaatgtgtggaaaaaaatacgttagattatttcatcttagaccaagctattttatttggccttcttttaccctggaatgaaaatctcaggtttttttgtttttgtttttgtttttgttttttgttttttgttttgtttttggaagggatttggggagggggaacacctagccaactaggaattttatctctgtttaataaggatagggacctaacaaaaccatccatgaagttctggtaatgaaatgtcaagtctcagtatagaattttctcattagaaaaatcccaaaggaaagacccctcacct

SEQ ID NO: 105100 - DNA, 1049 bp, Homo sapiens
tcttccttcccctgttcattttcttaaggaaaccttcccttaccaggtcagtctctcctgttggaggcctccattgtgctggccaccttgccctcctacctttatcactgttacaattttgtgttcatttggtgactaatgaccacctttctcttctgctttctgagggcagaaagtgggtctgtcttgttcactgctgtattctcagtgccttgcacacagtagagcccacagtgaacgagcagctcacctctgcagaggtgggagatgtgacatctgtgcaggaggctctttggtttcccatcttcatttcttctgatccccagtgccctcttcacatgtttgcatgcctaactctccctcctctctccctggaggtgtgttgaggctcctggaacacggggaggagtacgtattcaccctgcctagtgcctacgcccggtccattctcaccatcccgtgggtggagctcggaggaaaagtcagcatcaactgtgccaagactgggtactcagcgacagtgatattccacacgaagcctttctatggagggaaagtccacaggtaggagctggccggagagactctggctttgtcttaacaagatgccctgagtttcctttcaccattagaagactgagtttcagtaatgggatgagttgaaaatcaagataaacttgttaaggtcttttccaaaagagatgccttttccctaccttacatggcagttttttggagtcctccccaccctaaacttaaggttaaatcttcggtgatgcatttgcagagcacacgccagaaaataaaagcacttctgtttgttggaataaactctcccttctgaagccacagtttgttgctttgctctaaagtgattgaatctatgaacccagacatagccagacagttccccatttcacattagctggctacactatcctcaattctgtgtcatgcatccatgaggtcaagatcatttccttcttttgaaaaactggggaagcccaagcctaagtaattgaaggagaggtctgctctttgaggaagca

SEQ ID NO: 105101 - DNA, 1020 bp, Homo sapiens
tgggaggctgaggaagacagatcacgaggtcaggagagcgagaccatcctggctaacacagtgaaaccctgtctctactaaaaatacaaaaaattagctgggtgtggtgccacgtacctgtagtcccagctacttgagaggctgaggcaggagaatcgcttgaacctgggaggcagaggttgcagtgagccgagatcgcgccactgcactccagcctggacagcagagtgagactttgtctcaaaagaaaaaaaaaaaagaagaagaagaaatggaaattctgtgcaacagagtgatacaaacaaaaactagaatatttagtattgaaaggattgtaggtcctacctgagcacagttgtatcttaaaattcaccttctttttgtgcttaatataagaatcccaccgttctgattattaacagtgctactacataccgtttgcattaccccaggatgattacagctgtctcacaaatttcccctggaagttttcactgaatgaagcatttgagagcaggacaaagcagagcatgataatgtgacagtttttaaagcagaggacatagtgagcctcatttggggtttatggcagcggaataatgtgaaaaaaatatgaattgctgcaattaccctcttacatcctgagtatcatttcacatttgagtaaaagtacagggaaaccttcttttaatatcctgtgtcactgtggctagaaaaatggacacacataatgcaaattaaagagaatagaaaatgcctgctgtttggaccaaaaggtattgagtgggatttagagattgcagctttataatggggcattattggtgcctcctcattgtggaattaagggctgtggtagtttcgctcttggtttatttcttttttttctacaaaatgctagagcctgttttctgccagatgctttcttcttggtttgttaatatttacagaaatcaggacggaataggcgtataccagagttgtctttaagaaaaataaaaagaataagacctgagcttt

SEQ ID NO: 105102 - DNA, 1111 bp, Homo sapiens
cccaaacagctagtagagcttggacactatttttcttcttaggccattgtgctttgccacattttttgtcttaatagttaaaaaaactagcgacatccacacaatagtttttctgtcagaaaaaaaaatgttgctgttgcctcctttctgtacattgtggaggaataacttctatatagaatgaagtgaaattcctaaaggttaagaatgccttatgagcaggtccttaatgcttttgatctagaggatatagttacttatgtgagtgatcattgggaaactaactttcagaattgtggttattatggtcgtgtaactaaattaactattgtcttctggtttaccgtttagaacatgttaggtctttggggggataagtggggtaccaaaggtagctcccctctgctggttctggcttcccataaaataacctacatctgaaacagtaacgcattttgaagcttagtctgtttaattccctgcagaataaaagctcaaagagctgtacatatttaatacgtgagttagaagagagctgtggtcggctctgttataaaatgtagtgatcttagaattttattctgctggggctagaactaactaaatgtgaaaatgaaatattcttctataatgaaatgagttaggatcttggttttacctattagtaaaacaattttttcaacaaaaaacaccatctgaaatgtaaatcaagatagaaaaaggttttccgtgtgtcgcttcatcatgtatgccttactttaggacaagaaggatggtgattggagtagagactgtggaccaagctctcttgactttttctttttttttttccccctttttttggagattttttttttgctctgtggccaggctggagtacagtggcgtgatcgatctcagctcactgcaacctccgcctcccgggttcaagcgattctcatgcctcagcctcctgagtagctgggattacaggcaggcgccatcacactcagctaatttttgtatctttagtagagacggggtttcaccatgttggtcagcatgatctcgatctcctgacctcgtgatctgcctgccttgacctcccaaagtgttgggattacaggcgtga

SEQ ID NO: 105103 - DNA, 1187 bp, Homo sapiens
gcaaattctcagaaagggttaacatatgtaatgtgttgacaggttgtgaattttgttttaaaggttcatctcaaaggaggagtcagaaataccttccgtgaaaaagcttgcatggttcatttttaaagaaactgcaaactcataccagttcatttaaagtgtaatcaagacaaagtcttgaagctcagcatgctcagatacatcagaccctgagcaccttttacattaaaataataattacgaattttgtcaatgattttgaaaaccatagggaaagccaggtgtaatagtgagaatataaaacatgctcccttggagacagtgttgtttgtttgaattaaaatcattcccaccaaacagacacacaaagtaaggaccttgaccatttaaacagctaaaaaaaaattgcaaaccaaagcagatttagtagttgggaaagtgaatgaagtcttattaaagttgagtaacttctgaaaaagcttaattttaaaagcttcatttagatcacgaatgctgctgtttattgctgttggcagtcagcacttcgtgttttggtaaaattacatcttgtcctcatgaagcgcgtttggtaggcgctgttacgttatggccactgtgggatggggagctctacctttaatggtgcttgtctgggaagatggccagtaattttggactaagtaactttggttgttaaaatgaagggcttcagatatttttctctccccttctgtcctaatacgggtctccttcattgttagatcacattctgcttttttgctgattgatgatgacatcagtttgtttaccctagaggctgggtcatttgcttacttgtaagtcagtggaactggcttttgcatctttgctactgactagctgagtgccctcaagcagggttttttaacctctccttgcctcgtttttctaatctgtaaaacggagataatatcagaattattatcaggattaaaaatctgtgatgttgatagtattggatttcaacccttagaataacataaatatacatgattcgtgttgatataaataataggatgaacaaatacatggggtggggtgagtaaaagctcttccttaaaatagacttctaactaataaatgtagaataatgagggaaatgaaagatcaccattgagcaaacatcatagtaatgattgttgcaggtc

SEQ ID NO: 105104 - DNA, 1172 bp, Homo sapiens
taggatttcaatatatgaggtttttttttttttttttttttttttttttgacagagtcttgctctgtcgcccaggctggagtgccgtctcgtgatctcggctcactgcaggctccgcctcccgggttcacgccattctcctgtttcagtctcccaagtagctgggactacaggctgccgccaccacgcccggctaatttttttgtattcttagtaaagacggggtttcaccgtgttagccaggatggtctcgatctcctgacctcatgatccgcccacctcagcctcccaaagtgctgggattacaggcttgagccacagtgcccggccacaatatatgagcttttttagcggggaggggacacaaatatttagaccgtaatatgcacatatatgtatgtgtttgtatgtgtgcgtatttccattgtggttttgttaatatttgtatctggttggatgagttcttcccttttgctcacattttcaaaattaacttgatctttcatgaagctttattcttctatttacgtattagaataaatttgttgagttgctcaaaaaatcctgccggaatttttattacaataattataaagctaattagagagaactgacatctttacaacattaagttgtctcatccatttacctgatatgtgtatttccattttctcaattctgcattgatttcttttcatggattaaatttttttttttcctctataaaggtctcatatactccctattgggttaatacttgtacatcatagtttttattactattgtgaatgatatcttattttctattttctgattggttatcgttgatatgaaggaatgctattggtttttctaaattcatcatatatctggcaacattgtgagacccattgatttttttttttttttgaaataaaacagtcacatctacagtgattgttttctagtcctattttgttggctagtgcttccaggaaacagtggtagtggaattcttgtttctaatattaaaaggaatgaagctaatttgttaaaacttaaatatgacttaaatatgatggttactgtaattttttgctttgtaacctaattaagaaaatttctttttattccttgttttcagattttttctctattaaaatggcaattcagcatttaaaggtctctgtgtta

SEQ ID NO: 105105 - DNA, 1040 bp, Homo sapiens
gttatttaaattgtgtaattaaaataataagtacagcagcacaaatacagtagggactaaataccgttggctgttagtaaatacccagctcagctggtgggggcagagtgtgcaggcataactagagaaaggctttgagtcagcactagaatgcatcagtcagtaggttttggaagaaatgtggtgggacatccaattagttggttaaattgaggatattgaaagcatctactacagcttttctaactctgctacctgaaatcctgagatggggcaacacaaatatcttctcatttaaaatagcctaagcctcgcctgggttgtttctaatggctccatccacacactttctgcagatttcagtgactggaatgacagcagcctagtgcctaaaccacaaatactgctaaagatcccctgtcttgaattcattggtaaaaatggagagatctgagagtgagtcaggcgctttcctttgtgcttcagaaattagtagaaaaataagtaaataaaaataagtaaatgaatcttgttggctctgtttactcaagtcctgtgtctggattcaggattcttaaaagtccaagacaggatctaaacatatttgtgttttaaaaataagcctaggccaggtgcggtggctcatgcctataatcccaacactttgggaggccgaggcggtggatcacccgaggtcgggagtttgagaccagcctgaccaacatggagaaaccccgtctctactaaaaatacaaaattagctgggcgtggtggcacatgcctgtaatcccagctacaggggaggctgaggcaagaaaatcgcttgaacctaggaggcggaggttgtggtgagccgagatcacgccattgcactccagcctgggctacaagagcgaaactccgtctcaaaaacaacaaaacaacaacaacaacaacaacaagaagcctaacttagtgttagcataagcctgtgagcctacagtttatttctgctttggcaaaagtgccttactgggaattagggaggggttaaatctagg

SEQ ID NO: 105106 - DNA, 1034 bp, Homo sapiens
tcttatttctgctattgggtaattttgctttcatgttttattaagctcagtgccatttttcttctagaatttttcacagataattactttttgggtacttaaaactaagtgtaaaacatcaccctcctaaacataccatcaaattaagtaaataaaacacaatttaagaacagcttttattaaaacaataaagtttggggatttttttaattgtcttaataaagtgcaacaattttgcataccttctccagcataatcttaacatttggctgcccgccttgcctgaaaggaaagtcctaacattacccaggaagatcattttaggtcaagaaggcctttagattaaaacgtgtgtgtgtgtgtgtgtgtgtgtgtgtgtgtgtgtgtgtgtgtgtgtaatataaacataaatgtatataacatatattatacatatataaatatatatatttttaggaaaaaacaaaatggtacagttttgattcagttgaactagtttattgcaccatacatctgtacttaaatagggcttttttctacaatacttgagttgctgtttttttgcctagaaccttgtggggtgattttccatcgctagccctctgtgagaagttctgacttgagggtagacagctcttagtctgaggacatttcctgcactgaactgcatccactgtgagtgataaagttggggtcagttgttcagagtgggggtgtctggtccctgttttgctaacattggaggaaaggcttagaagaacgaatgaatgcttggagtagcattcaacaaacactgcaagtagatgaatgcttgggagtagcattcaacaaacactgcatgtctgtgtaccataatgttctaggcactaggatatagtactggaccctggaaagtgactacgtgtagcttgtacttgtgtgagggagacatccaacagacaaatatgtactgtgccaggtggtgacaggttctatgaagaaaagtaaaacaaggctggaggctagagaacaacagtaaatattttaaggtattc

SEQ ID NO: 105107 - DNA, 1093 bp, Homo sapiens
ccagtttattataaaggatgttgcaaaggatacagatgaagagatatgtagggtgaggtataagggaaggggcgtggaacttctacgccctccctgggcggtcaccctcctagagcctcctgtattcagctatccggaagctccagctcccatttcatggtttgtctctttacttttcccattttttttgacatagacaaaattttttagaacaaatggaggatctggtgtgatagacaatgtagggaattaggtaaaaacaacaacaaaaaaaaaaacctggtttctggctgtgcctgggccactcacaggctactacctagctttgtaatctcaagtaactcagtaaacgagtaatgtctcttagcctcagttttcacttctgtaaattgggcaaaataatggcatcaaccctacagggcagttgttaggattaagtaatattaagcatgtcacaatattctttttataacacagattcacccaattctgctacaacatttctgttgatggataacttggttgttaagccaagttctacctgaagatgatcatgaaggagtggctaagaagcatctctaaaacctgattgttatgactttccccctaaaagttttgatagactgcccaaatgtttatattccccatgcatcagaaagctccagtataatccagactcagccaggctggccttgttcacattgtgcatctggttttgagtggctcccatctcactttctgtgatgctgcaggattaaaggcaagtgctctaggctctctgggggcagtacccggttcagaactagccctatagtgccacctggggcaagttattccttgaaatgaggacagtaatttttgatgtgaggattgaattgtatgctgtggtgaggattaatgagatcatgtctgttgtgctcttagtacagagccagacactgaatgagtttccgtgaggggtactgtgctttcaggacccagctaagttgggccctgcgaaacaagcagtacctgactgcccaagactggaaaggcacagcttgtgaaatgaaatggggtatttctgataaaaaactgagcttctgcaataaaa

SEQ ID NO: 105108 - DNA, 1055 bp, Homo sapiens
gcaaaattattcttataacgggtatttcagaatccatttttcatatggctcaagagaggattttccgtgggattcagtgcagtctctgttttggtgtaagtacaggccgcttgagaacgttgtgatctgtgcttgcttccccaccttcttgctacctctcactccccaggctccccacccccttaggtgggtgtagaaataagttggatgtgttttggaacaatctctgcaatcatttctttctctgttttctctattttagctgctgatgcaaaagagaaacaattctgggtgactcagcttcgagcttgtgccaaataccacatggaaatgaattctaaggtaagtcaccgtgagaaaggaaggaggcattcgaataaccagcctggctttcagccccattatttgtttcttcggggaaggtgtttttcatgttattttttaagttgcccactgcagtggaattcctacttgtcctgctgcacataaatttaaagccaggagaaatgtagtaagattttcttgtaggtagaatacgcaggcacgcagacactatgggaaccgaatctggaaagacacttttgcattctgttgtcaatttaggcagctgttaattggtctattgagaagctctagtggatgatttcattgtggagatggagttgtcagatttacagttcgtaaatctagtagccatcaccgatccttaaataaaacctagaccctgaattgcttatgtactttgcaaggagcttctgcattcctagtgtatcaaaatgttctcgggtaatttggcatccaagtatgatttattctctcctggggaccttgtgagatcttgtgttaggtgtgcaggaggtaggaggtgggcattttcatggattattgtggaggatttacattcattaaaatacaggaaacaatttcaaaatgcatttatctagggcaataaatatttgttaaaattaatgttccaagggctactcctttctatcattagttcaaatatagttagtgtatccaactgctatctttttctgtattccatgcatcct

SEQ ID NO: 105109 - DNA, 1059 bp, Homo sapiens
agtacctgtgtgagtgtgtttatatgtatagtgtgtgtgagatgcatgtatgtttgtgggcatcagtgtgagtgtgtcacatatataagtgtatatgagggtatatatgtgtgcatttgtgcttcttttggaaacaatggatatatctgaaggatgttagtaggcaatggcttgtcctcagcccttcccaggaaggggcctacacttgccctatctcccagctttgggattgagcaagggtttcaccaagaagctagcctggtgagaattaagatggctttcctcatgggtttgttcgctttcttccctcattttccctttctccctgcagcacatgctttgatttttttttcctcttttattgatgttatttttaacatagcaaagaaagtatgttctctctgggtacaattaagttcaccaacacagcagtcaagttgcacactgtagcttcaagaagttaattaataaaccccagaacgtaggaattagatttgccttattctgttctctagaagggaagatctttaagaatgtttcaggattttatctgacaatttcacttggtttaatgaagcccgatccagaaatacggtttacttttccatttagaatgaaagctgtgactttgagatatagctgcgtgctcctaacagcagtacctgacaaagccatgaccctgtgggaaaccaaatttaatttctttcctaccagggaatgtgacccacaggaattcttaatgctatatggacagtgcttatccatatatgacacaagctgacttaactgtcagaggccatgctgaaagaacacttgttgagtctgttgcaatttttttctagtctgttggaatttttaatcagatagtgtcccatcagtcccttccaaatataaaaattttaactgtctttagaagaggagtaaattattgataactctccttagtacacatgattcaaacctgtgcatttgcattgaaactattttagaaagcagtggaaacatgttcttttttttcatctgaggcagaaagttaaagatgtcagtttgaaatagtta

SEQ ID NO: 105110 - DNA, 1041 bp, Homo sapiens
tagggcatttacgtggcaaaaaacacctggcaccattgtcctgggctggccatcttgcctctagatcagctggtagagcaacaagttatcaggctgcaggtgcaagagaagggggtggctcttccagttgtgttggaaaaaattaaaaggtaaacttttccatgtgaccaatctgcacaggttctgtgctcacataaatctctgcctagacaattatactaagctcttagtggatccccctttctccacccacccaagcatcattctagagtgagctgctagtgtcatgtctttgctcagagccctcctggggtctccctttatatctggaatcaaccccccagtccctatcatgcctgcaaggttctgtgtgatctggctctggttcccttcatctcccatcacttcccccttgttcactccacccgtgttgcactggctgtttctccagcacaccaagcctgctcccacctcagagtctgtatttattgcctgaaacacagttatttttaccgccaccatgctttaccctcttccttccagtctttgctcagagtcaccttacagacaggccttccctgacccagtgaagttagaactgctcctccaccgcagccttttcccagcctccaacactgtagcctgttttatttttctctaagccacttatggacacttactatgtttgtgtatatgtttataatttatttcccacccctagaatatcagttccacaagggcaggaatgcttatctgtttcacggattgttctattcccaacatctagaggagtctttggcagtgaatatcaacaagtattgaatagggaacctcataatttaataaaataaactatagaccaaaaattcaagtatctggtcctggtccttatatgaactagttatgagacaatggagagatcacttaaattttttttttttttttttttttttttttttttgagatggaggtctcacccaggctggagtgcagtggtgtgatcttggctcactgcaacctctgcctcttgggttcaagtga

SEQ ID NO: 105111 - DNA, 1048 bp, Homo sapiens
aacctgcatccccatgggaagcaactttatcagctagagtacaattcttatgtgctgttccttttgcctttactcttacagatgccactcacttgcaaagtcacttaggttactctttctcctacctccttcagtaaggttgtttcctacatttgtaatacaattagattcttttgtcacaggctgggttctttcctaggatcccctgacttcctaaatgattcttcttttcaaatttgcatatatccaggttcactctttgtgttggacagttctatgaattttgacaaatgcatgtcacatatccaccaatacagtatcatacagaatattttcaccatcctaaaaattcccaatgcttcacctgcttattcctcccttcctcccctaaaccactagcaacccctgatctttataatgtctttatagttttaccttttccatcttctgcattttaaattctttacacttgaatctcttgagcacccactgacaatggctggccagtcagaactcatagtcattattctattattctgctcctctggagggcacagaaagttggacttctctttggaataaagtagaagatagttatgaaagctaaaatgcattatcttaacaacacgtccatgtttcacagtctgcactattagtgccattatcctctaataaaaaagtgctttcattctagtcttcctgtaaagcctgatttggtggatagatttgcagtgcctgtgttgtacttcctgttttcctcagcccaggatagtgattgctatttactcagcaaacagttttggaggcacattctggaagccattcctcctgctctgtgaactgcctccctggacctttggtaatgatgtttattaactctggtgatatgattgggtgaaagagacaaatcagatcctcacttagaaatttgaattgatgagatagccggttgggatgagcacattcctggaattctagaaggtgtcatcttgggaactgaaaccactatgttcatttctggaaaaacagagattggaaccagagggag

SEQ ID NO: 105112 - DNA, 1022 bp, Homo sapiens
gacaattgaggcagatttgcattgggctaagaaaccaacctaaaactcctctttccccaacttccccttagtattgttagaagcttgatctgtaagtttaatcacagagtaaataataaataatgagttaattgatttgaccatttatttcctttggacttggctggtaattaaggaatttctctggcaccttaccaaacacctgctcccttttctctgaataatcaaatagtcttttattacaaagttaatttcgctactctggaatttacttatttggccctgcattaccatagaggtactctctaactccatcatggatggtgggggctccagccatgattctgaagttctccttaagtcaattccttcttgaatgtcttggtccagattgtacacactgtacagaaaacttgatttgggggccttttccaatttcttagctatgctttagtggaaaggaaaggcaaagaaatacttcttggaaaattaaaactgcttagcaacactcctggggtgcattgaatgcacacgatgaaatctggaaagtaaaacgtgaaactttataaagtcagcataaaaagcaccataaaaattggaggaaagttgttagttatatgacggaggatgactgcccgtttattgctcgagtgtggtcgtggagattcactctgaggctaaagtgctcttaggcagaaggtaggtggaactgcaggctgctgcttgcaatagggaacaataaacccagttacttgggaggtaagccttcagtctgggttgtaaaattatactccatgctcaaggcttttcagaggtgctcaaccaccttgtacagatgagttttttaacttcctggatggtttccagagagatggaaagatgaaaagactcataatgatgaatggcccttccctctttccctgcatgtatattgttctgctggacttctagaatggactctgtccattgtggatgttgctggtgccctgcacagatcccctttactgggtcagggcacccag

SEQ ID NO: 105113 - DNA, 1026 bp, Homo sapiens
tagcatccatggtgagaaagatgctttgtgttattgaaaagttgacataacaaatataaagactttttttgggaaaaaaatgggcccttgtcctcccatcctaatacaactgttactgatttttgtgcatttcttttgagtcttgtcctcctgcatatgtacctctgtgaagtcctgatgtgcgcaataccagttgatattattaaaaagcataacacaccatatatctgacagttgttactacattggatctagtgaggcctaaaacatacaaactagatttgtcagagaagatatttttaaggactaatttgtgaggtgtactgtcattttgtgcatttttaacttttttcaattgcaagagtaatacttcactcattatttacttcagccctaaatattagtagaaatcaggccagagctaaagtaaatcaggtaattggctattcaggggctgaaagatgtttagtggcaaagtcacgctttagctctaagttaacattgtggtcacaagggtattctggtggcccgagagttactgcacccctccttgcaaatggctacaaaggctaagacatagcacacgtttaatttttttcttccttcttagctggtgcacacacaataaaccaagaaacaaatgaccatacttcagtgtcactctatacaatgtgactttaaagatgcatttttaaaaacaggaatctggccgggtgcggtggctcacgcctgtaatcctagcactttgggaggctgaggtgggcagatcacgaggtcaggggtttaagatcagcctggccaacatggtgaaaccccccctctactaaaaatacaaaaattagtcaggcgtggtggcatgtgcctgtaatcccagctatttaggaggctgaggcaggagaattgcttgaaccccggagacggaggttgcagtgagccgagattgcaccactgcactccagccagggcgacagagcaagactcctcaaaaaacaaacaaaccaaaacaaacaaacaaaaacaaaccaa

SEQ ID NO: 105114 - DNA, 1029 bp, Homo sapiens
gagactccctatctgccagattcccagactgtgagctgcttcaagatcagggaagtttttcggtacgtaatttcttaagcactcagcaaagtgctaagatagtcttccctgcctcagggagtttggaaggacatttttccatggagtacatcagacctaagagggagagttttgtttttcttcactgataggcaactttcattttctgcatttgagagaacctgattttaagtagcacagtggccacgtcacaatccaggaataattttggcatttttcctgtatcctttttctgcaagtgtttttcacaataaaccaaaataacctagtcaaggggagagggaggctaacattttctttcatggagcattattctgaggcttgaaggtgctcaggtgaacttgcccaagttctgttttacaggtgaggaaactgcctcaaatagatgacatttaattcaaagttacacacggagtttgtcgctgagttagaacaagaaacagaatatgcttctcagtcagttttggaaaaactccagaaaggtgatgctaaaaatggtctttttgccttgtgttttgttatatagcaaagaatacccgctggcttctcattatctagctgatgccctgagactcatctgatgttctggcttatgtattagctgctttgagtgatggcgaaaacttcaaaatgtgcagagagctcttccttgaacccagtgatcctggggtattaacagattgtgtttgggatatcttatctctgagtctcatgctaatttcctctgatatatagcaaaaagactgggtttaacagtagttttcagtagacaaagttgcttttattttattttccaggttatgaatacagaactggcctttaggactgcttctgatctatcagtagatagtacactgtttatagtgctgcaaaaagagaaggtggacttgtaaattcaggaagggacctggctaaatttgattagactgcattaaaaatttgagacttttctctgtgagccgatatctc

SEQ ID NO: 105115 - DNA, 1246 bp, Homo sapiens
catttacagctccccttcccagcctctaaatcctatcttcctttcctattttatttctctccatataccttgctattatctgacatgctttatattttactttttttggtctctccacactagagtataagctccctgaggacagataattttgtttgtctttgttgctgctgttatctccagtgttgagaacagggtctggtatacagtaagggtagagtaagtattgtcaaatggataaaaaaatgaataaatgtcagagagggaaaccagggcttagttctatttgagccagtgttagctattattagtatcagaagtcttggttctgtacctgcttgtaaccttgtccttgtgttgctgtgtttatcatctgtcctgctctctgcaaacagtctttggttctggatcagggagtatgactcttcctgtgacgtgcccaccctgatttagggcccaccacaactcacccattgggggccattagtgaccaaatatccagggcttgcttttgactctatctggattaacaacatacgttgagtgtttagtgtttagcccccagcattttggtgccacttatcccaaattaaagcatcactggggtatatatgaatttttaaagccaccttgaaggaaaataagtgtttttttgagtatcccaataattttagagggaattggtgataccagggttgaaaatcactgctctgggttttgtattcttgtccgcgtgtacataggaaatatctgcatatcttcctgtgtagtctgccagagtgttttgaggccgtgtgctaaaatcctttagggacactaactagtttcattgatggtaataataaaagggatggttgcctaggttacaaaacactgtataatattgtttattcacttatggttcaaaatacgtattgagcacctgcttcgtattaactactccctgcagaatctgccctccccctcctttgaaagtgtgtgtatatttgaggagattcacaccaaaatggttttctttggttggtgggattatgggtgatttccattatcttctcttgtctgttttcccaaggtgaatgtgtgtctgttttgcagtttgaaaaagttgttgaggcaaagaaaagctgctcatgccttttcacgtcatctgtctaactgagttttgcgagtaaatttcaagtctaatctacattcagaaaagtacacaaatcatatacatacacagttcaatgaattttcttaaatg

SEQ ID NO: 105116 - DNA, 2164 bp, Homo sapiens
ttcccaggtcccaccctggacttctgaaggggtgtggcatctgtgtttctgatgcttactacaatatgtgaaccactactttagaaaatctgctttaacttggtattcctctaattgtgttccctaggaaatgactgtcccaagagccagtgattattccaggtgttccctggaaaggtcaagtgagtctgggaaacactatgtctgtacacctcttgaaggtgtcgaatgtatgtttatacatcagtggaacccatttttctagcctagcaagtcccaaacacattacactgaagagattttggtgaggaaacttgctggagttttcagggaacactgttctaggcttaggtgaccttaggatcactcaagtagacccttcactccctgcgagaaattaggatgaataactacctgtggcattgttggttctgaacttttacagttcaggcctgctgtgaatctttgatgaagctttaaggtgacactgttgtacaagatgtcagctttgctgaaacgcacattacctggaataagtgctttaattgtagaattagaatgggatttactgtactgttttaaatgagattggcttcagaatccattacagttaccttacatagcacttgatacgtgttaaatgaacatatgaatgtaatttatatattcctagaatttaagttactttgtgagatttgggcctgtccctcaatgccagtttaggatttctttttttctataccttgaaatgattataaaatagattttcatgggaattttaaaaactctatccaaaacatttttggagcattttaaagccccatacacagaagtatacgaaagcacacaaaacactccaagtttcagcagttttagcgccaccattaacccactttgcttgtctcatgaaaaatctttgttaaagtttgtacacaggtaacaaaaagttactttaaaagatatataaagggctgtaagctaattgtggtgtctagtaagtagcataatgagatgtgaggagttggaactttgcgtgttttgcgtattttcatctgcattcagcttcttactctgggtttgtactcgagtgttatttctttacaaatgcccttgtaattaccactctgaagtctgctgactgtgtctcttgaacatacttaggatattctgcacattatggaaaaaggtaaattttagaagtttctgctctactaactgtagatatttatgactctgcgagttatctatttttataaccacctgtggtccattgttcattttaattcacatttcttatgaagtatggtaacagggagggagacacctagattagcagctcaatttgtactacttcagccaatctgtgaatgtaaaaactacactgttgccttgctaggatccaccctcctataatatggaacaaatatctgaatgaaatccaccctaggagacggagtcaaactaaacttgtggtttttcatttaacttttgactacagcatggccccatggcatccacaccaagagggtgttgtgatgaggtgccggtgtgcaaagggaactttagtttttccactggttcttatctgctagccttttacatacatgtgtactatatttgtttatagactgtaggtggatatataatttaaaagcttgatttaataaacatttaaccccctaaacttgcaccgtggatcctgtttttctttttatcagcttaggtaatcattttatttgtcggctttttcttttttcctgaactgtgtttcattaccaatatcaaaaacagttttcaacagaagggcttcatctctaatcccaggccttaaatgcatctgtttttattgtttactgatatttttatacaattgcagtttaggatggagaccttctagtgaatttgaaatccccttctccccactccatgtatacctttaaaagctgggaaaatataaccagtgctgatctcgtaaaaatgtaagggagctctccctctacctctacctctacctctctacctctctacctctctacctctctacctctctacctctctacctctacctctacctctccgtctccctctctttccacggtctccctctgatgctgagccgaagctggactgtactgctgccatctcggctcactgcaacctccct

SEQ ID NO: 105117 - DNA, 1043 bp, Homo sapiens
tcacctgcatcagtgtcctgagtagctgggattacaggcgtgcgccaccacacctggctaattttttctttttttttctgactttttagcagatatggagtttcaccatgttggctaggctggtctcaaactcctgacctcaagtgatccacccacctcgacctccccaagtgctgagattacaggcgtgcaccaccacgcccagctaatttttgtatttttagtagagatgaggtttcaccatgttggccaggctggtttcgaactcctggcctcaagtgatccatccatctaggcctcccaaagagatgagattataggcgtgagccaccagacccagctgaatattttctcttttaaaaattttttgaaatgtcttcctactgtcactacccttattcaaagaacattttcatccctcaaaaacaacctcatccctattagtagtcactccccattcctcccttccctcaacctttggtaacaaccaagttactttctatctttatgaatttgcctattctggacatttcacataaatggaatcctatgtggcccttttggtctgacttaattcacttagcatcatgtttttaagggtcatccctgttgtagtatgtatcagtacttcattatttttaaattgtcaaatatttcaatgatgtatacattattttatttactcatcagttgatggagtttataataggtacttcgtgttcatgttttaatatctgaatcagggtgcagcttataatggatgccaaattcatatactgctaaaacaaacaaaaacctggcagctgggatttcaatctggattctgttgcgtctatagatcaatttggtgagtactgccatcataacaaaatgaagtcttataacctatgaacatgggatgttcatattgcctattacgaataatgctgctgtgaactttcatgtataagcttttttttttgacacacagtctcactttgttgcccaggctggggtgcggtagcgcgatcttggctcactgcaacctccgcctccccagttta

SEQ ID NO: 105118 - DNA, 1062 bp, Homo sapiens
caacctctgccttccaggttcagatgattctcttgcctcagcctcccaagtagctgggactacaggtgcgtaccatcatgcccactaatttttgtatttttagtagagacggggtttcaccgtgttggccaggctggtctcaaactcctgacctcaagtgatccacctaccttggcctcccaaagtgctaggatttcaggtgtgagccaccaggcacagtcagtctggtctttttgaggcagtgagttctctctgagcacccagagtcatttattggtttccccgataacccaagaatgaatctctcaacatgtcttgatgggattccacttcctggacctttgccactggctgcatttgcagtgctagttttctatttatctccctggccacactgaacattcttcaagggaaggagctatgtcgtctttcttgtatacactggccttgtgcatggcttccttagttgtcctggtgtccagtaaccttagtgaccctcattcagctgctagaagagttaaaaaaaaaaaaaaatggagtttttcacaaaggtgctgtaaacaggtataatccaggaaaactcaagtttacatggaaactaaattagaaaatgattgtccttccaaataggattgtatgcattctcttctgaatagtacttctctgaggcttttaaaataaattttgatttacagcaacttgataacatcttttagaaaaaaatcccttaaaatgttggggctcacctaggtttaaaaatgtggttgttgatgcatttttaaaagatattagaaaggcaatattgatggctgttaaatttaaaaataaaacatattcctacaactcaataattcatcatcctccaaggaggattttatttttaaggaattgccctactttgattgcctgaaggttttgattcttctcctcttggaatgaatttgaatttgagactcccaagcaaaattggatttttctcagttgcaaaataccagattcagcatatagggctttcagagggtaactggagagttccattcccatctgccaaattgtataaac

SEQ ID NO: 105119 - DNA, 1030 bp, Homo sapiens
acgtaaggtctgggcatcacactttatgtaagttaaacttcagtaaagtgctctcagcacacatccgcagccgcacccacacaaaatcccaggaggctcagtaccagctgtggtccgggccttgcccacctcggagaggccacgacccaaggcatccggtttcctctcgctccagtctaacttccgcgcatctacgagggccgggactgccgctacctttctggaaggcgccggccggccagtcaccggagggatcccgccagaggcggctccgcgtctccagcagcggggcagggacccgggcgccccgccctcgccagcgcccgcccccgcccgcccccggcccgccctctgtatctggcccctgggcagctgcccggggaggcggccagcgagctggggccgcgcaatgtcgcacggagccgggctcgtccgcaccacgtgcagcagcggcagcgcgctcggacccggggccggcgcggcccagcccagcgcgagccccttggaggggctgctggacctcagctacccccgcacccacgcggccctgctgaaagtggcgcaaatggtaagtgagcgcggggcgcgaggccgaggttctacagggcgtcccgggaaagcaggggtccgggagcggacgcgccgggcgtctggacccggccggagcccagggagcatcgcgcagcgggcggggcaccgcgtcgctaaagttcgcggcaggcttcctccgggaaagttgctgccgcagcccccgcgctggagctcagtccccagagccgccccggcccttgctcccgcggacccaggtcgccagggtcgcaagtttctccggccacccccctgcgaagcctgacccgcctactgactgaaaccacgggcaaagttccttttcgtctttcttcctcttctctgggccgcgccgcttcgaacccgagccgggggtggaagagtcgcccaggcggcggcgctgagggagcgaaacccgacctcttccccgtccacggcctcctctttcctccgaacccagcgc

SEQ ID NO: 105120 - DNA, 1008 bp, Homo sapiens
aggcacccaccacgatgcccagctaaattttgtattttttgatacagacggggttttgctatgttgcccagactggtcttgaacttagagattcaagggatctgtccacctcggcctccccaagtgctgggattacaggtgagccactgcgcctgcatgagactcttttttttaatagctatttttttttagccctattattgttctagtaattacatactatataccatgtgtgtataatctcattaaatgtttctaagaatccagtgaagtaacatgtttgatagataaggaaacgggctaaagagttaaagagacactaaagtcacacagctcttagcagtagtggtggaaccgatccaggcctaatggcctgatctccaaaactcataactctggcagagttgttgcttgttaatagttctagggatataaaagccacagtgagataacacttcacacccacggagatgacaacaatagaaaacaacaagtgatgaagatgtggaggatgtgaagaaattggaactctgatacagtgctgatgagaatgcaaaatggtacagccactttgggaaactgtgcagtttctcaaaagttaccatgtgacccagcaattctactcccagctctacccaagaaaatgaaaacagatgtccacatgaagacttacacattcatatgtgttcataacagcattattcataataaccagaaaatgaaaacaacacagttgcccatcaaatgatgaatgtataaacagcaactaaaactaagtgctacattcatacaattgaatattattcagtcataaaaagggagaatgaagtactgatgcgtgtaaccatatagataaccatgaaaacactaagctgtgaaaaaaagccaaccacaaaagaccacattatatgattccatttatatgaaatgtccagaataggcaaatgcgtagacacaaaaatagattagtggttgcctaggtcagggagcaggggttgaaaggaaatg

SEQ ID NO: 105121 - DNA, 1060 bp, Homo sapiens
tatcattttcaccatattgtaaagttagatttatacctaataaatatttccctttttgctgctattgtaaatagtcctctcctttgtgtttaatttttaacttcagttgttcattgctaagatattgaaatgcagttgatttttgtaaattggttttgtatctcatgacattactaaagttatttattagttctaaggaggtttttagtagattctttgggattttctacatagatcattatgttgtctaccaatgaagtagttttgtttcttccttttcaatccatatgcctctatttctttttcttaccttattgcaacttccagcagtataagaatgtgagaaaagacatcttttccttgttccctgtgttgggggaaagcatgcagtatctcatcaagtatcatgttagctgtgggttggtttttagatgccctttctcagtcaaggaagttccctcctatccttgcttgctgaaagttttgttttgttttgtttaatcatgactggatattgaattttgtcaaatgccgctttttctgtctcagttgatacgaatatatggcttttcttgttttgtctgttcataaggcatatacatttgaaacatttggaagtactgaactactcatgcattcctgtgataaaccttagctgtggtacatttgtatttcttatatatgttggatatgatatgctaatattttatggagggtttttgatagcctggagtttctctgtaagcttgttaatgactcaacccactttgcgtccttccttttgagatattcatgtattcatggtctagtgtgggttattctgaatcctggtctctctttcctctctgtgtggttggtgttcttttgggtttatctgtttctcctttttgcctacatgttagaaaaacttgaagttatgcagctcaattcaggaacaggatgtaggaagaagtatttgagtccagtagctagattcaaattgatttgcgtcacattattgaggtcctaccaagtgctgggtccctgttgtcaccttagaagaacagtttatttgtgttta

SEQ ID NO: 105122 - DNA, 1057 bp, Homo sapiens
gtcagttgatagctgtaaggtatgaattaccatctttgtaggtcaaaaaccatcaaatattggcaacttcgtacaattgggcctaatatgtaaaccccaggtcaccatcacgctgtcctctttgctctatggatatccagcagatgaaagggatggttctgctttgttattttcttgttttcctgcttcttctgagggggcttcccgctggcacaatctaacaaacttcagagaggacgaagtcagtctctgctgtcatcagtgttcacagacagtagtttcaaagtgtgtaccacatgaagttgcagtcttccaaccttccagccagtgtgtatggaaataacctgaattgtattaatagcagttcttcaatgtgggcctgctgggggatgcttggttgttttccgttgtttgttccctgggtgcccgtcttgggcaagcatttctctgatgtctctatttatgtggcaggtcaccctgctgattgccttcatctgtgtgcggagctccctgtggaccaactacagcgcctacagctactttgaagtggtcaccatttgcgacttgataatgatcctcgccttttacctggtccacctcttccgcttctaccgcgtgctcacctgtatcagctggcccctgtcggtaagagagtggtctggccctgtcctccgcatgcacaagtcaggatgttagctagagtactgagacctgacagagtttttcccgtctgcccatctcacctctttaaccattctttgctgcctctgccctgaatttcctattgtttggtggacatctctgcttgatgtcctgctggtttttaaaactcactttccagctacaagaaggctgtggctggccgggcgcggtggctcacgctggtaatcccagcactttgggaggctgaggcgggcggatcacgaggtcaggagttcgagaccacggtgaaaccccgtctctactaaaaaatacaaaaaatcagccgggcgtggtggcgggtgcctgtagtcccagctactcagagaggctgaggcaggagaatggcgtgaacccg

SEQ ID NO: 105123 - DNA, 1469 bp, Homo sapiens
agaagagggaatgacaggaaaaaaaaaaaaaaaggcaggaaggctcaggagtgagaaagccagctgccaccacacatccacaggcacttcacagaagtgccactgacctcattctagagtctgagtctgacgggaccctgggaatgaatacctctcaagtccacacttggggccattcacagagtgggctgacactcccatcagtcacacaagaccagcacattgttagcccagaactttctccgaagcagaagagaaaggcaaatatctctttaaggtactttgcttctccgagctggagctttgtttaaactctccagccgggaagttgcaagaagctcgtttgctttttagtagctttagccagaggttaaggcactgtccacagattgctctcaggagtagaggagtccttagtggctatctctgctcacaccagaagcttcctttctctctgtcctcttcccttcctgcctgcccggcatcacttctgtcttgcttggcctcttcctggtcagcccgcatgttggctgcctgcgagcggctctgctcatcccatttgcgtgttgcaagggagaagaggaagcgtcactctctccctttcttttcatgtcttctgatgcccagttgctcttcccggaccagaaatggacggccctacccacttatttgctttgtttctgcccccaggaacttctgcactatttaatcggtaccctgctcctcctcatcgcctccattgtggcagcttccaagagttacaaccagagcggactggtagccggagcggtgaggatgttttggggagcctttaggaatgaattcttatttaaaatgctcattttcttcctgatgggggaagagaagggcttggtttctggggcattcccttcatagaatcaatacctaccttgatccagccatcagctctctccaaagagccttaagcagaggcgtacagtcccagaaggtggattgtcagggctgccagcaaattcatagaccccagcagcccaggcctctctctcttacaggcactactgaaatcagggggccaggcgggttttaattcacacacccactctgatcatttgctcgttggctgcctcagcactatgcagagacagatgctggagcctcttttgggcccagtgggaaatgtactgtgatcaattagagatacatgccatgagcctgagctttgccattcctgatttttaacagtattcaggccaggaaataatactcctgtatctttcagaggcaaaaattgatccatctgatagccataaatagaagtagatggaaatatacaaaaatacagtcctgtgagatatatacatacatatatatgtatatacatacagatgtatatgctatttttttaaagattcatagattcctgtcatctgatttctgatttagctaactatttatagttcagtggcctgtgggccaacactgatttg

SEQ ID NO: 105124 - DNA, 1005 bp, Homo sapiens
cagaaggtcactgtagagggtggccaaacctcccaacactgatgctccacatggccctcccacagcccaccatcacacctctctgccccctctctctgctgtctctgaagagagggatggttgccccctgaagcttaacacctgcccagctacagtgcagggtactggaagaggcacacaggagacctgtgcccactgtgtttccgggcccacttgaggagattcccactgtgtttagtaattcaggttgcacataactgtttagccctggaatctctatagctaacattcatcatatgctgtctgtgtgcctaggaccaaacctgggctatgaggaagttagaagaaatttttaaaatatggtccctgcttataagaaagtggtcatctagcttaggagacaagacacatgaaacaattagtaaacaaggcgttgtagtctagaatagcattctgtagcgatataataaactgttcaattatgcagtgcagacagttggggaccgggatggtatataacgtgctaattgtgcagaacagacaatgagaggccgggacaggctctaataggctaattatgtgctgtagacaattggtacaaaaggagcccaggaaaagaaacccggggaagaagtggatgtgggctggtgggggcagctgtttatgtaaagcagcatctgggcttgaaaagaaaaccaaaccttgttgaaaatcctacccttagctgcccctgcgccattctcactggacaccagtggcggtgtagtgaagtggaggcctttgtgtgggtctgagaacacctaggcacccggtactgcagagtgcggactctggagccaggctccctgggctcccatcccatatctggcccttgctggctctgtggccttcggcaaaacagatgaccgcctgtacctctgtttctttagctgtgaaatggaggagcagggtgggtaatcctagcacccacccagcagagttgtgagggttaaaggaatcaataca

SEQ ID NO: 105125 - DNA, 1078 bp, Homo sapiens
gaattattaaaatatcccagtaaagctgtttaagaaaaaaaagaatgatttttaaacgtagagaatataggggaaaagagaagttaataggtggtgtctaacaggataaatctataaatattggtataaattggttttttgaattatggaagaatcaccaaaagaaatggctaaaaggcttgggaggttgctgctgaggagtaagactgaggtcgggggagtgcggatgggagtcacctctgcactaccgaagttttttccttgtttggaaatgtatttttaaaaaatggaataatctcagtgcaagtcggcactgggtggaggacacaggtgcccccctgagcagaacttggagtcaaacctgtggagtgtggcttgtgggtgggccacatccctggcaagctgtcctgactgccatttccttcccaagatgcagccgtctgatgaggccacaacccctaggcccctcaggagctttgcagagaggaggacgtgtactccaggcgaggcctctggacctgtgttcctgtgccaaagtcctgtcaggctggtgggcaccaggaaaggcctgcaccctcttcctgctctcccaggaagccagctccctgagctcctgagccagccggaaactcttcctccagccttccggggagaacatccctcccattctgggaaaggaaagcagcctccagggaaatgttttctgccttcctgcttctagaaccacctcaggtactgatgaaccccacttagcacagctgaaggggtttgtgaatactcccgcctaaatcccttctacttcactcctcaggggagtgaagtgccttaagaaacaaagccctgtcctaatttatctagcttgtcagtccggtcttagagataccctctttcctgaagtgaggcgtgcctgtagaaacactatgtggtcagcctgtccccaaggagatcttgtgtctcctctccatctctgcctttgttaccagtgtgcatgtgtttgtgtgttttttaataaaatattgactcggccagttgcacaaggatttcttattgaaccagatgaaggctgtaaaacctggcc

SEQ ID NO: 105126 - DNA, 3671 bp, Homo sapiens
aagcagacgcatggtcttctgtctcttgatagaattctcagaacgtatgatcgtattttagaagagaacagttgaggaagtgatttaaggaagaggaagtaggtagtggcgtcatgtcactgtgtcattgcagtgtgacaactggaacattatttaagtaatttaacctaatagtatcttcaaaatggaatttctgttttgatattaataacttttttcattttcacctaggctgagttgcctagtcacgtattttccttatcgcatctgtgggtcaatctaaccatgcaaatatttttgttttgtatcattttataggatttaatgtttatctgttaaccctactttcatatattagccctccacatataaacatgcacacataaggcagaacattaatattttgtgagactttgactaatagccattattctggaagtttttcttttataacttctttccattttttgatgacttaaaaaaattttttttaccattaaagagtagtcgtgtataagataaaattcatgaacatcttgtttatatgaaacattctccaagccaagtaggaaatgtaagattatattccaaaattctcatataacctttcctcctttttttcctcaggtgtttggatttatagcaagttttatgttcctacttgactttatcactatgctgtatgaaaaacgacaggagtcccagctgagaaaacctgaaaataccactagggctgaagccctcactgagccacttaatgcctaaagactctggggagcagatgttacctaaggtagtgaccctgcattgtggtgcctgagccctggcagaagctcttgtaaaatttgttaattgtttaaaccacttcttttggagagcaaggggaaggtcaagaaggcagttttatcaatattgtgtcagtcaccacaaagtaggccagataagttaaaaaaaatttttttttaaataataattgaaacttatctcaaatggagattttggtgggaggaggagaaaacaattgtttttaaatcacacagctcaacggttgataaatgattctgtcattctgttacaggtcattcttttactaggcttagcttccaaattatgctttatagctgtataaacatcgtgattatattcatctacttagaaattgttttatttttaaattaatttgcttagctgtttgttttgatgcttagattatgttctgttaatgggaatttaacatatttaagaaaccaatatttaaaatgttggtctaggtttttttccttaacatatattaccaggctttactgtatttcactcagccttaaatgttataatatttttggataacggttattaattctttgagaccttcgtatagcctataaaatgtatgggagatgttggtattttatgtgtataaaagcaacaatatcagcaacttcgtgtttatactgcaccttggttgttgatgtcaagtaaaaaaaagattgttttgtaacacataaaaaaatggaagaaactgataccacacctaaggaccaaagataagaaagactttttgcccaagacagtgaaagtaattataaaaacaagctttgaccacttaccaagtatctgaagagatgagttcatactatgatttagaaagtggttcaattcccctgttggcatatgattatttttactaaaattaatacagctctgtgggtcttccttagtgttttctttgaagccaatctgttttttttaggacaccagcctttggtttttcatctgttcgagatgcctcttctctgtctccttatcagatagaaatggagtcatgtgctgctgcttcatctagcagaggttggcctctggctctgacactttttgtcagttgtctttaggtggtcctgaatcttgggcccttttgattgtgaatactgtgtagcaggatcttgagagtccttgttcttacataggcattgctctagtttgtctttggcaaaaaaaaaaaaaaaaaaaagtaaatatccagggaaccctgcccagactaatactgttggtggcataagagaatcaagccattctcaagagataacttcataaccagaattgtctgttggctagcagctgtcacagataggcagggcacttgggatatgacctttctgtccaggtgattcacagactagacctttcttatcctcctcctagagttttgacttgggactctagtgttaagatgatgagcccgtgcatcaggtccttctgcactttggtggaagtctcccagggtaggtttcctatttgaaacagtggaatcatgtttccagtgataaagtttaatgacctcatccttttttttttttctcatctgccatttgtgtgtcttagatgggttttaattgcatgaatgtggctaatgtggttctcagaaattggtcagtatggcccaacatagcttctgctctgtcttactgactcaatacctttaggatttgtatcagagtttggatactagtgttagtggtggtgtcaccactacttaattgggagataatgaaaccaatcatggatgctgtttttattgggcatgtcatctaagagaggagaaatagctgggttttgggtctaattatgaataaggactgattcagaaaacgagtttatggtaggtagactaaagtttcacatcagactgtaccattgtgatttagacctatctaaaattcagagcatatcatctgggctacctcagggtcaccacccatgtattgggcttagtcaggattgacagatacattctcagctggcctgtcatataaaacatactgtcattgagcttaagctccgcttgttctgaggtttcacctccatgtgtttcattggtgcaaaagtggatctcttagttggtcacttaattctttctttttcagaaagatagtatgttcactggtatatttggtcactcttagaaccttccttcacattgttttttatgggacccatgaatggttagcctttcttttctattgtagaaggaaataaataggagtaaaaagaccattgtagtaaataagttcaaggggaacttgggaccagaaaccactgttatgtacaaaaaaatggcaaattcaataaactcaaatttaaaataatttttaaattaacagttatgataaattttatattttatacaaatagattgcttagaatggttctcaagaattataagagaaatgaactcacagtacaaaaattttataattactatacttgtgttttgtttgggggctgggaaatgtatttttacattgtagccaatcattttatatttgtcaatttaaatcttatgggtcttttttttttatctctcttgatgtcagattttatagtctttttaaataaatccatttaattaaaacgttcttacctttgtaagtgtttattacagaagtgtgatgtttaaatgaaaagctgtctctgtagttgtgggagttggctgcacaatcttgttgagtgcctatatagaatactagattttagatatatctaggatagaaaagaaacaaatccatttcccatccataaactgtccctcttgttggaaagttagaatacacatttaaacaacatttttagggaaccacagaggaagacttacaaatggctttaaatacttccaa

SEQ ID NO: 105127 - DNA, 1091 bp, Homo sapiens
ttggaggtcggggtgtgtgttgtctgtatgttgggtcagagggcaggtgccatgctccctcatttctggcctttctatatactgcttctctgctgggaatttctttccttaatctttcatcccccaaactgactctgttcttcaggtctcagctttctccttcaggaagcctttcctgaccccgcagttgagcgtctctcctgtgtgcttttataacaatattatatatttcccctttgctggcattagtacacgataggttaattaattctttatttacctgtatttccttcaaggcggccaaactgtaagttctgtgtagataaggtttattcattaatcttgtttgccatagtctcctcattgtaaatatttgagtaaacgtattattcagaaacagctttctaaatactgtagattctctgaaaaaacacttaagtaaaatgttttgcttcatttgtagttgctgtctctgctggccttcatctgtgaagaagttgtatcacaatgtactttatgtggaggactttatttttttgagtttgtaagctgcagtgcctttcttctgagtctccttatactgattgtgtattgcactccattttatgagagagttgataccacaaaagtaaaatcatcggtaagcatgagaaaatatcatccctgtattaatagctgttttgtaatctggcataattttattgttcaaagcagtaatgttttcaaaactcagcaacatgaaaagacagtatcccttgttccaactcgctctgcttctaagcacctcattttttcctaccaaggggatggtagagagggaaagtgagattagaatgagagtgacagacactgccaatagtttacagttattggtggtttaatgtaattcacattagacttaaaaaagcctaggattttgtcacttctgatttctcacttttgagtgtcactcattggttctacaattattaattgtgtgcctttattatatgccaggcatttatatgctagacattggagatagagtaatgaactaatgtgaaatatttctggagctttaaaataaaacaacatttaaagcttaaagcttc

SEQ ID NO: 105128 - DNA, 1158 bp, Homo sapiens
ctcctcctccatcttctttttttttttaataaatttatcaagccaccagaaatgctgaatccattattttcgtatcatattttcacgtcacttatcactatctgaaattgctatccatctgttttcttgtttattgtctgtctctgttactagggatcctgtgattttgggtagtacttggctgtcacccaagtacctagaacggggttcactgcacaccgaaagtacgcaaaaatactaagtgaatgaatgtcaggaggatgaaagatggagggaggtgagaaatccatcaaaggctcacagaaagaactcaattcttggatgaaagtcggaagaatcccaacagctaacaagcaaatttgctgagagggggcggggcgggccaagggcgggggcgggaaggggcggagtcaggcggaagccggggagaaggcccaggaagtgacggccgcctcccggctaccggggacttctggagtccgagaagtcaacggcgcggttgctgcggccgccgcgctccccggcccgaggcgatggagaacggagcggtgtacagccccactacggaggaggacccgggccccgccagaggcccccggagcggcctcgctgcctactttttcatgggccggctcccattgctccggcgcgttctcaagggcttgcagctggtgagtccgcggtcagggagggcgagcccgggctggggagcggggtctggcccgggcttgggaggccgccgagctccttcgtttcagcttggttgttcagtaaaaggaggtttccacacctctagttccttccctctcagcctggggaagggggcgttaccctccgcccttccgccgggcggcccctcagtcccaaggctctccccatcgggatcccacgaactggggccacccagcctgttaggcgggctcaggaaatgcgtcggagacccaagtcagccacttcaacatctttcactcatcctctatggcgactttcctctcttctctctgctgctaccctgcattatcgcccacagtgcctgtatttagactgtgaagcgctgtttatctttctctggctcttgcggttttcctgctgcgagcccatgggggcagtttaacttgctggacaaagtcctgcgataccacgcgtggcattgagatg

SEQ ID NO: 105129 - DNA, 1425 bp, Homo sapiens
agtgttgtttgtataacttagtgtgctaaataaagttaatgaaagtgttaggactttttaaatgaagagatattggtgaaaacgatactttcacttatatctaaatcttgttttttttctttttcttcaatgtaggccagaagcctgtcttagatgttcatgcagaactagacagaattacacgaaaaccagttacagtttctcccacaacacctacatctcctacggaaggagaagcttcttgaagataccaaataaagccatttattctgttttctgggataatgtaaacatgcctctgccttttccttcaaaagtggaattagaaagctggagtgcttcttcagatggactaaatttatgtcgtgtgtgtgtgtgtgtgtgtgtgtggttacccattttttagaaggagccgtacagaagaaaaattattctacattatgtaggattgctgtttgcattgccattttgcataagaaagtaatttttgattttgaaaatctcaaaacttttagatctgaaatacagccatgtgatcgatcatattctaaaggctatttaaaacatgtaaaaggatttggggaacggcagaaaacatgcagtttgggcatttgactgacttggaagtctaagcttattttagttataactattaaaatcatttttaaaaatttgttagttttgctgacagagaaaaatcgtcagttgtcagattttgcacaccacaataaatgtaccaccacacacggaatatgctaagaaaactatcagatagcgtttgatacactagtcattgtctcaatcactgatcctgtaagttgtcatcaaaatatgatttagaaatattggccaaggtgttgctttaactgaggagaaaagaaagcacactgcctaaatgtgtaaaagaaaaatgcagaggttattaaaatgtaaagaagtaacaatctttggatttgtctatacatatatatatatatatatggctttgccttaatatacccccttttttgtttgtgactttcaactgtaatcagttaataaagtatttattctctgcattcaggttcaaataacttgttgcattctcttatgtttaaatttacatgtgtcagctaataaatgagattcattagtacagtcatcccttggtatccatgagggattggttccaggacctgcctcaggtaccaaaatctacagatgcccaagtcccagatataaaatggtgtagtatttgcatataacattcacatcctcctgtttactttaaatcatctctagatgataatacctaattcactgtaaatgctatgtatatacttatactgtattgttcagaggaaaataacaaaaaaagtgcctgtttagatgcaacttttttttcaaatattttccttctgtgattggttcaatccatggatatgg

SEQ ID NO: 105130 - DNA, 1084 bp, Homo sapiens
tataaagcatccatcttctgtttgtgggttattattagtaataagaaaaggtcaaatgaaaaatcagttggtgtggtatttggtttggatgtctattaaaagaaatgcatgcataaaaataaaatagcaaaaatatttcacattcttttattgagcatcacctcaggccctgtttaggttctaagtgctaaatgggaaggagagtgatacctatagtaaaccaatacatagacatctgtcaagtagtgataagtgctacagaaataaagcaggatgtagggagagtgagcaaggggactgggctgtgagggatgctgtatatgaatgatgggggaaggtctttgataaaggggggagaatgctgaaggcagggggaactaaaagtgtacatgccctgaggcagaaatgtatgaggaagacagaggcaggaaagagctgtggggaaggttaagctagttgatgagaggcagaagtaagttactgtgggtctttatcattaggctacagtaaggactttaggtttcattctgagttagatggaaagagattgagaggttgagcagaggagtgatgtaatctgacttaaccttttagaagaatcactggctcctgggaagaaaatagactgggtatgtgttatacagcaagaatagaagcaggagacttctgcaattccttttcctaattattcagctcatagaagagccattatatttttatttcagagaaacaagggagaagttgcatttcacttaactaggatattactggcccttttaaaacaccctaactgctgtttagcaaattttataagcatgattaatatgcttgtgactctagggttgtgctgttcaatacggtagccacttgcctcatatgccttttaaatgtaaaattagataaaattaaaaatcatttccttagtcacactagccacatttcaagtgctcagtagccactggtggctagtgactgccatattgaacagcacagatatagaatatttccaaaactgtagctagttactggacacctctgctgaaggccttgggtagggcagctcacgcatgtgaatataaatata

SEQ ID NO: 105131 - DNA, 1892 bp, Homo sapiens
gcatcttttttatcttttttttttcttcagacagagtcttgctttgttacccagcctggagtacagtggcacaatcttggctcactgcaacctccgcctcccaggtccaagagattcttctgcctcagcctcctgagcagctgggattacaggcatgcaccaccacgcctgactaatttttctacttttagtagagacggggtttcaccatgttggccaggctggtctcaaactcctgacctcaagtgatctgcctgcctcggcctcccaaagtgctgggattacaggtgtgagccaccatgcccagccaagtctgcatgtttaatactgtagctgctccattatatttcatcaaattgcctttttggttgaagctagttccagttgggtttttcacttggtactagaaagcatccttaaataatcggtgttataatttataagatttatcctttttttacatatctaggtgaagatggagctggaaaaacaagcttaataagaaaaattcagggaatagaggagtataagaaaggaagaggattggaatatttgtacttaaatgtgcatgatgaagacagggatggtgagtgtcatttgtaacataaatttctgaagtctattttgaggtgcactgccattcacattagtctttgattttttttagtgtgtaattttttactagaagttctgtgatgtcatgctggtcaagaaatagctatgtttagccatacttttattaatttgggattgggattcatatatgatacttttaagcatcttaaggtatcctggtgtgcagatacttctttcctaccatacttgaagaatctcagtttttcagttcatcttccctcagatagtgattgttttgttgactcccatttcactttctaattttctgataaaaatattatctactcagcttttttatctatcagctattttttcttctgtagatcacttgccttctcatttttgtatatgatatcttgagtatgcatatctctatctgctgatggtaaaaacataaacaagttatgcatcctctggttttggattaagaaatatgaagtagaggatgctacagttaagtcattttaggcctttagataaattagcagatggcctaaacagttgaactttactggcagttaagtcattttcggcctttaaataaattggtagatggcctaaattgttgaactttgtcaaagccaatagcacatctcctgtggagatgcactaaaataccaagtggtactgttagttggatgatgaaatgacttaatcttgttgccttggttactttgttttgtctgttgtagatcaaacaagatgtaatgtttggatcttagatggagacctatatcacaaaggcctccttaaattttcactggatgccgtatctctgaaggatactctagttatgctggttgttgacatgtcaaagccttggactgctttggattctttacagaaatgggcaagtgttgttagagaacatgttgacaaactgaaaatccctcctgaagaaatgaaacaaatggaacaaaagtgtaagtaatctagaaacagtaatgtaggtttcaaatacaaaatgtcttggctgactttaatcattaggaatttttgactataaaaaaggtttaatgaagtaagcatattgtaagtactttttttttttttttggagacaagagtcttgttctgtcacccaggctggagtgcagtggcgcaatcttggctcactgcaacctctgcctcctgggttcaagtagctggtattacgggcacctgccaccatgccctgctaatttttgtatttttagtagagacggggtttcaccatattggccaggctggtctcgcactcctgacctcatgatccac

SEQ ID NO: 105132 - DNA, 1022 bp, Homo sapiens
tggcacgcacttgcggccccagctattcaaggaggctgaggtgggagaatcgcttgaacccgagaggcggagaataccgtgagcagagactgcgccactgcattccagcctgggccacagagagagactctgtctaaaaaacaaaacaaaacaaaataaaaacaaacaagcacacacaaaaacagataaactgataaaatggtaactttctttttctgaacacaataggtggccgggcagcgcactcaggggcagctggaagcagtggaggggcgacctggtggggaggcataggtcccacagccccaagccccgacaagagtgcctggggctcgtccctcgaggctgcctcgggcgccagcgaaggccttggcgaaggctgaccccaacgagacacgggcgggacagagaacagtcattctggcctgagccggggaactgtgtgtggagaccattgcaaaagatgcctactgctgtgctcaacagggaaacaggaaaaccctccagaggagagatttggataatgcgatagaagctgtggatgaatctgcttttttggaaggtacttcgggtcgattgctcagcagtgcaggttcccggccttcatctgcatccttcagctcgcccctctccgcaggcttcagcgttgagaagaacagtcttggcacttgcatacatactcttcctgttctaccctcgctcacaccggtataagcctccatctcaaccgttggcttttccctacaagatcttccacaacgtgtgtccgtcttccagtcaggcctggatgcagccgctgctgcttggagcagagatgaagaaagtgttctgcttaagtggcttactgcacgatgaggaccagaataaaggtctttgatcagaaaaggaagggaaggaagggaggggaggggaggggaggtgcggggaggagaggagaggggaggggaggggacgggaggggagggcaagttaaatggtaacatatgaacacaaagaaggaaacaagagacactgaggtctac

SEQ ID NO: 105133 - DNA, 1034 bp, Homo sapiens
cagggtcttgttatgttgcccgggctggtctcaaacttctggcctcaagtgatcctcctgtctcagcctcccagagtgttgggattacaggtgtgagccatcaccccatcctgacttccattttaacataatttttctggctgctatgttgagaacagattttcagaggcaagtataaaagtagtgagacaagaaaggaggctaattaaataattcacgtgggaggtaacaggagtttggatccagatgatagcagaagtgataagaaatggttatacctggatatattctgaatgtagggccaggagaatttgctgacagactaagatgggtgagcgggaggtataagagaaaaagaagagtcatggaagatgccaacccaagaaccaagatgtaaaagagggcagacggagtaagtctgaggtagaatattaggagctcagtttgaacttgttaagattgggatgcccttttttttttctcgcgtcctggccatcttagcggctgctcttggtggagggccatctcgcacctaaggcaggaacatggtggccgcaaagaagatgaaaaagtcactggagtcgatcaactctaggctccaactcattatgaaaagtggaaagtacgtgctggggtacaagcagactctgaagccaaggcaaagctaaattggtcattcttgctaacaactgctcagctttgaggaaatccgaaatagagtactatgcaatgttggccaaaactggtgtccatcactacagtggcaataatattgaactgggcacagcatgtggaaaatactacagagtgtgcacactggctatcattgatccaggtgactctgacatcgttagaagcacgccagaacaaactggtgaaaagtaaacgatgcaaaattttcctttaataaaatttgcctgagcttgtttaaaaaaaaaaaaaagattgagatgccccatttgtcttaaataaagatattcagtagaccattaagttcacagttctggaattcagggaagaggatgtctgtacta

SEQ ID NO: 105134 - DNA, 1041 bp, Homo sapiens
tgaaaccctgtttctatgaaaaaattagccaggcatggtgacacatgtttgtggtcccagctactcaggaggctaaggtgaaaggatctcttgagcctagtaggcagaggttgcagtaagccaagattgcaacactgcactccagcctgggtaacacagtgagataccatctcagaaacaaaaaaagttttggattttggaggattacaaatttcagatttcaacatttcaggttaggaatgcacaacctctattggaattcaggtttctttccgcctaaagtaatattcctcattacatgtgctagtgtttagtagatattttcctaaggaagatttaatcactggaatttctgaaatgagaggccttgcagtgcctagtaaaatgacattgttggcattgcaagttgctttcattcgtggctctaggtgataggcattcatttgagtaaagacttatgctttgctatttaaagctttgtatacttttttggagggtggtctgaaatgtgtgctttactttaggttgtgactattcttttctgtgttttttttctcccagaagaaaaatttgcccaagcagtgtgttttttgcttgtagacctgtatatattaacctaccaagctgagaaagctttgcatcttcttgctgtcctagaaaaaatgatttcacagggtaacaataacaaaaatggaaagaatgaggtgagtctttagaggtgatcagactaaaatctaaaatgtgattaattctctctacttgttggtttactggattaaaaagaaagcaattaaaatatgattaatgtttgtggttatgaactattaacagcttaaagatacaattttcatattataagctttaccattttaaagtgtagagtttagtggttttgagtgtactcacatttgtacaaccattactactatctaatttcaaaatatttttatcaccccaaaaagaaaccctgtaccatttgcagtcactccccatttccccctttcctcagccccaagcagccgttaatctaattactgtctc

SEQ ID NO: 105135 - DNA, 1006 bp, Homo sapiens
ctgagcctaagagggaaaggcccagttagccagccacccattatcaaacttttttttttttttttttttttaatgataaaagacataattcctagccaggcgcggtggctcacgcctgtaatcccagcactttgggaggctgaggcgggcggatcacgaggtcaggagatcgagaccatcctggttaacacagtgaaaccccatctctactaaaaatacaaaaaatgagccgggcgtggtggcgggcgcctgtagtcccagctactcgggaggctgaggcaggagaatggtgtgaacccgggaggcggatcttgctgtgagccgagaccgcgccactgcactccagcctgggcgacagaacaagactcattctcaaaaaaaaaaaaaaaaaaaaagacataattcctgccttaaaggagaccacagtcatagaggaaagacaattgaaaattaatagtcatcctaaatcggcgaaaacttcaggaggaatagctaccactaagaataagcactgaaagcccttgtttctttagtgaccagaactttggggtgggtgggaggcagagcaaaggataaactaggatttagaaggaaagcctgttgctaaattaagtgaataaataggccaggcgtgatggctcatgcctgtaattgcagcactttggaaggctgagacaggcagatcacctgaggtcaggagtttgagaccaaccttgccaacatggggaagccccatctctactaaaaataaaaaaattaggtcgggcatggtggctcacgcctgtaatccccacactttgggaggctgaggcaggcggatcccaaagtcaggagttcaagaccagcctgaccaacatggtgaaaccccatctctactaaaaatacaaaaattagccaggtgtggtggcatgcgcctgtaatcccagccactgaggaggctgaggcaggagaattgcttgaacccgggaggcggaggttgcagtgagccgagatcgcgccactgcac

SEQ ID NO: 105136 - DNA, 1026 bp, Homo sapiens
ttcctgacatttatcctttaatattcattatcatatggatccttgatctgaaatgcctaaaatcaaacaattatttagcttttaaaaataataacctatttaggccaggggcggtggctcacgcctgtaatcccagcacttagggaggccgaggtgggcagatcacgaggtcaggagatcgagaccatcctggctagcacagtgaaaccctgtctctactaaaaatacaaaaaaaattagccgagcatggtggcaggcgcctgtagccccagctacttgggagacagaagcaggataatggcgtgtacccaggaggcggagcttgccgtgagccgagatcatgccactgcactccagcctgggtgacagagcgagactctgtccataataataataataataataataataataataataacctatttaattgatggcaaatgtattataaatcaaggtagaccgaaacattgaataggttttattgtcatgaacacatgacaataaaatggttaaccaagatgaatttttttttttttttttttttttttcctgagacgaagtctcaccctgttgcccaagctggagtgcagtggcgtgatcttggctcactgcatcctccacgtcccaggttcaagcaattttcctgcctcagcctcccgagtagctgggactacaggcacatgccaccatgcccggctaatttttgtatttttagtagagatggggtttcactattttggccagtctggttttgaactcctgacttcgtgatctgcccgccttggcctcccaaagtgctgggattacaggcgtgagccactgtgcccagctgaaaattttaaaaagtggaaactttatatagactctaaaaatgttggctaggaaagatggctcatgcctgtaatcccaacatttaggggaggccaaggtggatcacttgagtccaggagttcaagaccagcctgggcaacatagtgagacccccccatctctacaaaaataaaaataaaaaataaaagagaa

SEQ ID NO: 105137 - DNA, 1160 bp, Homo sapiens
tgactttatattttatttgctgcccaggataagactgggttctttgggatgccagatttgataaagataaaacttctttagctttttgtgttgtacttctatttctgttggatttggactatgtttgtcaataagattctttttgcacagaactgttattagcaaaatgtttacagaagataaaattaaaaactaattgaacaactaaacttcaactttaacagttgaaagttggctgagtgtggtggctcatgcctgtaatcccagcactttgggaggccgaggtgggcggatcacctgaggtcgggagttggagaccagcctgaccaacatggagaaaccccttctctactaaaaatacaaaaattgagaagtttcccccttgggcagtggcggaggtggtaactacgacagtagcagctccggcggcagcagcagtgactacgaggatggcggaagctgcagcaggacctgcaacttcccagaggtttttccagagcttcttggatactctaatcgacgaggacccccaggcggcattagaggagctgactaaggctttggaacagaaaccaaatgatgcataatattagtgtcaaagagcttattgtcacattcttgtaattactgtgttgctgttgctgatgcaaagaagtctctcgaattcaatccaaataattccaccactatgttgagaaaaggaacatgtgaatactatgaaaaaaactatgctgctgccctagaaatttttacagaaggacaaaaattagatagtgcagatgctaatttcagtgtctggattaaaagatgtcaagaagctcagaatggcccagaatctgatgtgtggactcatcagtcaaaaatcaggtatgactggtatcaaacagaatcgcaagtagtcattacacttacgatcaagaatgttcaaagaatgatgtaaatgtggaattttcagaaaaggaattgtctgctttggttaaacttccttctggagaggattacaatttgaaactggaacttcatcctataataccagaacagagcacatttaaagtagtttcaaccaagattgaaattaaactgaaaaagccagaggctgtgagatgggaaaagctagaggagcaaggagatgtgcctacaccaaaacaattcatagcagg

SEQ ID NO: 105138 - DNA, 1028 bp, Homo sapiens
tactcgggaggctgagacaggagaatcacttgcaaccgggaagtggaggttgtggtgagcagagatcatgccattgcactctagcctgggtgacaagagcgaaactccatatcaaaaaaaaaagaaagaaaagaaattacattattagattttttatttttattttcttttttctttttctttttcttttttttttttttttgagacagagtttcgctcttgttgcccaggctggagtgcaatggcatgatctcagctcactgcaacctttgcctcccaggttcaagcaattctcctgcctcagcctcccaagtagcttggatcacaggcatgtgccaccacgcctgtgtaactttttgtatcattattggattttttaagccaatttttcaaatgtttgctgtgaggctactttgtaaatttattttcctttgacaaatggtgactgactggatttatcctcattttagccttttttaataagggttaaactatttcagatatttggtttagatttctttaactcacaggatctatggcttgacaaattttaatgcctagtcttgcatagcttgttgtaacttggtgcttgaagaaaatgtttactcctttcttttcctttccttttttttttttttcttctttttttatcttcttttccaaggatgggcattctggggacctagagctagttccttcagcatgtgaaggggagagtggggttttgtcagatcctccacaggggggaaaagctagtgtctcttcccttgaggtatagttcttccagtctgatgaactgtcagatccactgagtgattggtaaagcagattggacagtgactcgaggaagtgggggtggggacaatattttaagtagtaactatcaaaagtaaagtgattctctgggggctcagtagagccatgtgtgcttctagcgttagcagtctgcaggaattgtgcagagtgcggtgttttctaagaggaaaaggaggatgagtgtgagagtgatgagaggtgagttgggatgg

SEQ ID NO: 105139 - DNA, 1065 bp, Homo sapiens
ctcctgagtagctgagactacaggtgtatgccaccacgcccagctaatttttgtattttttttgtagagacagggttttgccatgttgcccacgctgttctcaaactcctggactcagcagtccacccacctaggcttcttgaagtgttgagattaaaggcatgagccactacacccaggcagttgattcgttttacctaaataaatttagatttcaatttaaggacatgaaatatgagacctatatccaatgtataataacataatatacccagcattattttacattgggtatttttgtgacgttgtacttttcagtttggaatctgttttttcattttaggtttttgggacatttatatgctgcagaagccctcatctctctcgacagaatatctgatgccattactcacttgaacccggagaatgtcactgatgtctccttagggatctcttcaaatgagcaggaccaaggttaatgaggacatctttgatcagaactggtcactgtttccatttccctcctgtcataattcaggatgtgtggaaatttaggcatggtggtaatgagaagaaagttttaggttggctttccacatttttgtctgtacttactttgtagcagttgtttgctaagtagacctgagagttaatgatcacatcatctaaattctcacttttgaaaggctggtactgttagaatggttaattttggttctgatactatttatttgttttcctttggagtgattctaaaatccataggggagtaaaaatattgcattcaagagtcagttttagtccaggcgtggtggctcacgcctgtaatcccagcactttgggaggctgtagcaggagggtcacttgagcccaagagttcaagaccagcctgggcaacctggtgagaccctgtctctattttaaaaataaggaaagaaaaaaaagtttgttttaagtcattgctaaatttctaaataattgtcgggtgcggtggctcacacctgtaatcccaacactttgggaggccgaggcaggtggatcacctgaggtcaggagttcaagacc

SEQ ID NO: 105140 - DNA, 1235 bp, Homo sapiens
aacatggtgaaaccctgtctctactaaaaatacaaaattagccaggcatggtggtatgcccctgtaatcccagctactcaggaggctgaggccagagaatcacttgaactcaagaggcggaggttgcagtgagtcgtgccattgcactccagcctgggcggcaacaagagcaaaactccatctccaaaaaaaaaaccagcctgaccaacatggtgaaaccccgtctctactaaaaatacaaaaactagccagggatggtggcacatgcctgtaatcccagctactcaggaggctgaggcaggagaatcgcttgaatccaggaggcggaggttgcagtgagccgagatcatgcccctgcactccagcctgggcaacagagcgaggctccatctcaaaaaaaaaaaaaagaaaagaaaagaaaatatgccctctaccttctgagcccgaggagaaaagaaagaaaatatgctctgttgttctgcccctcagatttattttcgtgtttttgtaggatcagacaaaggtgaaaatgaagcaatggaatcctgtaagtaagaagttttgtgatacttaagtagcctggcctgcatcccaaaaatttagattctaaatcttctgtgttcgtttttctgcctgaggaatactgctgtgccaagtggctcctcaaggcgatagattgggttgcttccttgctgttggcacggcctcttcaccagtgtctacactctttttccccagctggtaagcgggcccctcagtgctaccccagttccgtcaactctgccaggactgtgatgctgttcaaccttggcagcgcttactgcctgaggagcgaatatgacaaagcccgaaagtgtctccaccaggtgagtccagagtgggaggaactgaaccttgtaaagcagccaacacaagtttgaggtttatattttttgttactttgtttgaagcatctgatcagtttgttaaatattggaatatcactttcccagatataaaaatattcttgcaaggtaaacaactaatcagcattgtaaatgaacctagacacttaaaggaaagttcttcttgatgattttattttaaaaaaaatttttttttgccaggcacagtggctcatgcctcccagcactttgggaggccgaggcaggcggatcatgaggtcaggagtttgagaccagcctggccaatatggtgaaaccccatctctactaaaaatacaaaaattagccagg

SEQ ID NO: 105141 - DNA, 1034 bp, Homo sapiens
gcctcagccccccaagtagctgggactacaggcatgcaccaccatgcccagctaatttttgtatttttttgtagagacggggtttcaccatggtacccaagctggtctcgaactcctgagctcaggcgatctgcccaccttggcctcccaaagtactagggttacaggcatgaaccaaccctcccagatgattgtttcttttatacagcccacctataacaagttctctacctgggctataccttagaatcactgggaagctttttaaaattccattgcctgggccatgccctacatcgcttaaatcagaatttctggggataagatggaggctttatgggattccagtatacagccaaggctgcagatgacagctcttctagatcatcttttacctccccagcaggattttcatgtcttgctttgtgtgtggcagtattgttctgtgctttgttttttaacgggaagtgtttttataggtaatactcagctggccttacagatcatcaaaaggaatcagctgctccctgcagtgaaaacacactctgaagtgagaaagaagccagtgtttcagcctgtccacccgatccagcccatccaaatgccggctttcaccactgtgcagagaaagtgatacttcacttttggaaaactgttacctgagacccaggggagaatttactggccattttagttgtatcacagcagaatgaataaaagatggtgaaggctgttaattttgagtcaattctacccctgacatttggccaaaagcttacttaaaattaaggatttactaagtcatcatcagctgtttttcttaatttcagccagactattaattttgagccattatgtaatatatgccataggcaattaaaacataattttatcagaagtcttttacacttttattgactattagattattttagcatctgaggttttgtgttaacgttcaaaaattgacaaagaacatcagcagtagatgaaatagccagttcagaagctgacctgggggtgaaggggaggga

SEQ ID NO: 105142 - DNA, 2720 bp, Homo sapiens
cgtcctcctcgcagacgtccacgtcgtcggggggcggcggcgggggccctggggcggcggcgcgccgcctacacgtcctgccctgcctgcacgccttctgccgcccctgcctcgaggcgcaccggctgccggcggcgggcggcggcgcggcgggagagccgctcaagctgcgctgccccgtgtgcgaccagaaagtagtgctagccgaggcggcgggtatggacgcgctgccttcgtccgccttcctgcttagcaacctgctcgacgcggtggtggccactgccgacgagccgccgcccaagaacgggcgcgccggcgctccggcgggagcgggcggccacagcaaccaccggcaccacgctcaccacgcgcacccgcgcgcgtccgcctccgcgccgccactcccgcaggcgccgcagccgcccgcgccttcccgctcggcacccggcggccctgccgcttccccgtcggcgctgctgctccgccgtcctcacggctgcagctcgtgcgatgagggcaacgcagcttcttcgcgctgcctcgactgccaggagcacctgtgcgacaactgcgtccgagcgcaccagcgcgtgcgcctcaccaaggaccactacatcgagcgcggcccgccgggtcccggtgccgcagcagcggcgcagcagctcgggctcgggccgccctttcccggcccgcccttctccatcctctcagtgtttcccgagcgcctcggcttctgccagcaccacgacgacgaggtgagtgcgtgggggcgtgtgtttgtgtccatcggataactgcgtgtgtgctcaacagcgtttcccggccggtcccacagcgaggggaggaggccctctccggatttggtttgtatttcctttggctacgtggcagtccttgctaccaaagtagatcatgacctgggaagtatgtggaagtggattctgtgtacgtgtcgcgaggggctccgaaaaatcccatagcgtggggtcctcccttttctgattttaatttctgtgtggcaaaacgcggcaatcgtcttgagttaggcgtgagttgggaggagataggtgtgtgtgtttgtgtagacgtggcctgctcctgctcttgtgggcacaccagaggcctcccaacgtgctgagaaggcgctcctttattttcagatttttgtttggaaaactcatagattgttgcctttaaaatggggcgtgagcccggaagagatggttgtgtgggtgagtgcgtggagtttgtgtgcctccgtagacctggtttccacgtgcgcacttgtgaggggaagactggtttttttgttgttgggacagcatggcagtccttgcctccttatgttgggtaagagtgggagcgtctgtggatctttgagggccaagggcccccagtcttaagcccttctctctctgcggctgcttcctatattgtttaaaatgcgtgttctggcccctgaattctcctagcgtgaaatcgccgttcgtgggcccacggctgcaccccgagatagaagcggaataaagggacgacgttaccttcaccagcctgagtctcttgggccgcgcccgcctgccccgactccaagccctacaggaaccggtttccctggttaggaggtatccacccggctcaaccagggtctcgacttccttggaaaagaccaaggcagccgtacgctgctggaacgccggagtgcaaaggcttttagggctacattgcaaccctcgggctcgatttcgccctttgggctgtcgagtaaacatttgcttttcacacagtgtgacccctttctcctttccactttggtattatgcgagtgtcgtcttctcccccgaacccaatgaaggcaggccaaaagtcttgagaagcgggctcttgccgagggggtcggtaacttaggcgatctacctgtagaccggtaagagagggtgtgggtgaaagtcttgacttagagcgtaagctggagactgcagaggctttaaaagccatagtgggggtcgtggcctgtgtgagctggagagtgggtaccgagcaccgcaaaggtgagcccagcgccgctgccttttccactcctaacctgttatttggggaggagggcggagctattgcctgatggcctttagctggcttctcctgttggaaaaaagttgaaattctaatctacttgttgtaggcatctccttttaaaaggtttcttctaggtaagaagctagggggcagttatcttttttttccgtttttaaactttgaatggactcctagttttaatatactgtgggttcatgttctttcatcacttttagaaaaatgagtgattgaggtaaataccgatccaaatcccaggaacagaaaaatggagccaattcacttgcagtttgggatcaaatgcagggtgagcagaatggggttgaatccaggagtttccccttctgagaggtgcttttagtttaaatgtcagtttatatttccagttaaagatacacctatattttatttgggctgaaacagtagatgctcagtgttggcagacttgtaaaagatttattcacttttaaaattagaaaacccttcaaactgcattggggagtgtgaattgagaagtgaagctctccactcaccctgggaggtactcggaagctcttcaaattcactttttagcatgtgcaatgtcaggttgaagtaactaataatccttaacataaaatttgctcagt

SEQ ID NO: 105143 - DNA, 1072 bp, Homo sapiens
agtgaccctttagtgttgttttgcttttggcacatagaacgtgagccctttgcagccttggaggcgacaccggcagcagaaatgctgggtgtgttgtgtgcctaagctgggcgtcaggattctgtgaatggcgggaagttgagcagggtttgaacccaggaaagcctctgtcactagcggtgaggggcagtgggggtgacattgttgccacctggaaaacattgtagcccgccccacccgaggatggcaatattgttcccagttaggcaggtctgggggtggcgttttctggagtctggttggaaaaaggggtgcaggtgttggtagaatccatgcggtccctgtgttgggctttaaaatgcctcctgaagagaaaagttctagaattccaacttgatttgaccctgaacattgagcactcctgggactgtctcctggcaggaaacttaaagtggcttcagtcacttggaacaaggaggtttgctgcctaaaataatcggttgctgtgtgaatttgttttgtatattttaagtcatattgtaaatgggactgtacctgtattcagcaccagtgtatattattctctgttcccaaagtctaagttttttcaggtctgcatatactcagtgtatgcatgcttattttaaattatattcatgttcttgcataaattataaaatccataccaaaatatttttaaaagcataatacaaattttcccacttacactgcatgtcgaagtaattctctttttaagggtgtgaaatgtaggtatagctaaagaaccactttcctatcttttccgtctttagaggcgatcagatgtaactaagttggtgaaatttatgataaactttgagaatttctacaagaaattggcattttaattggaatccgattgattcatattaatttcaacaaatttttaaaaaaaatttttttaaaggaaggacaaggagagaaagtgaacagaaatgggtattctagtatttctgttacctgctttcaacctgctctacactactgggtgaatatgtcctctgagtgcagacatctcacctactggctggaa

SEQ ID NO: 105144 - DNA, 1942 bp, Homo sapiens
acacctaggaacaactccactcgcttctgagcacctgtctctacctgctttgctctagcaccataaagattgcccctgtaatttcagcagggatttccccacagctcagcagggagagaagggagaagagaaaggaaactctcagtgctggtcctcatatgctgaggaggggaatttgcagattccatcactgtctagatttactgctgggaaaacattgtccgttttgaaaactgttagtttgataatggcataattatttattgttggtcattttgctttgactcccaggaagctcagagccaaaccatggtctcaatccaggaagtcccatcccgcatgctgctctcctttcatgactcaagcttgcctgtgtttgtcttctttgtaagctgcttttcttagatttgggtgagagttcctgaaaaaaatttcagtaaaaattgagtatgatggggttgtaaattgtccaggatagacaggttttgatccaagaaatcagactgctgagttaggtaaaagaattaagccattgtaccagcatagcacttgtcaaatatgcatataatccccatgtatgctctgtcccttcctggatagagtccagacccgtgccaaggggcgggtgcagagtcttgccagcatgtgcctcacagagaagtcggggcagtgaggactacaaagctctcctctgtaaaaatcaaagtgatttgagaaaccccagggttattcatgtccccttatacagacaggccttagccaggtgtaggctcttctgatccccatctccccacccccacccaagaaccctctgttctgcaatttggtacatcttgaaaccccttcttgagaggtgagaggaagtggttaatccccacttccttccctgggagttttatgggcctctgggagcctgccttactctggccttaatggtcataaatgaccctctctcagggcagggccaagcccctatgagtcttaggtgcttaataaatgctttttgatggtgattcccttggtcttctgtaattggagggcgggggtgggactatttataggattatcggggtgttggccacagcccctccagctgggtataggcctggaacattgtgattgggcaagggcttccagggtgctgggactaggtttgactgaattggtcaagtcatgcctttgttgagaaatacaagaggggcagggcctcaccctccaagggagccctctgcttcctgctactttcaccccccaagatctggcctgcatggtagcagggggtgggagaaatgtgaaggtaatggtaattgagggttgatcttgatttgcacctcaggacactccccccaactcaccaggatcccttttctcatcaaccagagttctaaggcatagcagtaactccccagtaagcttatttcttggtttgcccagctcttgggacaggcttacccaggggcctcgaagtaagggatactgggatctgtgaaaatggagtggatggcccagttgtgcttagcacatttaatctttattagtggcaaaagagctctgggaaggaaatctgggcaggcatcacctctcctgctagcaggtccccctccctttccctgccagctaatccccgtgcctcccattctgcagggttttaattaactgtgtttaatcttccccgggaagcaggcttaatgcccgcctgcgtgcttatcccgttacccgctgggttttctgttccagcccagccaaggacaagtaacattctggaggagtcttcgcccaagggccattagctgagggaacctccctgagctcctttcctgtcgtgctgctttctgggaaggtgcagagccggcccagaaagcaaaccagggtgtgggcaagggttaatctgggccctgcccgcccaccctgcctttgtggaggagctccataaatcctgctg

SEQ ID NO: 105145 - DNA, 1012 bp, Homo sapiens
taggcccaaaatactccgtcctccattaatgatcagcatggctccctccaggaatggaaattgtcagattgtcatagaatgttttagtcatcctgatgactagagtcattctctctcctgcttaattctcgaccttcttttgcaaccactggaacataacagcaaataaaaataacctttaaggaagactagcttgtgtagatgaacattctttgaattttaagctgaaatactgagtgcaggatggagagaacgctgctaagcagggtatcttgaccggcttgttagtgagggttttgtaggggggaccattcgctgccctatccgcctgtttctcttgtgggattaatcatttccttttgaccttgtgctctgcccctaacatgttgcattgatcagatcccgaaatctcaagtcattctccacccccaccacccacctcattctaatgagacatcctgaggtgcaggttggggaggggtttaaatagaaaaggtgttctctatcaaaatacacaaaatgaaaaacaaattattatttttcaaaacaagcctctccactttcctgttttgttttcttatggttctgtcaagctttttagaaagctccgctttctcactgtgactatggaaatgttactggttcagcttacacattttaaaaccttgtgtttctcgggctgtggggaaaaaagtttgttctttttgataagccttacgtctcaatttcctcctcactctcactttttagaaaatttcttaagtagatggtgaaatttgaatttcaggctacaattagtaaaagaactgaatacagttggtaatagagtggaatacaatgaacaaatggccaagccaatgaggaggataaggagaatatgcagaattcactgattggtatatttctctccttaactgaatccacccagctaagttctttgaagacttagcgttgtcctcctcacctttaattaatgaaagtgaactggcaaactggaaactttgttttttgt

SEQ ID NO: 105146 - DNA, 1008 bp, Homo sapiens
cactacgcctggctaattgttgtatttttagtagagatggggcttcaccatgttggccaggctggtctctaactcctaatctcaggtggtctgcctgccttggcctcccaaagtgctgggtttacaggtttgagccaccacgccctgcctgaactggcaactttgaaagggttggggcagttctactgtgtgacattaatcttgggaaacttaattatttcaaacttaaatttcaggtggcaaaacaggtctgaagagtatcaaaattgcaaaagagagaaaggaaagctgatgttatcacttaggcatagcaacagctttcttttgtggggtaggcaggaaaggaattttctgttcacttcccacttgggaacaactattcaggagagagaagtacccaaaaccctctggagcgtgcccgaggggtcctgtgggaacaaaggctctatattggacctgctgccagcttggaccaggctgttttatggtcggtcctcggccttggaccaaactggtcacagattccctggggggtagccttttggattgtggggccatgaatgaaattggggacagggacagtgtcacggcctaaactggagcgccggaggcacatcctggagaaggacattgagggctgtgttcctttctctgaccagagggagggtgggggttgggaggcagataaataggtttctccagcttctccatatgtccactactgggtttatgcctgagggtgttgtgtagaaatttgaagtattgggaagcaaaacagtggttcaaacaaatgcagtgataggagagtggggctctcagatgtgagaacttagaaacggacccaaagcaagacaagagcattttgccagagaggtcttcttgtgctaggctcattttagggagctatgggaatgtgctattaaagtcaggcttgttaaacccagcaggcatttattcttgacctgtaggggatagggagccattgagggttcttgagtttggaagtaa

SEQ ID NO: 105147 - DNA, 1054 bp, Homo sapiens
agtctgtatttctgcttctcttctcaggacagttttacccaggtgatgagtgccttcccttgctttaaaaaattctgcctttctacaccatctcagccacatgggtgattgaaacctacttggcttctttaggaactgaaagggtttcaggtgtacactgttgcccgctgtttaagaggcgaggactgagttacatggccacctacagagtctgaccattttttaaatgtcagccccaaagtaccactgactcttgtccatagcacaacagattaaaaccttgccttgcttttgcaaccttggaggcagctggaaaacttgtgtgtctacgtccaaatctgtctttcgtgtccagtttaaaaatatataatttacatgggcagtgatctcagtgttggaacaaatctcttttatttgctgctggaagctgcatgggccactcattaatacatcagaggtcagatgcatgccggggcggcagctgggacactaatgatttcatatggctttgtatgaccgctggccgcctgtggtgctgtaaatcgggactcagggttctaattttttcaaaacctccagggaggttgcctcttgcgagatataacttaagataatatttatagtagagggcagaggaaaaataatacctaatgggaacattgtggaaaaaatggtagcaacctattagaagtaaattatgtggggccattggagttaactcatttatgggctccatgagtattttattaggtccttagctatgaagagtgctgcgctgtggccaagctccaagcatcaccccctcaacaacttaggttgtcagtggaaggattctcccctcacttttgggagggaggagtattaattgaaccttttttttttttttttttttttttttggagctggtcttgctgtgtctggcttgagccaggctgactgcggtggtgcatacatggctcacagcagcctcgaactcttgggctcatcaagccatccttctgcctcagctgtgactataggcatgccccaccatgcttggttaatttttaattct

SEQ ID NO: 105148 - DNA, 1093 bp, Homo sapiens
ctgcagatttgagcacaagcactcagtctatctcagtcaagtaaagcgttgttttaatattacttaatagacttatttcatggctagattttacctccttgaacttggcttatcatttttaaaacgaatcttgtgttgtcccacgtgagaacctgcagagtagcacacacaggtaaggcttcttctgggcctcatttgcttctggaacctgttgttgcctccactttacttctgtagtgggaaactcagaaaccctcttgggtgggtggagatctagccaggtgtcagcggttcagccttggtttgtgggagcccaagtaaatgtcctcagtcattttaagggataccaaactaatctttaaaaagtttacagcagtttatgtattttagttgagacatttcgatgaacttaaatggcaatctgggccttcctctgtcctttcagcttacattcttcactgataggggtagttgtgttttaaacctgaagctcattctttcagatgtcccttggtgtgtgtgttccttgttgggccacagatagtgtaaaatctagattccagaagcctgggtgcacgtgcatttgcatgtgcacacatgcgtgcacacacgttcattaacaaagcattttatttaaacactggctaaggtacaaacatgcctactttgtatttttatttatttattttcctttaacctccctcccccattcctcccggcctagtctcccgcccgttcctttcctgctgggctcacattcctaggtctttgtctctgcctggtattctagattttggggagaggaaggcaatgggtgggacgttctggaagctgggggcagggaagagggtggtcacttgcagggtcagaggtcaagcctcctccatttagctggggcagccggattgtcgccaggcccgagggggcgtgtctgtgcatctgcccgggaagccccaaacaggccctggaattcctgctgctagacgacctgttcttcccagtcccttcccccctttcccgggagccgctgttcatggctactaccacatttctggctataggaccctccacacagctccagtttatttcctta

SEQ ID NO: 105149 - DNA, 1052 bp, Homo sapiens
ctcttgagagctccttgtttattagcaggtaaaggttgtgccagcccttctctctcttcctccctccctccctccctccctccctccctcccagcgtgctgggccccagggaagtgtagaacatcacataaagcagttctgtcagcactggctgcctcccaggttcaactccttggaataacttggcatgaagaagaaaggcaaggagctggctgaccttaccactagctttttgccttcgttccagaaacttaagcctgtagcttgcttgagtgcctgggagaaccatgctttgcactttgcattactacctgtggtgtgaggatggttgttactggctcttaaccttgcttcacacatctaggctagagcagcaaaggaaacttttctggtacattcttacatccaggccactaatatcagactaggtaacacagtcttaacaacttttctggataatgaagctaagattcagggcaaactctcatgccaggaggtttgttttgtttggtttctgccttcgaagtgtctctgttacagttctgaatgagactagagtgggatatggcattcagttgtgttcccccctccattcccccttaatttggggcagagagagtgggagaaaaaaggaagcagatatttttagttatgtttgcagttacgccactgctgcctctccctttggggtgtgcttgctcattggggaagctggtcgttcggttgtgagagccagggccctccagttgctgtcttccctcctcctcccgtcctgcatctccatttatgcctgtaccctctcttgtccccaggtgctgcacctgtactgtgacacttgctctgtacccatctgtcgtgagtgcacaatgggccggcatgggggccacagcttcatctacctccaggaggcactgcaggactcacgggcactcaccatccagctgctggcagatgcccagcagggacgacaggcaatccaggtgagccttccctgcccttctgcagttcccacgtgaatcgagcccccctttctgtcgggtggcatggacaga

SEQ ID NO: 105150 - DNA, 1023 bp, Homo sapiens
cagagggtgaggccaggaagtctggggaagttgcttgtgtggctggagttgtacattttacatctgatcctcattcccagttttcatctgtcacccagctacactggttttgctgtgtcagagtatctcttaatagttctgacattcactgtgtaggtgctatttctcatgcaaagaaatccagctcttgccagcaactcctttagttacatgtcaaacagatgccagtctctccctaagtgcctgttttccttccaagggagtgaatcaagtggtctgggaacccagggtgtcagcttttcaagtctgacagagcagattcaaatgttttgtataaggaatgacagtccttctaatgcctcgaagttgtttctttttggttttccagctgagcatcgagcaggcccagacggtggcggaacaggtggagatgaaggcgaaggttgtgcagtcggaggtcaaagccgtgacggcgaggcataagaaagccctggaggaacgcgagtgtgagctgctgtggaaggtaacagggagagctcccccacccaggctgtgcccactcggcttccatgaacctcagcagcactctacgggactctttacagatccaggagccaagctctaagtttaaaacacttcgtaattttccagaaagcctgttagcagaaagatgcagggggtccctggaacattgtgggtgctgtctgcagtaaaacaacaagaagccttttcagaagtacgtgggtaaccaagactggaagcggtctccagttttatattgcattcactcaaaaggaggctaaagaagggagcatagtcgaaactgttgttaagaaaggcaggctggtaggaaacatccctatttttggtgacctggctggttgcacttcctgacctcttgtggaaaaccagttttcctcttcggagggcagtgagtgtgtgtcctttcttcctgttggagcaggaaagagtgccgagcacactagtgtgctgtttagataaaaatcagctagaaagactact

SEQ ID NO: 105151 - DNA, 8481 bp, Homo sapiens
gtgtatgtgtgtgtgtgtgtatgtatgtatgtatgtatgtgtatatatgtttgtgatctgagagtgagttggcatattggaaacacaatgcctttacccctaatcacattacaattacagaaatcaggaaatttgattttgatacagtactagcatctactcctcagtccataatcaaggttcaacaattgtcccaacagtgcttttcatagctagccactccctccagtccagagtcactaattacatatagttgtcctgtttctagtaactatcctctgtaacccagaacagttcttcaggttttttggtccattttgattttgctgcttttgaagaaagacagatgtcttttgtagaccatcccacaatatgtgtttgtctgatgcttccttgtgattagttgtggcttatgtggtattttctgtgcttggctctaagcctctgtgtctttctccactcttgcttttccctccaggtagaaaagatccgccaggtgaaagccaagtctctgtacctgcaggtggagaagctgcggcaaaacctcaacaagcttgagagcaccatcagtgccgtgcagcaggtcctggaggagggtagagcgctagacatcctactggcccgagaccggatgctggcccaggtgcaggagctgaagaccgtgcggagcctcctgcagccccaggaagacgaccgagtcatgttcacaccccccgatcaggcactgtaccttgccatcaagtcttttggctttgttagcagcggggcctttgccccactcaccaaggccacaggcgatggcctcaagcgtgccctccagggtaaggtggcctccttcacagtcattggttatgaccacgatggtgagccccgcctctcaggaggcgacctgatgtcggctgtggtcctgggccctgatggcaacctgtttggtgcagaggtgagtgatcagcagaatgggacatacgtggtgagttaccgaccccagctggagggtgagcacctggtatctgtgacactgtgcaaccagcacattgagaacagccctttcaaggtggtggtcaagtcaggccgcagctacgtgggcattgggctcccgggcctgagcttcggcagtgagggtgacagcgatggcaagctctgccgcccttggggtgtgagtgtagacaaggagggctacatcattgtcgccgaccgcagcaacaaccgcatccaggtgttcaagccctgcggcgccttccaccacaaattcggcaccctgggctcccggcctgggcagttcgaccgaccagccggcgtggcctgtgacgcctcacgcaggatcgtggtggctgacaaggacaatcatcgcatccagatcttcacgttcgagggccagttcctcctcaagtttggtgagaaaggaaccaagaatgggcagttcaactacccttgggatgtggcggtgaattctgagggcaagatcctggtctcagacacgaggaaccaccggatccagctgtttgggcctgatggtgtcttcctaaacaagtatggcttcgagggggctctctggaagcactttgactccccacggggtgtggccttcaaccatgagggccacttggtggtcactgacttcaacaaccaccggctcctggttattcaccccgactgccagtcggcacgctttctgggctcggagggcacaggcaatgggcagttcctgcgcccacaaggggtagctgtggaccaggaagggcgcatcattgtggcggattccaggaaccatcgggtacagatgtttgaatccaacggcagcttcctgtgcaagtttggtgctcaaggcagcggctttgggcagatggaccgcccttccggcatcgccatcacccccgacggaatgatcgttgtggtggactttggcaacaatcgaatcctcgtcttctaattgcatttcctaggtttctgtgtttggggtgtgtgtgcgtgtctctctctctctctctctctttctctttctctctctttttgaatttcaaagaagaaacagtctcagggaaatttcttttttcttttttttttttaaagagaacaagaaaagtacaacattgcttaagtcctacctcatctttatttttttacagatgaatgtacttatcttttctgcagggattgagcctgtgaagtgataatttctatctacctcataaatctttacatttccttctgcaacaggccctcttcccctcctcagtggagtttgcatttccctcttcccctgcgtggggcatgatatgcacaagcctggcatctgtatggctgggagggcactggatgtgtgtggtggggtgtattctgtagattgagccaaggaaacacaaaaaaaaactactaagtaaaaaaacaaaaaactataaaacatggaaaaaataggatttgaaatgcataattatagaatacctgtgttcttgagaatactgtttatatggggtttagattatgttgtgttgttttgatctttttggaaaatcttctctttttaaatgctgcaacagagaaatttcctctgttctctgtttatacctcagtgtgtttaacatcctcttctgcatcgtttcttgatcttagacgttgtggctgtggcttgctagccaagaaaagcagacccttcatattttagggtatataatctttgtttcttttaagggagggtgtgtgcatgtttgtttcaaagccatcttgcacccaagtagtaaagctgaaaatgacacactgcctcccaaagaacctctccttttcacactttggtttcttaaaaaagtatatagatggtagctcaggatttttgattaaacatattctcaaaagttatgctttcttattttgctgttaggttataaagggttaaatggaaggaaaaaggaaattaacctcgttctcagagagagggttttcaggcatgggctgacgtggacatgaatgtgggtggacatgcgtgtgctgagggagtcagggagcacattaaagaacaaggcacccccaaactataggaactccacagaaagggcagggtctgccctgacccgcgagtgcatgttgttctgtagtgctaggggtttcttttcctaagaagagtaggcaaaggaaagaacttttattttacaagcacaattttttcctgctttgaaagttcagggaaatagaaggtttgaaagtcaaattaataccaacagcccagtcccacaccctctgcttgggtcactttttataggattgtttgcacccaggccatgctttaggacctcatggttaacatgaatccccccgccccctctccccccaaggcctttgaccataaaggatctagaaaccaaattgtcccaacctgaaatgtaggatgtaatgtcttttcttaaacctgtaactcggtaccaaagaatgaaaatttaaggctcccactgcagaactgtggggtagaatctgtgtcactttacaggattggttggttgtaagctggacttgggtacaaaacttgtgcttctgggcattgtctgtctttcaagtgcaaagcagatgtagctgataccctgcttgtcagaacccagtgggttcctgcaatgccccaaatactgaaataagaaccaaattctggaggagccctcctcagggaaaagagggactctcaaacaaacgtcagtgacttacaagggagacctcttgtttaaagacttatggatcaacttctgttcctctgtttaagagaaatttctattgcaaaatgggtatcgttttaaatgagcagaacagattaacaaatggagcaatttgtttctgttatcccaatagaaaaggagatgatggggacagtgtgacaagtcaatcaagttgcttttcccgtacacctcttttggacgtttaatttactactactacaagctactctgtctcttcccattgctttaattctagggtttctgagtgaccaaaatgggaaggaaaaaaaaaacctcatctcacagaggagaactgcatgcaataaaagattcaaaagttggaaagtagcttcaaactgctgctggctcccagctgctgttacagggtgggaaggtgttaggaaatgttgtttgttagaagctccttttactgtagaatttaatagtgaatccttccccaatgcctattcagttgccttttggccgttaagctctaagttctttggtaaagagttaatataattaaacatttttactgttttctattttggagtaacttggtgctgatcttccttccctttccccagctgcccaacaagccaccctttaaacaccaaagacaactggttttaaatgcttgaaaaaaattttattgaggagatggatcttgattaaaatcttttcatcatcattttcattctgctcttttctttctaatttccccagatgtaggaaaattttgggacctgaatgagaaatgttcttggtgcataacagtaactagagctccttatttgacattttactatggatgtgatcgaaaagccaagattttcgctccatggctgaaattatcaggtcttaatttacagacttgtaaatttgcaggcttagagcaactagaactatcccctgaaataggtgtgtaggtcagagatactacctctttgtcctcagtggtggtatatctatctccttacctttctgtacccaaaatggtgcatgactggtatttgagaaacatggtcacatttggaaagcttttgtttttaaaacattggcggtttttcctgcccgtggttgactcctgacccatagggattggtgcgaagcactttggagagtgtttattgtatgatgtgaaatgttctaaatcaaagaaagatgataaaagccaacatttggcagtccctagtgtgaaactgtgaaaagtacctgtgtttaaatgcataatctcctgcccgggtaatgccaggtagccaggagttgggtcaaagaagggagtcgtcatcctgatggaaaaaataaggtcctgggtattatgaggtaggagaataaaaaggtttctggggagtaagtatgacaattactagtccccatggaggtctgatctggtcaggtggcaagggttgggtggggtatgatgtaagctcagtttatgtgtggagatgcccattgggtttggatatataggtttgagtattgagatgtttaaaggacatctaacccataggtaaaaactacttttgcttgacactgacttaacatttcaaaagtgttatttttggtcccaagatctaatgctgtctcagaacatgtgccctgttgtggctgcaagtggcactcaagttgactagagcacagtgacctgggttgtaccccaagtgcactaactcctcaatgcccttttaagtctaacttatttgggaaacacataacaaagggtaccataaaccgaatccaaattacgtgttgggccaaaaatgttgccagaactgaggcactttgtgatggagttgcaagagatagcttgagatcggctcagtctgatttattctagttaagccaaagcttaattatttgaggaggaaagtcttttaggcttgaagcagcaaaatactgtttatatatgtgttaccttcctcgttggaagattctacgattgctctgttctggtaggtggtgaaagatatgccaaagttttaggcttgtttttctgatcttatttttttaatccagtggtgccaaaaagtatttagggtatgtttaaggtatatttaaaacatcactctgaatgagtttccaacagtctggggctgtataaaagtcacactcttgtacttgcaggtgatggtgtcacagggccagggcctccagagctctacggctttctctggttttctatagggccaagggcacaggacgcagcattccagaccacactgactgcttttgctgagtttctacctcacttgtggcaagtcatctacctcatgttagcatctgacaggtctcaaaaagaatagtattaatccagtgggcagtgggtgggagtgggaagctacctctaaaagaaatgttaccataaatctacaactgatttctcccaggagaaatgttctacttaccttgaaagagaaatgtcaggcaaatgtagtcataaatccaagtagttcttagcaatctggcttttccccctcaaaaagaattatgcataccattactgttgttcagtattatgaaactactggttaatctgacctattggaggacttaactacaaataaagacctttaggtctctttctcttcaagagaaaaatattttatctgtatttcgaatgtctgcaaataataccctttaggagcaattctaaaggtctagatcttggaaacatcaaatatttgaagggaatgagaatcctcttgacttcatgattgtatttgtagctctctggacccggcaggacgttcatcaccatgatgttgcaacaatcactgttttgactgagcagtgactgttgaagtgtgtattgctcttttgttttgtttttatttttttctaccaaaggtaacatgttgacgggttttttttttccttgtttattaaatacttgataaagttgagaagcacattaccaggatatactgtattgaccctcccacctctcttctgccctaatttttggttgtttggaagagaggagggtcctaagaccactgtcattatcatgaggggcttataaatgtcatggtgaagaaatacctcaatgatgtctatttttaaaactgatcttacgggttaacaagccagcctggtgggatattttccatcatcatttaaccaataatggttctaaaagttttgtgtatccacatggtcttagacctccttttaatgattgtattaacttacaagctcaggtagtatttttcttaagactctatctcagagcacactgactgaatgttgatgtgtgtagcaaagtgtttactttctttaaataaccagctctgtaactctgtaagttctttgtgtttctagcagtctgtgtagttgtctttcttcagaggaagatttttcacatttctggggttttcttgcttttagggtggtaagattcctttctttttttcccttttctcctaaaatcgatgcaggtaagggtgggtgggtaaggggtgttgttttttaactagcatgttagttatacttgggtgggtgggagggttgttaaactgaatcttgcttaatactgtccattagctctcatgccgggtcagcaaaatgctttaatttttaactgcagaacatgtgactcggttgagtctttttgtcttttttttttttaaataaacaattgggggaattaatgtgggcaagttgccttatgttagaatgactaagttaaacctcttaatttgtatttgtccaaggcagacatgatataaggaatatgcactaccgtagtaactcccctggccgcagaaaccacactgcaagcctgtccggggtggggtgctgactgccatttgccacttttaaatgggcactgccgtggtaatgtgaatcccatcaatgcagtagatgggtggggaaatgaagatttccccccaaacctttaggcaaaagtgagtttttgtttggttgattttgggtttttttcccccctcctcttttggctttcacattttaaatcttaaatgttactattgcaggccgcaggcatgacaggcaatgagcaggtgaagaaccaatggaaaagtgttcaaaaactcctgtgttagctaacaggcttctgaatgtatcactgtggtccacagagaaggctggaggaggtagcaaggagatgctgtatcagctactacagccttaaaacaaagttggtgtctctttggactttaaaattgttcctatgcagcttattttatttttgtttaatcaaataaacgagggtttttccatggctacagtgtgtctgtgtgatcctttaatccatagtaaataagggtatgtgcactgtactggatggaaagggagtccctgaggtagacagtccaggagctgtactgtgactggtgggccagattgggcccatgcggtgccttcaaaaagaaaaaggtgatgggagcatttttaaatagagtaaatgttaaagagcctaaaagttatggattgtcacgaaatttcagacctggaagccttgtatgtatcttctcccaaggagctgagtagcagatgtccctctagaggcaaatatgtgacttcccagctgccaccaccctgtccccctttctctggaaggtcttggccttatcacctctgtctgagtagaggtacctgggaaccatttggggtctaaactgtggccccaggagatgtgagcaactcatccaactggcttctccctcagtggggggataccgtagatgctgggtggataaagactgttaatcgtgagcttaatgtgttcagaactttatttgggatttcatttttcactgga

SEQ ID NO: 105152 - DNA, 1189 bp, Homo sapiens
ctttttttctttttctttttttttttttttttgacacagggtctcactcggttgcccaggctggagtgcagtggcacaatcatggctcactgcagcctcggcctcctgagctcaagcaatcctcccgcctcagcctcccaagtagatgggactacaggcatgtgccattatgcccaaataatttctttttttaatttttgtatatgtgctgccaaggtgagcactcttttttaagtttttctagatacagggtcttgctatgttgcccaggctggtcttgaactttggcctcaagtaaccctcctgcctcagcctcccaaagtgctgaaatcacaggcatgagccacatttccagcagttttgttttttgaaagcagggttatggcttatatttattcttgattctctattcttagcctagtggcagaatgaaggctgtcctggaagaagtgaggaggttgggaaaggaactcttttgtagggaggaagaagacatatggagtggagtttgggctgggtttggaacctgatactttctgcaatattgacaaatgtgaataagacctttttagtcaaaagtcatacagacacatggtttggctgggtagtcacatgcttttgcctgttgagttttgtgacgtgaatgtgttttctgctgaaccaaccccttgaggcctgctaaaacaggtgactcaaaaacaactttgttttcttgggtggagtaatttcctggtgtttttctcaaaagttgtcaacttttattttagtgatggaggccaatcttgacaacttttatggtcaggcattctcaatatgttttaaaatgggtttcaggcaaggtgtggtggctcatgcatgtaatctcagcactttgggaggctgaggcgggagcatcacttgaggccaggattttgagaccagcatgggtaacatagcaagaccccatctcttcaaaaaaatgaaaaaattagctgggtgtggtggaacaagcctctagttctagctactcagggggctgagatgggaagattgcctgtgccaggaagtccaggatacagtgggctgtgatagtgctactgtactccagctgggtgacagagtgagaccttgcttacaaaaaatttaaaaacaatttttttttgagatggagtcttgctctgtgcccagtctggagtgcagtggcgcgatc

SEQ ID NO: 105153 - DNA, 1034 bp, Homo sapiens
agaactgaagctcctggcagagaggtaagaaaattagtgagtgcccaagctggaatctgaaacaaatctttctgcctccaaagcccaaaattatttcgtctggctgcagggccctgtgagtaatcgagcccttcatcttgggaaaggcatatacagacctggagcaaaacagtacgcagccatgctctgcatttagcaatactttggtttatttttgttctcacagaaatctcctttgctcttcccctcattagctgcttctggttgggcccagacctgccttgaggagcctgtagagttaaaaaatgaaccccacggatatagcagacaccaccctcgatgaaagcatatacagcaattactatctgtatgaaagtatccccaagccttgcaccaaagaaggcatcaaggcatttggggagctcttcctgcccccactgtattccttggtttttgtatttggtctgcttggaaattctgtggtggttctggtcctgttcaaatacaagcggctcaggtccatgactgatgtgtacctgctcaaccttgccatctcggatctgctcttcgtgttttccctccctttttggggctactatgcagcagaccagtgggtttttgggctaggtctgtgcaagatgatttcctggatgtacttggtgggcttttacagtggcatattctttgtcatgctcatgagcattgatagatacctggcaattgtgcacgcggtgttttccttgagggcaaggaccttgacttatggggtcatcaccagtttggctacatggtcagtggctgtgttcgcctcccttcctggctttctgttcagcacttgttatactgagcgcaaccatacctactgcaaaaccaagtactctctcaactccacgacgtggaaggttctcagctccctggaaatcaacattctcggattggtgatccccttagggatcatgctgttttgctactccatgatcatcaggaccttgcagcattgtaaaaatgagaagaagaacaaggcggtgaagatg

SEQ ID NO: 105154 - DNA, 1045 bp, Homo sapiens
tccagattacagtcaatggtgtcatttttctcagtatttgtctttgcattgtttaatgtgcttatgtttgtgtttctgcctaggacgaaggcgatggcagcagttttccaggctagctgtcttcacaacccgatggctctcttcttttctgctgccacagagactgactgtctgcctcctgcaaatttgaaatttggcaaacctgcctcctctgcttctcagaaccaaactggggccaggagaacttctgacccaagtgttgatcacctctcttcctgcacctcactgtgcaccctctgctcaggaaatgcctttggcgtgttgctgacgtctgtccctgctccatctcttaccaccctgcacttcaccctttcccacacaggtttcacctgatctcagctgctttgggcagaccatccaggtattttggagtctgaaaaggatctctgtctctaagtctggtgcaaatggagtttgggggttttaaaattcattcttcttgctgctgtttcacaatttctcagaaaaggtgaaaatgcagactttggcagttatgttcaatatgaaaagtcttaataaagtaatttttgacctaaagcccaccagtatttctggaacaattcagtcaatctttgaacttggtcacataaagtcttattagaaacacaacggggattttggagacaggactagtgaactttgtgtagttaaatagaaacttgaattgccagtgtagagtacttgattaagagataaggaaatccactcattcagtaaaaaataattgagttttgtgctagcaattttactaggcagttaggtggtgggtatttttggtggagtgagtctaattcatgattaaaatattgtttctcctgaacctcaatttcttggagtaataaaatcaaccttatctactttaagaagagggtaaaatgagtgtcaatatataaaagcacttggatttctgattttatgaaaggggaatttggagctattgtaagctttcaagcggtaaagtattatgaccacaaaaagtgggtgg

SEQ ID NO: 105155 - DNA, 1656 bp, Homo sapiens
tgtcttctgtgtacagaaaagtcagggagaggctggtctgtgggtacaggcagcacctgggaaccaggatgaaattcagaaatttccacactgttctctggtaccaacatctgtggccactgaagcccgtcagagggaccaaacctgtattttcctgaagcaggagtgggtctttggggcaagtttttgttgccccaaagaaggtggatgggggcatccaccttcttcccaccttggccagttatcccagcaagaagctaaaaccaaggctggcatgggcctggctgtcagcctcgcctttctgggggcatttctttcctccattgctgctggcctgccctacatcagggcccccaccttcctcagggctttcggtgcatctggggttgatggttctctgtctctctctctccagggccaggtctggattaatggctttaaccttggccgctattggccagcccggggccctcagttgaccttgtttgtgccccagcacatcctgatgacctcggccccaaacaccatcaccgtgctggaactggagtgggcaccctgcagcagtgatgatccagaactatgtgctgtgacgttcgtggacaggccagttattggctcatctgtgacctacgatcatccctccaaacctgttgaaaaaagactcatgcccccacccccgcaaaaaaacaaagattcatggctggaccatgtatgatgatgaaagcctgtgtctttgagggattctaccctgaacatacctcacagatcctccctgtcatgccacatttcactgattggaatgtggaaatggaaaaggaatttaggatgtgcattttcacctgaggtttccctgcatccctgcagtgccaaagccccaccttcagggaccacctggaatgtgtgaggggctgacagcacagtaacgtgcatacatatctgcagggctggaatggaagctttaaaggtggtagtgatttttattttggaagaatcatgttacctttttgttaaataaaatttgtactcaaatgatgatgtcactgtttttaatgtgcaggtattgaattatatggtctgacttaaatcataactagacttgagtgggctgaataaaccacttcactaacttgaagttcaaaaggatggaaaatagtcttggtttgatctgtggactgctgcttttctgatcgttatttgacttgcttttggactagataacctataaatacagctcaaaacaattatgcaaacaatctaaatgattaacagttgcacagtgtacatagtatggtatatctatatagaagcatagtattttagccactaaaatggtgagagatctatacttatatgcaaattttttgatacatgaaaaaacagattaccttaaattggatcccgttttgtgtgtttcaacataagaacttcacatattcacacagtacaggcctatacacatgtcagtagtcaggcatgcacgtgtgtgtgtgctgtgtatgtgcacagataggaaaggatgtggtgtttctgatattcctgtcctgacatggagcagtagctctcatttgttgaggacttgttctacaccatgcacagttctgagtttatgtttaactcacttgcccctcacaagaacactgaggaatatactgtcat

SEQ ID NO: 105156 - DNA, 1159 bp, Homo sapiens
ttgttgcttttaaaggagctcccaaaaaattttggaaaattttaaactacaacttaaaacagtagtgagaccaggcacagaggctcacacctgtaatcccaacattttgggaggtgaaagcaggaggatcacttgaggccaggagtttgagacaagcctaggcaacatagtgagattctatgtctatttttaaaaatagtttttaagttagctggccatgatggctaacaacaacacgtgcatacctccccccgatagtttcacacctatagtcccagctcctcaagaggctgacacaggaggatcgcttaagcccaagaattcgaggctgcaatggactatgatagtgcagctgcagtctagtctgaatgacagcgtgagaccctgcctcataaggaaggaaggaaggatggaaggaaggaaggaagggagggagggagggagggagggagacttttgttttaaattccatttatccagatagtttaaaacagacagacaaacacatgtatctgtctgatcaacaaaaaagtaggtcaggcatttccaggaacctcacatttatgaaactattattattgccttagtgattacagcaaagggtggagagtctgccagggtcaagccgtggtcagagaaagtcactttgtcatggaactattttaactgagactgccttaggaagccccagaaaccactgcttggtccccatggggctgacttcattaagagtgtatctacttttagatcatattcagcaacacgtgcatacctccccaccaaaaataattgcaaaagcataactttttaagagaaataaaaatcaatgtatatattttttaaatagaatttttaaaggtaaattatattaaagtgtttttcattggttctaatcaaggagggaaggcaaatgtttttcttttagtgaacaatattctttaaaactcttaaactgggagcagaggaacgtgaagaattctttcagaagggcttcatgtcacctcttcaacgaatcttttcttggcagaattatcaacaagtagcagcagccatgagtgctactaagtgtatattgaatatcactctcctgcgtgcggagaatctcgcctcaaacaaaatggacaaagactttcccttcctagagcctgtgttatagctg

SEQ ID NO: 105157 - DNA, 1031 bp, Homo sapiens
ctttgttgttattattattattattagagatgaggtcttgctatgttgcccggactagcctcaaactcctgggctcaagagatcctccccaagtaactgagactacaggtgcatgccactgcacccagctcattgccttttgttttgtatgttaaagcagatttagcccatgaacttggagacagttttgctgagcagaacttcatctcttggctttgctgtttgtttgccttgtttttttgttggttttacttagttttgtttttggagctaacatccataacttttgctatgtatgatataatcccctgtatgaccctgggcaagtaacttaacccattcagggtccaggttcctcttatgggaaagggatgcttgataagacactgttcatggttccttgcagtttactattatgatagatattcgatgacctaaaaattaaaccagtttcctttttcaaatttaattttttcgggaggtggaggaagattttcattccttatggtttgagaaacatcgctttcatacatgtctagggtaaccaagttctctaaatgaatggcaatagtgatgtatttttcttaaatccttttctaaccagcattatgggtttgtgctgtaccggacaacacttcctcaagattgcagcaacccagcacctctctcttcacccctcaatggagtccacgatcgagcatatgttgctgtggatggggtaagaatcgtctctgaactgtgcgttttgtcccagtgagggtggggatgagcagcctgcacttgttaacacagcatttggggtctttgctcaccttttcagcctcaggctctacccatcatctttttttttttttttttttttttttttttttttttttttgagacagggttttgctctgttgcccagcctggagtgcagtggtgcaatcacagctcactgcagcctcaacctcccaggctcaagtgatcctgctacctcggcctcccaagtagctgagactacaggggtgcaccaccatgcctggctaatg

SEQ ID NO: 105158 - DNA, 1061 bp, Homo sapiens
agtgatacaggcatggaagatatgccacacacaagttcagaggagggtgaagtaactaggaagtattaaatattaaggtgatataataatagcatgtctaatcttagttgaatgtaactggcctctggttactacttttacttcttagttgttttactcgggggtgttcagagagggtttataaggaggcagcatctgagccttcgttttcattcattttaagaatcttttataggtctctgagcaggttggacttccgaataggtatgtttgaaacctttttaagactactatcattcatagttttcatcaggagttagggagtagatggagaggactgaaggagactgggaagcaatactgagtggaatttgaatgatttaggtttatttaggggtttggtcaaacccactgatgtctttgataattagggaatgactctgtaacctgatgaccagtgaggggtgcagtgtgtgaatgctgcttttgtttcttttcagttaaagacagtgggagcagctctggacattctgtgtccctctgggcccatcaaaagcctttatcccttgacatttatccaggtgaaacaggtaggccttcaaaggtaatgcctcgccttttttctacttgcaaaagtgtgctttctgcactgccttgcagtgcccattctgaattcaggggccaaaatggtaagcaaatgcatcagatcccaggtaaatgaaccatgaatttccaggctctctttagcttgaagtgctgcgtggtgggctgatcatgcctatattttttgccccacttcttctcactcatacaggaggtagcccaacctgcttcaacataattctgtacaagttataaattgagttcactgaccaatctaattaatctttattactaggcatcagtggaagatcactgttttaatactcaaaacagacagtttaattatttgttcttagttcaatggcataaggactgtgttttttggtagactaggttctttgagattctttttcctgcttttgaagagaacagagcacatctttttttttttttttttc

SEQ ID NO: 105159 - DNA, 1022 bp, Homo sapiens
cataacaatatggagaagtattctctcttgtaaccacagtaaatttaacattgatacagaactttagcaataagattaatatttttcctatgataggctgtctcccttcagagtctgtcacgtacctgtttccttttttcctcccactcccctagccttctgctgtttaccctcattctctctacttgtttttgctcttttgttttgaggtctttcggtttataattatttggatattcctgaagcttaaaacacagacatacacttagaggtaaaaaatttaccagatcctgctttggaagaagtctctagttcctttgattttccaaaaaagcagtggcactgttgagtctttgaccttgctttcaaataataaattttatgaatatgtttctgaaggtttaccaactttttttcttttctctctttttctactctggtttatagtttgaaaaagtaccagaaggtcctatccctccatctacaccaaagtttgcatatggaaaggtcactttggaaaaggtaagaaaaaaaaataacagaaactttgaaagtgagagatgggagtgagaaagtggaatttagtagcagtgagtgaaagtgctgtgctggaggaattggttcgttatttttctgcgaatttgttttctgcaagcctaatggggtaaatgatgtttctgggaaaatggggagagagaggtgagaagatactcatgcctgttgacaggatgagcagatgagacatgggtgggagtagtaggcattcttggatcatttgggtcatcttggttcctttatcagtggtttaaacagtgtcaagtgcctttgtggaaataacatgccacctcattgttatggctgccaaggctctttgtcgtatttaccttttttaggagttccccaaaatcacaggcattttgatagacctctgccctaaattatatacttacctccatctcaaagtcatgtcctaatttttatggtctgtggtttatacgttaaatggggacactgggggaaaa

SEQ ID NO: 105160 - DNA, 1053 bp, Homo sapiens
taagaaatgggggaaatggtatgactagatcagttcagttggttgagtggtccagatctttcaaagtttagattctgtgcagagaactaatgaaaaagtctttggagctgacctgcttgatctgatcctcagccttgctcatctgtcacctccacaaccagtaggtcacccaaggtggctccatcattggtgagctgcatccaaggaatttattactaatcctaggtaaactatcatgttttgtgcctcattgatgtacaaattaggttggacaaaagactattcctaaaataacttcattctcacacacttgcattgcaatatgctctctgaagtagaggaggaaggcacaaagccttgctggtctatggatggcagcatcagcgtcacctggacacctgttagaaatgcagtttcaggccccactccagacctgctgaattagaatctctgggatggggcttaggaatctgttttaacaagctctccatgtgacacttaagcatgggtaagtttttgaagtaccacccaatgttgcagacaacctcatacctgtgaacatcatccctgacaaggtcgggatcctctggtctagaccccgccccttgcacagtgactgcaggggcatttgtttttctagtccttttgtatactcagtgttggcattatccattggtctttgttgtaggtcaagttcccagggaaacagactctgagattacctggtagaaagcttattgattgtgctctctggagcaatgcctgtaggatagagagggagaagtggggctatgatgcagcttcacaagtggcctcatccaatcttagagggagctctgcagctgggttggctgttcgaggcacattggtcagttgttggatgtgggctatccctgagggttgtaaccttgggtgaggcagctcagcacaggccagcacccagagacggacacatctgagaaatgtcagcagacaacagccctagctgctgggagaatgagtgagtgccctggttctaaagggggatccaagaggtgcaccacagccccatcg

SEQ ID NO: 105161 - DNA, 1047 bp, Homo sapiens
agctaatgtttgtatttttagttgagatggggtttcaccatgttggccaggagggtctcaatctctagaccttgtgatccgcccacctcggcctcccaaagtactgagattacaggcatgagccactgcgcccggcctggagctgttattctataaaaatattttgctacccagtttctttgcccaacaagactttcctactgtgtttaaacaggggatcagctatctaaattttaatataggcaccacttttcaggaatacttgcattgtataagatgagatctactttaggttagaacctgaggactgaacataggcattgctggtattggaagtgctcactggggggcgtctctgggttaagcagtgcatgtcagcatgtcaaccccctttacacctgtcatagatggggcattgcagggaagccctggcattggaaggtcataagtctatcctaagggctacgttctttttttgttttagatcaattctgaattctatactggctggctagatcactggggccaacctcactccacaatcaagaccgaagcagtggcttcctccctctatgatatacttgcccgtggggcgagtgtgaacttgtgagtgttcattgcctgaggggagggtgccctcagtagccatgggctcacagtgaagtaccgtgttcttttgtttccttgtaggtacatgtttataggtgggaccaattttgcctattggaatggtaagagcactttaatatctgtagaaacttatgctagaatgtttctgttgattaatttgaggaggggtgtgcccacagacaattttattttcctttttttgtttatcctctcctaaattttctttttttttctttttcttttttttttttttttgtagacagtctcactctgtcacccaggctggagtgcagtggtacaatctcaactcactgcagcctccacctcccaggttcaagggatcctcctgcctcagcctccaagtagctgggattatgggattacaggcatgcaccaccatgcctggctaagtttttg

SEQ ID NO: 105162 - DNA, 1053 bp, Homo sapiens
gcaatggaattaatggatacttttcctgttttcttttcatttttctagcatttctaccatgggaaggtattatttatgtgatgtttaaagtatctactttctattctagggaagaataccactacaatctgaacaccagtttggtgttttttgtttttcttatttctcagtggtgggagagggttaataggaggtaaacttttatggtgaattgttggtgttttttcttttagtcagttttgaggtctgagtgaaggaaatttttccagcagtcattaagccttgtcatcttagcagatgctcagatattttcccacacaaaagcttgcattagggtggctacattaggatctcctcatttttccctgctcttttttcactcacaggttgaaaatgaatatggcagctactttgcctgtgattttgactacctgcgcttcctgcagaagcgctttcgccaccatctgggggatgatgtggttctgtttaccactgatggagcacataaaacattcctgaaatgtggggccctgcagggcctctacaccacggtggactttggaacaggttggtgtttgtagtaacagaaattgcagcttaaaatcagctttttactcagtcagttgctctgggcagctgttgttataagtgtcatgggcagattgagatttttcatgttttcatttttcaaggaacaggtagaatagaatacttgcacccctcagtaacagagggttatctgtaggccaagagcttccagggtagctgcattttcagcactggtggagctagcctggaaaatggagtactgctatctcaggggctaggctggcccacccaagatgaagaagcaggtaggcatctccagctgtgagaagctctaccttgaggcagtcaccttttaggctgtgtctggggcgcgcttctctgctctttctgccctccctgtcctcccaccttggcaggacactcggggttatgccttggctgtagccaaccttgaggtcagccactggctgggaacttaccttatgctttgttgtctttctgcat

SEQ ID NO: 105163 - DNA, 1058 bp, Homo sapiens
tactggttaagctaataggaaccacattttcctacatgaagatatcaagtctgaaacttgggtgcgtctttgctctgcatggctgtgtcttcttcctttcttctggcctcaggtgcaaaccctcttttgatgccctctttttttcagtctctgcctctccttgaatcactttcaatttctgctcacaacttttctgccccttttggttttggaaatgccacaaaaagtataatcaagtattaattctgcaaaggagaatgaagttgactgtgtggagatatttcttcttgtgtccatccctagcaacctcagatgactttaacttgaccctgggtcctgccaggtgactctgtccccctcctcctcctcctctccccttcccatctccacatgcttgaatcccactaatcatttttgccccttgtttacaaaataaacaagtatagacataagaaagcagaaaaaacataattgttactcaaacctcaggagccatagcaaagctcttcacattttgggagtttccttgaatattttttatgccttttttttctgctttcttacagagtaagttcattctgtgtgacctattttctgtgtggctttttttgcttcattctttgtcatgagcactttttcatatcgttcaaaattctttcatcatctttcatggttgtcctacttaccttctgacgcacagttcctatacgtgttccttctgtctggaagccatcccagttgacatattggcttccgtaggactttcagaaccgtcactgtcgcctccttttgtgaagcacatgtgggagcagtttcatccctgacacactgtgtctctagtctcctggccttccacgcctctgcctggtagccatgagggcacatcatgcatttgtgcacatcacatacccaccgaacggctctggaatggaatagaagctgattgctttgataagaaggaaccgggggatttgtagacagtaattcttttcgttgttgttattgtttttgttttttgagacagagtctctctctgtcaccaggctgagtgcagtgat

SEQ ID NO: 105164 - DNA, 1652 bp, Homo sapiens
tcctgaggcccgggccctacatctgtgcagagtgggaaatggtgagtgtggctagactgggctctacctggtgtgtgtgagctggcaggcagcagctctggggcaaagggaattaaagcagacctgcattccagagagcatggggcctgggactgtacccagcacaggtgtcttttaccttgacaaggtgcccaggcagagaaacaggccagggtcagggcatgggctctcctcttggtggtcactcacatacctcagcttgctcatctgtaagaagcagttaatggtgtcttctctatctacgtcacagggtatttgtgaaattaaattgaaaaatctttatgaaaagggctttggtccttaaaacattgcattcatgcagagtgatcttaattgtcctacattccaatttctaatttctctgcaagttataaaccaaaaagcccagctcaaataccccttgtcccttgaagcttttattcttttccataactactaatagtaatttctatctcctctgagcacccttcacggaacagacattataatggcttgttttccctgaactagggaggattacctgcttggctgctagagaaagagtctattcttctccgctcctccgacccaggtaggttgttacagatgtcttgagaagatttataaaagcttcagcctaggtgcggtggctcacgcctgtaatcctgacactttgggaggctgaggcgggtggattacctgaggttgggagttcgagaccaggctggccaaaatggcaaaacctcgcccctactaaaaatacaaaaaattagctgggcatggtggtgggcgcctgtaatcccagctactcaggaggctgaggcagaaggattgcttgaaccctggaggcggaagttgcagtgaaccgagatcgtatcaatgcactatagcctgggtgacaaagcgtgactctgtctcaaaacaaacaaacaaacaaaaaagcttcaacaatttatatcaaaagggggaggtattttgaaggctggggtacctctgcacaaatacttttgaaagtttagtgaaagtctgagtgtttatcactgaccagtgcatagcaacaaactaaacctctaggaaattaggctttgaactacgtaaccagatcttactgataaactggtaattctttgaattggtattgaaccctgtttgcggttgaccaactgacttcagtgctttctcttcctatttacttagcatattccacagccaatgatagcacctcgctaatcaaaatgacaagtcaggcatggtgactcacacttgtaatctcagcactttgggaggccaaagtggagggattgcttgagcccaggagtttgataccagcctaggtaacatagcgagaccctatctctataaaaattagccaggtgtgctggcacatgcctgtagtccgggaggctgaggtgggaggattgcttgagcctgggaggttgagactgcagtgagccatgattgtaccactgcactccatcctgggcaacagagagggactttgtctcaaaaaaagaaataaggtcgggcgtagtggctcatgcctgtaatcccagcactttgggaggccgaggtgggtggatcacctgaggtcaggagttcgagaccagcctgac

SEQ ID NO: 105165 - DNA, 1156 bp, Homo sapiens
atatctaggatggggcgtcaggctctggagttttaatccattgctttttgccctgtattttacacttagaattttgttaatgggtcttggttatcccagtgacattgttgttgaggtgcatccagtgctcaggcaggtcacagcaacaatggcgtgtgtgcgtgcatgcgtgtgtgtgtgtgatgttccccagccccatgaacagcacagtggaatatcatctcagccactgattgtcagctcagtgctggcctctagaagctaagccttatggaatcctgcatgtggatcctcttagatgatttctcttacctgagtacccctggtggacctggcttagcaatggtttgtatgatagctcagaaaacaagcattaagtccatcagcacattatacaaattcaataggcagagagtcacttgctactctcaaaggatcggcttctgaaatgcagaaggtggaagttctcatgtgaccccatccttgctctgtagaatgccacccagaggatgtttgaaattgactatagccgggactccttcctcaaggatggccagccatttcgctacatctcaggaagcattcactactcccgtgtgccccgcttctactggaaggaccggctgctgaagatgaagatggctgggctgaacgccatccagacgtaagtaggagggcatgtggctctcacctaggcctgaacacccactctggagagaagatacaactgtatttctcagggtggctattttattgctcagaaatgggaaatggtccagtgtgatgttctgggaggggcttgtcatgagccggactggccctttttcaaataattaactacttcttccaatcttcaattttaatcatcagaaatcattaaataaatagcttaaaaaggaaaaggatgggggaagcaaacagaagtaacaatgattgagcacttaccagatacagggcactttatactaatgattccatttcctcgagataggtattattgttcctgtttatagctggtgaaactgaaatttgcccaaggccatatctttggtcagaggttcagctagtatttgaagggaagggaaggcatgcaggcagctgtagcacaggtatggctgtagtcatacaaaaagctaggttaacaggagaaaagcat

SEQ ID NO: 105166 - DNA, 1006 bp, Homo sapiens
cagctctacccttttccgaattctgccagtagttgcttggcctcctttctacctgtctaatgaatgttcccacctcatgggccacctttgaacttaggaaacttgtgaggaacacttatttgacacttagccatgtatatactatgagaatgttttcaagagcatccattgagacacctggtgtaagaaataatttttctatttttgtgagtttaggggacttttcctttgaacagaaattaaaaccttatttactagaagaataaagtgatgttaaattgacacttgcccttttaaaaatgattcttagttgtttgtgtttatttagctttattgagatgtaattcacttacagtgaagctctccatttgcccctatgaattcttctctgagttgtttaacttccgctcgccagttggatttcaggcatgtgtgatctaggactcatgctgccacagttgcttccaaatacagcttcaagggcaacccccaaagccaccatggactatgatgctactgtgactagagctagtattgtgacctttgaaagcctaaagatgcacaaggaatctgacccataatggaaagcactagttagttggcttcttaaaaccctggttctcttggctcctgtggcctgttgctgccttatccaccagagggcagtgttccactcggcttaacagtcgaacccccacccccaccacccgttgaggtcttgcctttcaaaatcctaacattttagctcctgaagtgaccccaaaacagtgtttcttaaaatcgtgcttggtagaaataaatcttacattgcaaccaaatatacatgcgtacatatacaactccacatatgtatatataacaaaagttttataaagtaatactttactatgtgtaatattctttctttctttctttcttccttccttccttccttccttccttccttccttccttccttccttccttccttccttccttccttctttctcgttctttcttttgacgg

SEQ ID NO: 105167 - DNA, 2467 bp, Homo sapiens
tcgctcttgctcattggctccctctacatttggcgcagcacagtgagcaacctctgccactccccagctgcagagtcaacctgttttcagctttggaaggtggtggttctggcatttctggccctggcccattccagtttctttaccatgttctttttagtggccgaagagccctatctcttttccttggcggcctactcctgcctgggtgcttacatcatcatgctcttcttcctcttcatcctcagcggcatggagcaggcctaccagctcttggcctggcgcagtggtagggtcgtgggcagccttgagaagacaaggaagctcgtgctcaggcctgccctggcagtgggagtgactgctgtgctcagcgtggccgggattctgaatgccgcgcagcccccggctgtgaaaactgtggaggtgcccatccatcagctgcctgcctcaatgaacaacctcaagatcgtgctcctctcagacattcacttgggccccacagtgggcaggaccaagatggaaatgtttgtgaggatggtgaatgtgctggaaccagacatcacggtgattgtgggtgacctctccgactcagaagcctcggtcctgcggacggctgtcgctcctctgggccagcttcattcacatctcggtgcctacttcgtcacaggcaatcatgagtactacacgtcagatgtcagcaactggtttgcacttctggaatccctgcatgtccagcctcttcataatgagaacgtgaagatttccgccacacgggcccaacgtggtggtggtggcagtggcagtgggagtgaggatgaggactggatctgcttggctggggtggacgatattgaagcagacatcctgcactactctggccatggcatggatcttgacaaggccctggagggctgcagcccagaccacacaatcatcttgctagctcaccagcccctggctgccaagagagctctccaggctcggccagatattaacctgatcctttctgggcacacacatgctgggcagatcttccccttgaacgtagcagcctatctcctgaatcccttctttgctggtctctaccaggtggcccaggctacattcgtgtatgtcagcccaggcacagcctactacgggatacccatgaggctgggtagcagggccgagatcacagagctcatcctgcagcggtctccctgaactggccctgccctgtgcacctctgccctgcccttgtcctcgaccctccatcctgcttcagagtggtttgcctgcttttcccctccagccttgcccactcatccttgcctacacacccttggtcacaagcctgactcaaacagtgacttatggtgggcctgcctggcatgttcaggctggtttaactatttccttggccagttgctttttttgatgcacttgtgagatcactaaggtcacatatattagcactcccctctattttccagatgatgtggaatggggaccttctcctgcagagctcccagggatgaacctcccctcggggttgctagaaaggcatacctctagaaggtggggcggggaggagcaggagcatttttctcctggtgttttaaaattgtctttaggacttaagtggtttccagaatcattgatccagagcctttctggggaaggggtagtgttgccaggtaatttgggagaacaggcaagatggaagggccctctggctgctagagaagaatattttcttttcctctgattctatcaggatcacctctattgagggcatcagcaaaatctactggaatgcaaagctcctcctgttccaggccttgagggatgctatttaactgtctgtgctcctgggcctttgggggcaaggtcaggggagaagaacggtgggcgccatggtcggtgatggtgagaacatggctgcttaggaattcagagggctttgcctcccttgtctcattttatacaacccttcggggagctcactggggacaggctgcttttccctatttggagataaggaaaccaaggcaaagagagatagggcacaggcagtatgacaagatatgtaggagatttggggctagaaaccaggtcttgtacctcccagtaaaagcggtgcttttgcccttttgccagaagcaatagatcctttgatcctgagatggagataagcacccgtgttagaaaaggcctcactgagaagacagggctgggctggtttcctgctgggtgatttaggcttgtgatggaaagtcttcctccaatggggagtgaagacactcgctctgactggagaggctaaccctgctgctcactcatagggcagcgttgggtgggtgactttccctcactcagccttggtttccatcaaccctaaaatggggataattatcgtatctacctcaagattgttttgtcaggagggatccatcaagccttgtgcatgagttccacatggcacagc

SEQ ID NO: 105168 - DNA, 2325 bp, Homo sapiens
ttggggcgccctcgctttcccagttggtgctctgcggagcgctccggaaggagaaaaatggggtcaggagaggcccttgcagtgggaacattgggttatttcccctctgggtgctctccctcttcgtgcatcttgttcctttctcaccactccccgtcgcctgccctttggcttgggtttttctttgtatttgtgggaccgttttccttcggcgtttgggggtccaggttgagggggggaataggcaggctgccgggggatgccatcgttgatcggggcagggctggcgaggcgaataggtgaggtgcggggcgtgcacagttggtgggagaggaaggacagcttcactcgctgcgtccgagctgaggcgactggctgaggggctccaaagcgctgcctggggaggtttgcatcacacctgcggaaaggagagtgggtagttgcaagctgctcctctgcacgttccgcggaccaactttggttcctccagggtgtaggtgggctgagcctgcagtatgctttaagtaagagctggtagcatttgacaccgttgacttgtaagttacaccctttaataacgctttcaataacgtgcctagggcagagaaaagtggtacatttatctacaaccaagattgaacatcttaagtatttggaaaacagctgctgaaaatgttttcattttgggaaaaagtcagcacagattatttgctgctccctcttcaccccgtctgtggttcccctaccccagtatgtagacagagttttcttgtccagaaggcccgtaggaccttaggagtcagagctagccagctgtgagaaccactggggaaggtggaactggggcacagttcaggagaacagtggcagggtaaggggctaggggaaaggcagatcttaaccagtatctgggagtgggggtagggagagagagaaggatttatgaaccaggaacaggtggacagggtcaatctgtctgatgtgagctcatcagtcttgtgcagcgtcattgggtcagggtggatgccctgtggctgccatacctgaggcccacacagggaggctggcatcaccccaggaattctcatttcaggtgcctaggtgtccctcttgggcttctgtgcccacagctaaagaaagataccagcagtctagctttccattatctccttgtttacatttctttagggttcacgccattctcctgcctcagcctcccgagtagctgggactacaggcgcccgccatcacacccgactaatttttttctttttttgtatttttagtagagacggggtttcaccatgttagccaggatggtctcgatctcctgacctcgtgacccagcggttctcaaattttaactaaattttagctgtcctagaaattaagagaatattcctttttttttttttttttttttttttgagacagagtctcgctcttttgcccaggctggagtgcagtggcacgatcttggctcactacaacttccacctcccaggttcaagtgattctcctgcctcagcctcccgagtagctgggattacatgcatccaccaccatgcctggctaatttttgaatttttagtagagacagggttttaccatgttggccaggctggtcttgaactcctgacctcaggtaatctgcctgcctcggcctcccaaagtgctggaattataggcgtcagccactgtgcccagccctagagaatattttaaactatttgttaagaaatactacatcattacacgttaataaacaatatatatatttgaaaaacaatagtatttctccccaaattttagggtgaagagttgcactgttttacatttctgcaaatctctttcaatgtctcttaatagaagacagtcaaattttcatgtttatttctgcattaaatctgttgccatatcacatgtcacatagcctctggaagactccaccccctcaggacagagtgagaatggaaaaggcagtaatggcttggaattataataaaaatagttttgactaattggacccctgaagggctctctccagaccacactttgaataccgctgatttggaatgtttttataaaacaagtacatgcttactgtagagaaactttaaacgtatagaacatgtggtaagaaaatgaaaactgcccatcatgtcacaatgctgtgagtttctttttgaataataaagtatagctagcaactgactggtatttgagtagcttggattcaaggtgggttgggcagatgtaagtggcctttgagttttgaatgggtacaaggacactctaatatcccacaaagctgatgctggttcc

SEQ ID NO: 105169 - DNA, 1039 bp, Homo sapiens
cacacaaatcgtcagacctccaccccagactttctgaatcagaaactctgggggcacagcccaggaatcttcgttttcacaaacctccaaacgaatataaagatcgtagattatatagaccgtagggccgatgtatataatctattagggccgcgtcggccttgcaggcgggtctccaagtgaatgagcggcagagtcccatcatgcgcatcagcctgcgtgaaccagtgcgcagcgcgcctttcccgggcaccctctaggtgctggcagctggcgcccagatcccccggctgggtggggaggggcggccggacggggcgggccggaggctggcgtccccgccccgaaagcactgggcccgccgcgtcgcaccgtcctctttcctttccttctccctccccttttcccttccttcgtcccttccttccttcctttcgccgggcgcgatggagccggggcgccggggggccgcggcgctgctagcgctgctgtgcgtggcctgcgcgctgcgcgccgggcgcgcccaatacgaacgctacagcttccgcagcttcccacgggacgagctgatgccgctcgagtcggcctaccggcacgcgctggacaagtacagcggcgagcactgggccgagagcgtgggctacctggagatcagcctgcggctgcaccgcttgctgcgcgacagcgaggccttctgccaccgcaactgcagcgccgcgccgcagcccgagcccgccgccggcctcgccagctatcccgagctgcgcctcttcgggggcctgctgcgccgcgcgcactgcctcaagcgctgcaagcagggcctgccagccttccgccagtcccagcccagccgcgaggtgctggcggacttccagcgccgcgagccctacaagttcctgcagttcgcttacttcaaggcaagtccgcctcgccccgtcccaggccccggccccgcccctgacccagcctccaggccctagccccgcccctgcgcccggggccgcgttgcccctccagttctagacctggctccctccca

SEQ ID NO: 105170 - DNA, 1110 bp, Homo sapiens
ttatcaattttaagtgtataatgcagtaagttttgacaaatacatccagtcctgtaactgccatcatagttacgacatagaatattttcatcacccctgaacaatttcctcttgtccttttgtagtcaagtttttgctgtaacccctgacttctggcagccactgatctgatctctgtcatagttttcccattttccttaattcagattattatcaagggcctgctactttttgaattgaactaaataagaaatgtacccatcataagcaaagtagaaaaatctagatataaagtaactcactgattgacttcttcaagggccagtgtggcttcttcagagctaatgagagctagcttggtggtggtcttggttccctttgagatttcatgactgtctcccttcacgcccaagagcgagcttcactggcttctccatgcctttcagagcctgttcatccgagcagtgcgggcatacaacggtgagaactggagaacatccatcacagacatggagctggcccttcccgacttcttcaaagccttttacgagtgtctcgcagcctgcgagggttccagggagatcaaggacttcaaggatttctacctttccatagcaggttggtggtaggtcaataggctcactactcccatggaatagtcttccttagatgtctggtttctgcctgcatgcctgctagatgcctggagcagcctctgaggaatttttgagcatacttattaacgggtaactgagggtagtcaccacctgcatagataaacctttgacttggcaggggcttctagtgaaatcactgagagaaggttcaagcacaggcctgccaaggtagaattctgtgtctgccctacttgcttacagatttcctacagtcattttgaaaaataaaaatgggcccaggagcacctcagtgactcacattactgagataactttgatgatggcaattttccaacacatataaaggtagaatgaacctttaagtggccatcactaaggtagctttttgaaattttcttttctgattataaaacaatgtgtgctcattataggaagtttggaaaacacagaaaggaaaaatgaagaaaggaag

SEQ ID NO: 105171 - DNA, 1016 bp, Homo sapiens
cctggtagtctcttttgcggatggaccatcatttaattcccttgataggcaaactcaccacttagcatgtgttgtcagtgaaccccattcattatatattactttcaaaagattttttctaattgatctttgctcttgtattttcattgggatttctatatgccatcttgattttcataagtttgtcttccactgagggctggccactcttttttaaaaattgagatataatttatataggatagaattcacctttttaaagtgtacaattcagtggttgttagtatattcagagttgtacagccattaccactatctaattttaaacattttcatcaccttagaaaaaaccccatatcctgttcctccctcctcccagttctaagatgaaaaggttggtcctataaactgttctctgttgtgtctgaacaggaagcagttcagttctttaatgtgaccacactccagaaggagctgtatgactttgctaaggaaaatataatggatgatgatgaggtaagttttcatgcttagcacatgtctggtggctacgagaaaatattactcacatctttgctagaatcactggaaggctgagtcctccctgaagtaagaaacagaggggaccttgagaaagacagttcctgtgggtgtttcagtgacagtcagaatgctggcatgggaaagagcggctttctaggaaacctaggcaggagtgccacatttcctgatagcgaaacgggtgtggggccacactccaggaattcacagtggtcattcttcatcttttcactttatataaaaacagtgaatttttaattgctcagcactctgaagagacatggatactcacaccccaatttttctgctagactattgctattattattttttctaaattgcatctttactgtaagcattttgtcattctctagaattgcttgaaattcctgattccaccttactcagctgaccccttttctgaccctgactcaactggttatggagtggtcatt

SEQ ID NO: 105172 - DNA, 1647 bp, Homo sapiens
agcagtatgtatgcaagcactcaatcattcatccttcaacacatgtattgagcaccttctgtgtgctggactctggggaagaaaaatcaacccagtcccctggtccttgagaagtttgggttctggtggtcaaggcagaaagggaacagatagaaaatgttcctgtgggagacctgcacacatgagaggggaggaaggggagtaggcagagatgcacacaggagggccacttagtagagctgttcacaggctgggctgtccgcctcacacagcatgttggcggatctcgcagagcacttgataccaagttcaaatggagtggaagccgaggtcccctccacagggagaaatcaggtcctctgggccccagaccagcagaaaaaacctgtttcagccaaagcagacagtggtgatggcctctcgggatactgtttctgctcatcagtacttttaaaagtccaatagcccatttaataaagttgtcctgttgtctcttacagggagaagttgtggaatatgtggatgacctcttggaactggaggagaccagctagcccacagcaaccaaagagacttcctcttggcgttcaggaaacacagattctttgtccttttcccaacagcccaggctgttgatacctcagagccttctctttactctccaaagtgaaagggaagcccccgtctctctaactgcatgtcatcaggggtgagcctgcctttcctatcttcacacctgccacctcatgttcacacctatctttctcaccttttttttgagatggagtctcgctctcttgcccaggctggagtgcaatggcacgttctcagctcactgcaacctccgcctcttgggttcaagcaattctgctgcatcagcctcccgagtacctgggattacaggcatgtgccaccacgcccggctaattttgtatttttagtagagacggggttttgccatgttggccaggctggtctcgaactcttgacttcagatgatccatctgccttggcctcccacagtgctgggattacaggcgtgagccaccatgcccggcctctttctcacctttacacctgtcttcttatcctcacatctgttttcacaccttcatccctgtcttcctcatgttcacacttgtcttccccatgttcatagctgcctttcttaccattttggtttgaagggcagtcttctctggcttgtttttttgtttttcccagaaaatcagtattattttttaaataagaaaaacattcctagaagatgataattgtgaaaacctcctttggcttatttgcttttccagattttagtctcctttctccccatccgggaaagatggtggaagacataggctaaatttctccagcctcacaatggtcttcacttggtctgacttgtaccaattctagcacccactgaaaaacaagttgagtagagagtgtagagtgcagaaatgtggcttttgccccactttgcatctccaaaattacaacggttggccgatcccatttgaggacaatgcttagttataagtctccgagttggaaaaggaagaaagccagagctgtctagtttcattcattctttcagtaaatatttattgagtacctactgtgtgctaggcattgacctgggaacta

SEQ ID NO: 105173 - DNA, 1046 bp, Homo sapiens
ggcgcacgctgggcagtggcctgggcaaccccaaacgcagccagagccctcacccgagtccgctggcccgcgcactcccggaccatgactgccgagggacccagcccgcctgcccgttggcacagacgcctccccgggctctgggcggcggcgctgctcctgctcggtctgccgcgcctttcggtgcgggcggatggtgagtgtgcgggaggcggcggggcggggggtggagcgtggggtccgggcagggagggcgtagctcgccggggctgctccctctgaccggcccggcaagcggcaagcgcaagcctgagaggaacgaacgagccgcggtcctgcgacccagcatccctctcctggcccaccaagtctccgcgtgcccgtgcgcccaaacgcccgcctggtgcctggaccctcccttagcgccgagcgcgtaggtcccgcagtcccgccgctggctttcctaaggtctccaagaaagctcgaatgaaatcacctctaaggtgccctagaacctcctctgctaaggggtgattttccgccgtccctcagtttctcaacgtctattaatgtgcccctgaggacaccgccgatggttagaaaactccctcggatattttggcttggtccgggaagacgtgaaagatgagtgggaatcagcgaggctaagagagagagaatggcctggccagagggaaaagcacgtgcaaaggctgtctctgagtgacaggaaaaacgggacaaatgataaagcaaagtacctggaggcgaggggacgtcttgagacatgaggtagagaagtgggcaagggccagattatggcaggttctctgagaattgatccacttcttgttcgtttgcttggtttttcagcctgaatttagcttgtaatacttgccctaaaatgagcaggattggagctctgtatccattcccttttgaaaagctaattcagctgtgttttcatattagaacaaaatcccgctgacttggtacaggagcatctgaaggaagcaagcttaaagccagcagttctcacacccatg

SEQ ID NO: 105174 - DNA, 1039 bp, Homo sapiens
tccatcgtgtaccattttggtagaccatggaaagcatttgtatttttttctttttcttttttctttttttttggacacagagtcttgctctgtcacccaggctggagtgcagtggcgcgatctccactcactgcaacctctgcctcccgtgttcaagtgattcttctgcctcagcctcccaagtagctgagactacaggcgcccgtcaccacacctggctaatttttgtgtttctagtagagatggggtttcaccatgtcagccaggctggtctcgaatttctgacctcaggtggtcctcccacctcggcctcccaaagtgctgggattacaggcgtgagccaccttgcccggcctgtatttttttttaagtgctatgagaagccactgaaaatgctgctattgtgtaggatgcaggagggaagacatggggtcatagtccacttgtgctgctataacaaaataccacaggactgtgtaatttataaacaaaagaaatttatttttcatagttctggaggctgggaagtctaagatcaatgggctggccgatttggtgtctggtgagggctgctctgcttccaagatggtgtcttgttgctgcatcctctggaggattgctgtgtcctcacctggcagaagggatgaaaaggcaaaaaggggctgaattcactccctcaggctctcttataagggcattaatcccattcatgaggacagagctctcacggcctactcccctccttgaggtcctcttcctaaaactgtcacattttatatgttttcatataaagtttgaaggggacacaaacattcaaatcatagcacatatggagatgaatttgggtgagacaatagtggttgtgaggtggagatgttgtagagtggatagattgagaatttaaggtggagtcaagaatatgtgataatggactggaagtgaggtgtgaggaaacagcggaatcagggacaattcctaggtttttgtcttaacaatcaaggggatagtagggactttcgctttgagaagactggggagt

SEQ ID NO: 105175 - DNA, 1037 bp, Homo sapiens
taacatcaggaaggtctgcatttggaaaatggttttgcttggatgtgtctgccataaaatcatagcaataaaaccctctgacttaattttttttaaagcattgcaatggtttattcaattttatgagtctaaaaggtaccaacacttactgatctgagttttaagtgtgtaaaacttttgagtagctatggtgtaacctgatttttaagatttcaaaataagcttgaaaaaaaatcacatccattttacatgcatccattcattacttctaattgattatactacagataacttaagccttagttctttctctttaaggttccccccagttttacgagaggcatggacataattagcttttttcctttagtaaaaatgtgttatgtgctgtagcatacaccagagcttctactttccaatcaggcaacacagactccgagctgcttttgtttttggtccctggaggtgtatatgacaagttgacagaaacaaaaaggtgaagaccctgctccacccagtatagagtcctcttttctttggtgtctcatggaaacctattaacatgccttccacataagtctctatatataaaactatcaggcattatgaattaatttgcagtacagtcactttgataaagttgctatttatcttcaaagtggaaaagtcctgctaatcaaaatggaattgtgaattaaagtaggccactggcttaagtatcaggtagaaaatcaacagcttattttttctgctcagtttgtgctaacactgatggtctttttgaggaatgctgagtatgccaagggtagaactttcgtacctaggtaggtaccaatctcttaagagatccaggtttctggcatggtcctagctgcattgagaccacttgtcatgtgttaactgacacaaggctttgatttgattgtttcacagcagaataaaggtgaaaactatcaccagagtaactgcaatccatacagaagtcttttacctgtaaatgcctttcccaatggagaatcaacagattgggtgatggt

SEQ ID NO: 105176 - DNA, 1057 bp, Homo sapiens
gcatttacaggtaaaagacttctgtatggattgcagttactctggtgatagttttcacctttattctgctgtgaaacaatcaaatcaaagccttgtgtcagttaacacatgacaagtggtctcaatgcagctaggaccatgccagaaacctggatctcttaagagattggtacctacctaggtacgaaagttctacccttggcatactcagcattcctcaaaaagaccatcagtgttagcacaaactgagcagaaaaaataagctgttgattttctacctgatacttaagccagtggcctactttaattcacaattccattttgattagcaggacttttccactttgaagataaatagcaactttatcaaagtgactgtactgcaaattaattcataatgcctgatagttttatatatagagacttatgtggaaggcatgttaataggtttccatgagacaccaaagaaaagaggactctatactgggtggagcagggtcttcacctttttgtttctgtcaacttgtcatatacacctccagggaccaaaaacaaaagcagctcggagtctgtgttgcctgattggaaagtagaagctctggtgtatgctacagcacataacacatttttactaaaggaaaaaagctaattatgtccatgcctctcgtaaaactggggggaaccttaaagagaaagaactaaggcttaagttatctgtagtataatcaattagaagtaatgaatggatgcatgtaaaatggatgtgattttttttcaagcttattttgaaatcttaaaaatcaggttacaccatagctactcaaaagttttacacacttaaaactcagatcagtaagtgttggtaccttttagactcataaaattgaataaaccattgcaatgctttaaaaaaaattaagtcagagggttttattgctatgattttatggcagacacatccaagcaaaaccattttccaaatgcagaccttcctgatgttatctgaaatctgataaaatgaccctactctctgctgtggttcattcttgctccatgc

SEQ ID NO: 105177 - DNA, 1585 bp, Homo sapiens
cggtttggaaatgaatgtagaaacttactgtgggcatttacctttctgtgccagtttggcttttattgcctgaaccttatgctgacctggagaggagatgggggacagtgctgttgtggggccagcagtgaatctgtatgcggagagttgtgttgtgctgatgtggccgttggtggtcaggtaagaggctcggcaccttcttggaagaaatcatgtctgagggtgtacgtttgatatgatcatgccagattggagaagatccaagccaggaagatgggcttgaagcaaactgcattatcaggagtaccttggtgagaggatcagtgtaaatcctaataggtacaaagacttttgtgttttggctttgtcacagatttattgaaaaacttttttgcttctgcttccatttttagcattttagtttctggttttcatttttggagattccttgccttttaaactcgtggtttttctctcattttcttccctctctccctccatctctgaccacccccaccctaaccccccacccccaccatcctattaaacatttttaaagccctaccccagacattggaaataggtgacccaagtagggggagaaagtattattgttgatagcttctgactaggtgttaagggatcttcattatgaacaagatgaatttttttctggaaacactagatgttatcaatcaaacactaaaatgtaccatacaaatcccttaagcctctcaaatattgagctttagtacaatcatggatagacattctggtgatgatttaggggctttttatacaccacatactagcttctttctctataagagtgcctctttcataaaaccaaatgcttgtctgctagcatacttttcaaagggaatccactgttttctcactttcctcccatatctccgtccttcatccaaaaccttcccagaatccatcagcaagcatgtttgaggcctgtggtgtaggggactgaattttttttttaacttctattccattttaattgtaggatatctttgtccatatacccaggtgtcctgatttgaatgtactatttgatcctcattgtgttcaggcaaaaaataggaaatgagtaattttgagtttgaaatctctcccagaagacaaactacttcagtgagtaaaagctttgacattttatgttttattcataaagggggttaattatttgctacaaagaagcacgatctattttcatcatcgatttgaaaatatctgtaactcctatagatcctataggcagagagttttcctttctgactttttccctttgctttcgtgtgaccacatgttttctgtaccagtcactggggaaagaagtgagtttatctcgtttgttttaaaagttttgcttgtctatttagcattcctttttgggtctcaagatttatggaacaataaatgtcatttaatgctgtgtgcttattttgaattcctcatcaggttttagaagcggggtaaaaatacttagatgcttatcagacttgaaattatactgagtggcattgaacgtgagtttgtcccagtgaaacaggctaaataaattttggca

SEQ ID NO: 105178 - DNA, 1037 bp, Homo sapiens
catgaaactatattcattgaataaaaatatgaagaaaaattcaaacctcaaatctttttgtccagggatttctgttaatgtttattaaattatatttgtggatataaataatgtattcttacgttttagattggtagttcaagatttcaaggtagtaagatgggggaaagaaatagtttattcccatttaaaatgtttttttacttttttggtactttgaaaggtgtgaccttcgtacagatcctacagatcaggcagaaaacagatcaaagattactgttaaaatgcttttctttttttttttttaatttcagtttatcatgcaatctacttggaagaaatgattgcctcagaagttgctcgaaaacttgcgctggtgtttaatatccctctccaccaaattaatcaggtttacagacagggtcccaccggtattcacattcttgttagtgatcaggtaaatcaaatcatttgtttttccttttcagactggtatttacttttatacatgtaattgtagaactgtagaaaaattctgtgacctcttttgaaaatacttatgagaatcattttcagagagttgggaatcactttggaagaacttataaccaagagtttcaggcatcctagtgataatatggaatacaagccaaggaaaactggcttagcctccccccagccctttaggatgcagccaatcactggggcactctagggatagtggcaggctttggccctttttatgaggtgagtcactggatgtgttttccttttgtctattatttgatgactaatttaaaaaaacatgtaagatatataatttttcccctagtgattggtggcaagtaataatagaagagcactttatgcaatttttgttcgagtcatcatccactggagccggcagggaatgtgcccctgtgggtcacatgggtgactgaccaggtctctcagggaccattatggacaggcatagtgaacacaaggcagtgcagcacgtgtgcatctttgctgcctcacactgccttcatgaatta

SEQ ID NO: 105179 - DNA, 3699 bp, Homo sapiens
aagtggctatttatcatatggaagtcaagccttcatcccaaagttcatcttaattcccccaataaactgtatcctgggtgttagagaataaaacaaaagattatggatacattcagacattaaaaagtagagagaatatgatgaactcccatgcagccatctcctaccttcaaaaactaccagcatttggtcagtcttgctctccactatttcctctcctgccttctgttgtatttcaaagcaaatcctagatgccatatcatttatgcttgaaatactgaatagtagttcatggtgtgtatgtactcaggtatggcttttttatacttatatgtaagtttttttttcttgtatggtaagcgaagggagtgttcagatagaatttttaaaagtgtcaaacactgcttctctaggtggtgctataggaaacctgtatagagagacatttacacttgtaaatgacatcgtaagtaggatgtgcttgggggaaatcttagggtataatgtgtgattctctgccattcttctgttaaaattagctgctgtgacagagttgtttatgttataaaatttaacatgtttgactttacattgcacgtttcagaataaagaggcccagtcctagttcggctaccaactcttacagactttaggcaagtcccacaaactctggacttccatttccttttttttaaaattaaagattgactggcccgggtgatctcagggtttgtttctgtggggtgggttagaatcatgtttcttcacatagccacaacccagtcactaaataaggtagatgagtgaaatcctatatcgggaagagttctttaggccctgctctcattgatttgattcatcagcctcaggacttctaagctccttcttgatacaggacatggaaaagccagcattttccttggctctgaaggacaggtgtctgtttgtcttcttatattgttcatgtgtatgtgtgtattcaggatatctgattattttgaaggacattggactgcatgaagacagatgcctgtaaagcagttctgttctttttccatttatttgagaaaaatatttttgctcttctctaggtgccgacttattaaaactgacaaaggaggatttagttcaaatttgtggtgcagccgatggaattcggctctataattcactgaagtcaaggtaaaatactgtgaactgttttgcttgaaataagaatgtacctttcttcgcgtggggaatttgggcagaatgtgtttccacgctaggttggcgtgtgtgcctgtgtgcgccatcgagcattggcagcattgtgctcacaagaagactgttttgtgtacaccttcagggcaggcccagatatgatgcaggcactgatgagggcagaggtagactgtaagactggtagaaatgcacatgggcagtactgatttcttgaagacgactgggtttgttgccaagaaaacaaaacttctaatttaggtgagctatacagaatctatggttttcaaggtcatgactattactaaacagttattaaaaatgtaaactaattgtgaattaaaatgacagaaactgtaaattgtgctggcttgtaagaaccatttactatcattgctctttctatacttgtggtgtgagaattccattaaaattgaatcttactgatttttaatttgctgacttaatcttgaaacttaaatttaccagcatctgacagaccatctcaatggtttagagtctggatcatcatattagaccacctgtgatagttggtgtgaggtgtgtggtttttatatttttattagtaaattactttgtataacgaaataacattataaagttctcataaggaaatagaacttagattcctgtagttgtcatatttgtacatgtgtaaggcagctttctctcccaggctcatcagtggcatcttctgattgcaggtcggttagaccccgtttaaccatctatgtctgccgggagcagccaagcagcacagtgctgcaagggcagcagcaagctgcaagcagtgcaagcgagaatggcagtggggcaccctatggtaggtattgagggcatctcaattctgtcacttctgagactgtcagacagaaacggaaaggactcgattgagcaggctttggagaactcttgctgtgttaggaatgccaagttgctcatgtgggagccttgacagcaatgagaggtggcagctctagggtgaagtccttgggagaagaggaaactggcattctttctcagtcattgcagccacactatgggtctgtttttcatgtggcccttcatgccggaaatatctaacaagtggaaaaactagcttgaatgcattgagttctggcttttttttttttttggtcagatttactgaaatgatgaatataacactggcagcttaacaaaaaagcaggagggtttttctttcctttttctttttttttttttttttttttttcaattttcctgactaggtatggggagaactcttaaagcataacatatgtgcaacagtgcctgcatgtaatagtcctaagtgtgtggacttgtcactgacaagtgttcggccagcattgtgcaccttgtgtggcgcgtctggtgccgtgtttttatgtcactgtaaataatactacccagtacgttatcttgggagggcttctcatcctgagcatttaattgtacggtatagtgctggattaggacagagataatcttggcttctccctcttctcacctctaaatatggcccttaaaaaaagcaagcattttaaaaggcatatattttctcatttattgtatggatatatggtaacatttccttctttccatactctgaagtagaacaaaggcaacatgctcagaactttaaaaaaaaaaagatgtgttaatggcattcagagatgcagttatttgccctaagaataggtagagctctgaaaaatgtcttgtggtttgaattttactgaaaaattggaaggatagcatcactactgtgaacttttctatttggtattattttgacttcaaaagctctgaattttgagattaagtatacaaattcttaaaggataaaaatttaaaggagatctccatgtatcatcaagagcttatacatcacttagatatggccaagattataatattttggaaggtgtattctcaaacatgagtgtttgtggagggatatggggaaatattggatattttcccataatcagcaaactttttctgtaaaaggtcaggtagtaaatatttccatctctttagatcatacatagggtctctcacattcaactctgtgattgtagtgctaaaatagccatagacaatatgtaaattgtagataaggctgttccagtaaaactttatttaaaaaaaaaaaaaaaaaaaacaagtggagggcaggaattggcccatatgggctgtggtttggtgacacctgctctagatcatttctatattcttactgtaattttagttccagcttcttttatgtaatggaaaattctgggtttctatactcacagaccccttgtttggggaagcaaagttctcagtaatgatattcctgatccatgtctggctttaatcagtaattgagcaggacgtacaagagtgagactcactacagatgtgcactgtgcagatgtctgctgataagttctgtgtagcaaaaatgca

SEQ ID NO: 105180 - DNA, 1694 bp, Homo sapiens
cctttaatccagttcttctcatcctctctcttatccctcacccattcttcccggtctctgttacctatttttccactctctcccttcatgtgttcaaatttttttagttcccacatataagtgagaatataagtctttctgtgcctggcttatttcacttaagacaatgaaatgttcatgttgtccatgttgctgcaaaaggtgatttcattagcagcggcatgatttttctctttttttatggctgaatagcatcccattgtgtatcatgtttaagtttctgacaagggcctgcatcatttgggttgctggagtcagactcatgctctttttgggtgttttttacttcagactccgaggctttctgtgttttgtttaaatgttctaagtctgaatggttccttttatttatgttcattttcattgttaatagcaaattcagccttcagctacgatccaggaaacacagcaatggctgctcaaaaacagattctcttcctacacaagactgttctctaatttttcaggtatgtgtatgtgtgtgtgtatctgtgcatgagaatgttttgtttttgtttctgtgcttttattaactttatatttttaaaattttgaaataactatggataggaagttgcaaagaaaaatgtacagagaagttctttatatctatcccccaataggaatatcttgtatttttattatatgctattgaagccaggcagttgacattggttcagtcagcagttttaccagacttacgtgacctcatttgtgtgtaggtgtatatagttttacatgatttttttcattttaactttattttgaaataatttttgttttacagtaagttacagagctagtacagtgatatttcggtgtactcttcactccgtttctcacataattatagtacaatagcaaaaccaggaaactgacattggcacaacgtatgttatggtatagatatttgtaaccaccaccacaattaagatgacaggattgtgccatcactacaaggatctccctcctgctaccccttcggagtcacacccacacccttcccccaccatccctagtccttggcaaccactttacattctgtctataattttgtcattttgagaatgttatataaatgcaatcatatagtatatagccttttgagattggctttttttcactagcataacggccacctaagttgttgtgtttatcagtagtttaatcctttttactgctaagtagtgtttcatagtctgagtgtactcaattacagtttttatatacttatgggtaagttttttttcttgcacagtaagctaagggaatgttaagaaggaattttaaaaggtatcaagcactgcttctccaggtagtgctataggaaacctgtttagagggacagtaatagataatgacaggtggggcagaggtagcatttcccaaatatatttggctctgggactcttttccaacatgaccacctagtaacatggcctggccaaacatcctgagaagtgctggatcacagtaaagtggtagttagcattccttcacctgcagtgcagtagggccattaaaacacaactttgtgaatccctttaagaggacagaacttgtgtgtgcacacactcagcctgaagaaaagcttgattttgctaagaacatggtttcttactatgccacgtatt

SEQ ID NO: 105181 - DNA, 1891 bp, Homo sapiens
acaatggcacgatctcggctcactgcaacccccgcctcccaggttcaagcgattctcctgcctcagcctcctgagtagctgggattacaggcacacgccactacgcccagctaagtttttgtatttttagtagagacggggtgtcaccatgttagccaggatggtctcaatctcctgacctcatgatccacccacctcagcctcccagagtgctgggattacaggcgtgagccaccgcgcccggcctcattatatttattttattgtttttattttttggtagaaacagggtctcactgtgttgcccaggctggtcttgaactcctgggctcaagctatcctgggctatcctgggctaccgccttggcctcccaaagcactgagattaggggcatgagtcaccgtgtccagcctgggacagtcttaaaccccagggctatagttagatgtgatgcctttcttgtgtaaaatgagagaaggatgattatgaaaggggacccttgaaactgagtcctcagatccattggtttttagaaagaatacctgtaaagtgaaatcacaccatgtgatgtctgtatctcaagtctgaagacttgtatttgagattactctggcatgcttagcatgcttttgactgactttttcaacctcctaattgtaatagtgtatctccgtgtctttgttctgtttctggtcagaattttgcctggagctgaaaaatattaaagttcaccataacccttccagaaaatataaaagaaagaaagaaggaaagatagatagatagatagacagacagacagacagacagacagacagacagacagacagatagattagatagacagaccagacagacagacagatagatagatagatagatagatagagatagatgtagtactgtacacagttgatgtattttgatgctgggcctgtctggtctgtcttgaggattattaacctttagaggtatcagagaagcaaatgggtactggtgaggctgctcattagggaagagggcaaaaggagcactagctaggtcagagccatgtttcaggtcaccatgtgatgtcagatgttgcttataaatcctttcttgtcttcgccattcttaaatcttgataggtgcctgttgggaaactgataaagaggatactggtaaagagggaggagaaagctcttcaaagcaattatacttaagcatatattttaaatgcctttataaatttttgctgctgtcatcactttaggtcttctctaagattaatcagtgtctagacgcacacagcaggtaaaacttttctttgccacacagaagtaaatttgacatgtgtctgtgaggttgcttgataaatgtcagctgtctcgcattttataatcttgcatttggttagtgagtgaattacaaaaatatttcttccacatattttaaaagcatatcactaatttatttctgtttctgtccttagtgttctccgtggcccgatgcccccacagcctatgtgaataacagcccttccccagcgcccactttcacctccccacagcagagcacttgcagtgtcccagacaggtatctagtttgtgtgatcgtgtgcctgcagctaactaatgctcatgtgccttcatttccccatctctccatgtacagcagccttttgtttgtattgtacctaaaggaaacagtaaggggaagtatcctgtatcttggtggcagaggacaatcattgtcttttcttcacctaccagccttttttactccgagccccttgtgccttaacatagtcacaactatggtaattgtagacaaggcgccattttcaagacatagccaagatatattctttgtaagattaaagacaacattaacagtgtctataggtagaga

SEQ ID NO: 105182 - DNA, 1046 bp, Homo sapiens
tgaggtgacagtgtgtgatacccatgattagatttgctagtcagctcacagggtcttgggttcatcaaacagtgtaaactgaggaggtgatactttgtaaggtggaaagaaaaacaagggtctagttttttagttatttatttatttttttgagatgggctttcactgtattgccaaggctgacctcaatctcctcaagcagtcctcctgcctcagacttctgagtagttggaccacaggtgtgtgtgtgccatcacacctggcttaaaaggccctaattttaaaagaatgggcattgttgtgtaaaatgtaatttatagcaaagttgctatgccatgcaataagtttattcaaagctctccagctaaattagatttcttttttgaaagctgactgataatagaagtaataagtctgcaatcatttttcttttttaaggagatacataattgggtagttgagattattttccatgtatccattgcttttgatggatgtcagacaagcgttttaagcccctgtagccattggtgagacttaatttctgccctcagtgtgcttcacagtttcttagctccattacaccagtggtcttgacacttacctactcaaaataatttttaaatttttttagagacagtgtcttgcccagtcacctgggcctggagtgcagtagtgtgatcaaagttcactgcaacctcaaactccttggctcaagtgatccaagacacttgagacaggttctcgctgtgttcctcaggctgatccccaactcctggcctcagaatgatcctcccaccttggcctccgaaagtgctgggattataggcatgagccaccatacctggcctcaaaagaattttgaaaaaggatatacttgcacctttccagattgacatctgaaagttttcatcataaagttttttcatcataaatttaaatagctgcaaaggaggcaatgttctggcgtggtggtgatttgcgtttacaatttaagataaaactgtgacattactcttgaagtgcatcctatggaatctaaatgc

SEQ ID NO: 105183 - DNA, 1024 bp, Homo sapiens
cacctagacctgggccgcccccaatatgcagtcagggggcatctggttgaatatgtgctttgtccagttaagtatagcaaatctttattttatgacatgactcttcatctattagtccacaaacgatgatcctgctttgcaaacttagatcagctacataccttcagtaaatataaacacagaacattaaagaatcatttaaaataattgtcatcatatgtattcgtgactgctgtattcactgttgcagtctttgcactattaaagtaccagaggatttttcattcttacacatatcgcaattgctgtggttaaatgtagactttgaatgttactgtcacaagcactatcacaagaaactcatttccaattatagtatcgaataaaaatgttttaatgcttctctatgcaatgaaactgaaattgtactcatcctagtgccactggaagcacacgttacattttctttaactgggcttttttttttttttttaaataaattcgaatcaaagattgttaaaacagctgtatattctttcctaaaacacccgccccagcaattttgtttttatcctcttctgatttctcagctgaagacccaccaatggttcttagtaaacttctttgggggggattctggcaactcacttttcctctcctgttataaaccatttaactaataaagaagtaggttctggtaattcctaaataaaagaaattcattatagcccagaggtaatctgaagatgggaaaactgttggtaaattcttaatgattcttaagtctaaagtatgcaaaacgtcagcagttcactggcctgggatttcacatcttcctcatgtattgcttactgccctggctgtatttgattttgttcagatgcttttaggggtggttagagctcatcttgaaaacctgtttttaaaaatgcagggtacagattgtcacttaaaaaggaaagtttgcagaatttcatatgtttcttcaaactcctacaaaggaaggccaacatttcatagagtt

SEQ ID NO: 105184 - DNA, 1109 bp, Homo sapiens
gaaaaagaaaagtatcagccgtcctatgataccacaatcctcacagaggtaatgtagtaaagcatttggttttggaagagaagcaaaggttgcatattagtctatttctaagatgagttctgctacaaaagggttggggaagattgggtggcagtttgacatgttattctctgtgaaatttctggggaaaatatttaaatttggggattttgatagactgtttcctgggtgggatcttaaatgaagatgctgaaatcccaatgaggtcttagaaacagaccttaaaaactttgaagttggcaagagacttaagttggagcctagaaagtccaatttttgtcactgctggggttttgcattttttttaactttgaatcctgttagtcatgcatttgtttaattggactgaagagacatgaaacagggtgttagatctttctttgtataatgaaaagacattgatcccaatctttggtgtttgtccagatgaggcttgagcctataattgaagatgcagttgaacatgagcagaaaaagtccagcaagcggactttgccagcagactacggtgattctctggcaaagcgaggcagtgtaagggacttctgcttctcttttcattgtgcaagaaaccttgtgcagtgttagatataggaccaacttccaccgcaaagtaaagccaaaattgtttttgatgtccatgtcttgatttaatttgcttttgtttagacttcctgcttctgtttgttcctcactgaggaaaatttcctaaatctaacactttaaaacaaagcaaaaaacaatgttgaccatattgggtggttttggagggaaaaaaagacactcagagatatgtattccctccctgactccttcccttcctccttccctccctctctccttcacacacacacctccttcaagagcactgaaattaattgaaaatactttctttagtaaattagctattatttttgtgtaactgaaaagggtcttgctttctcatgtgtatacttgataaaattttgtggacagttagatgatggcagcaagcttgacattaacacgtgcagttctttgttacatttttctgcatgtagtataaaaat

SEQ ID NO: 105185 - DNA, 3126 bp, Homo sapiens
gtttctctgtctccatcttttcatttttaataactcctgtgtgcatctggtattttctttataggaatgtaattcttgctcattaattttagtgggaagaaccttaattttgaattgcaataacaaatcattttataaaatcaatacctaagttaccattttatttataattttagtttttgagttataattctttgcaccaaataattgtaccgtaatccaggtatccaagggcaaaagagttcacttacagaatgtttaaaacagaatctagttgtatgtgttctactgctacaggttaacacataagaagtagaaatggtcctgcattttagctggagcagtttaaaagtactcattttccgcacttattccacagagcatcataagggttgtattccatgacagacggctacaatacacagagcatcagcaacttgaaggatggaagtggaatcgcccaggagacagacttcttgatttaggtacaggcagtgatcaaaagaccatggagatgagggtattgtttagctatagccagtaatgtgttgtgttggcatcatgaattacttgtgtggggaaagttttggtgtttgtggattttgtgtcttttttttttttttttgagacagagccttgctctctcgcccaggataagtgcagtggcacagtcttggctcactgcaacctctacctcccgtcttcaagtgattttcctgccttagcctcccaagtagctaggattgcaggtgcgcgccaccatgcccctctaggatcttgtgtcttgagagttgttttctatatatacatacgcacacacatacatatatatgtatgtatgtatatacattattttctttttatttttttcccatcctcgtattataaagaaccgagagagttgttttatagttaaaacgtcaagtagctttttggtgctaaactaatgtgaacctggaattttatgattttgaaaccgtttaattgtaaaccatctatcttttttttttttttttttttgagacggagtttcgctctgttgcccaggctggagtgcagtggcgcgatcttggctcactgcaacctccgcctcctgggttcaagtgattcttgtgcctcagccttttgagtagctgggactacaggcacgcgccactgcgtctggctaatttttgtatttttagtagagacggggtttcaccatgttcgccaggctggtctcaaactcctgacctcgggttatccacctgccttggcctcccaaagtgctgggattacgtgagccaccacgctcagccttatcatattcttaaaaaaaatgaaatacaaaccatggtaggggaaacgatgatattcgtttagggtgggtttcgatgttgaagaagttgatcatggagaccattgaaagacagagttcaaagcagttacagttatttcattagaacataatatagtaagttgtaagttttttaagttatttaaagtggatgtttttatgtaacttctttttaaaacatagatattccaatgtctgtgggaataattgacacaaggacgaatccaagccagttaaatgcggttgaatttctgtgggacccagcaaaacgcacctctgctttcattcaggtttggatttttacattattagaagcttactaacctagttatttaggtcatggtaggattgaatttttgatacagtatcatttcctttaaatgtctatttataaactatgttgtagtgtctttctatatacatagttaggtttaatctagtaagttcaccctattttaaactaacatatatgaagacattctatgatatgtaaagcattattcaaatgttatttttaccactagtagtcccaataatgaaaatgtctatttttcatgagatgtatttctcttgaacacaagctgctatttaaaaggatacgattgaaaaaagattgaggttttaaaattccttctagcattatttttaaaacattctaatactgaaaaattcaaacctctacaaataggataataatgatgactaattgtccatgtaaccatcacctggctttagcagtttttagtagtttccgcccccttttagttattcttggagcacttttttttttttttttttgagatggagtttcattctgtcacccaggctggaatacagtggcatgatctcggctcactgcaatctccgcctcccagattcaagctcttctcatctctcagcctcctgagtagctgggattacaggtgtgcaccacaatgcctggctgatttttgtatttttagtagagatgggggtttcaccatattggccagactggtcttgagctcctgacctcaagtgatctacctgccttgtcctcctaaagtgctgggattacaggtgtgagccactgtgcccagcctgttagagtactttaaagcaagtttcaggcataccatttcatccataaatatcatgtctctaagagatgagttttaaaaagtaactataatatcattattctgtgtttaaaaaaaatagtgattctaatacccacaatgttcaaatttgtatgtggtggaatttaaactaccaggtaggtaatatatagaaaaggaaaaccacttacttgctgaccagccttcataagctatgctttgcatgaactgtaaaaaatcatttgtattttgcattttggtattctaccaatattattctccatcagttaatccctgggggcatggtttatatccgttgaatattgatgtaaactcatactgttggtgtttgtctataaggcaactagttatgtagtaaatcaaagtgatacaagacctggctttacatatcaggttgtgttgtcatattgcagagatcagttttaatagtgagtcattagaagagggggatgtgcagcagtcagaaatgaccaaggtcttgctgttaactctgtgtgaaaccctaaggctgtcatccagggtgggtattaggagacagggcaggagtggtggaagatgagtattgccctctggatcctgaatggactttgaagagttgaccaaagagtttagatggatacagaataggatgggtagtgggttttctggactgtaaaatttccccaggcaaag

SEQ ID NO: 105186 - DNA, 1338 bp, Homo sapiens
gaatatctgtgttttctaataaacactaaaagtggaaacaacccaaatatccatcagctgatgaatggataaacaaaatttggtttagtctttacacagtggaatagtattaggcaataaaaaggaatgaatattatttggcaataaaaaggactgatatatactacatatgggtgaaccttgaaaacattatgctaagtttaaaaagcaaggcacaaatacccacatattgtatgattctgtttatgaaagtatccagagtgggcaaatcgtagaggcagaaagtggattggtgatcgctagcagttggccaggtggggggtgggggagggatgggaagtgactaatagaggtttcttcttaggatgatgcgagtgttctaaaactggtagtggtgatggttgcacaactctgactatactgaaaaccaatgatttacacactttttaaaaatgtgaattttatggtatgtaaactatatctcagaaaagctgttacaaaaattagtcttaggtaatgcaagcataataaaagtttagtgtaagagagtggcagatgaagataaattgacagagaaactcttgtctcctgtaataatgttagaacagaaggttggtgtgattttcagggaagagaaggatcaacctgaatttgcttccgtagcaaattaacaaactatcattgtgtaatgtatgttctgagaaacatgcattttgaattatgttaagcaaagtgatgttctttataaggattgttttttatacacaatttctttaaataggtcagtcatatgaaattcggatgctggataatcggaaaatgggtgatatgcctgagatcaatggaaaattagtaaaggtaaggacagtccattttaattcccaatggatattgctgtgattgaatgagtttttgtttaaaaaaaaattaatttcacttcaataattgttgtattacaactttttaactttatgagctatattttgtttattcacctgtaaaatgggaattatagcagttattgggtagagtaattttgaaagacccttggaaatcaaggagcaatagaaaagttagttgtagttatggggtaaaaaactcatcaccacaacaaaaacctataagcctctctaaaagtaaaagataatatggggaagaatgtcaatgttggcataaaactttaaaaaatcctttaccttgtaaagtttcatttaaaaaatagaaatctctgttcaccctactcatgtatctgaatgaagaagtcagtcatcctaggtataggaggcatagctgttttccagctaacctgttcttttaggatgtatcctcagaaccatc

SEQ ID NO: 105187 - DNA, 1621 bp, Homo sapiens
cctataatcccagcactttgggaggctgaggcgggcggatcacttgaggccaggagtttgagactagtctggcctacatggcgaaaccctgtctctactaaaaatacaattacctgggtgtggtggcacatgcctctaatcccagctacttgggaggcggaagcatgagaatgacttgagcccaggagtcagaggttgtggtgagccaagataccaccactgcactccagcctgggtgacaaagtgagactttgtctccaataaaataagtaaaataaagttaaacagagttaccatgtgatccagtaattccagttccaggtgtatacttagcagaatttatctacacaaaaacatagaaaagtgttcatagcagcatgattcataattgctaaaaaatggaaaccacccagatggccatcatctgaatggatacagaatacggtatgcctatacaatggaatggagccattaaaaagaatgaagcattggtacatgttagaacacggatggtccatgaaacatgctaagtgaaagaagccagtcacaaaagaccacatagtcatatgattccatttaaatgtcccaaatagcaaatccgtagagatagaaaacaaatcagtgggtgccaggggctgagtgggtctgggatagtatggtgagtgactactaatgggtatgggatttctttttgaggggagaaaatattttggaattcaagaattagatactgatgatgtgaatatacttaaaaccactgaatttcagactttaaaagggtgactttatgatatgtaaattatatttcaataaagctgttaaaaccaaacaacatccaataaaaacagtgtcccagaagacccctcatcattctcccaatcagtgccccaggttattcttagggggagaatagcagctgctgcgactgctgctgctcctgtttacctctcagtaggagccattgttttagattaggcatgaagcttcatgttcttaacacttgccaaggcacagcagggaactttttgtaaaaccccattttaatcagatgcttctttgtaattctatggtgtcaagtgtgacctacctttggcagcagtattatttcttgcctttcaaatcaagtagctaggtactcttgacttgctttttttttatagaaagaatctggaccttaaagttttaaaagaagtttttaaagtgctatatatatatatatatatatatatatatatatatatatatattcagagctgccctgccgccctcccccacttcccaccccgagataggggttgttaatgccatcctttagatgaaccacatagcattcatagttcttttattctacatataatttctgatcttaaaaaaaaaactatccctaaatgtttatatgcttttaaatatttcagacaagattgggtgcattcaggatgatatggctgtagacaaatatttcaaacccaaagtaaggtcagtgttgattttttgcttttcagtgatgtcttggcattgcccattttcaagcaggaagattccagccttccattggatggtgaaacagagcacccaccctttcagtatgtgatgtgtgctgcaacgtcaccagcagtaaaac

SEQ ID NO: 105188 - DNA, 1743 bp, Homo sapiens
ttttccttataagtgatttacaagtcccattggagctagaatacactgtacgaaaaggcagcacttatattgggagaatactgtctagcgttttgggatcagttcctactttgttgtcctacattatgatcttttctggctgcagattttaatcacttgatgttagtaaattataattgaaagagcagcggtgggagtagcactgtgacttcgttttgttcttttgattgtctcaaagtgaagtttctcattttggagactaccctctcaggctgtttcctcttgagggttttaagatgcagtgattgcaccacaaataattgtttagtctctgctgtctgtaccagcagtcattcattttaatatggagagattgaaacagatctgagcttagtctccgccctttatcctttttaactgttaggaatttggaaactctgtatttttttagtggctttattgaaatatagtttaccatagcgttgacttgactaataaagtctaaaaatcagtggtttggcagcttttcaataatgtgaattaagtgtagctttctgttctttagaaaatgtctgatgttttggaagtgctctacagtttcccagtagcattcatacatcttactgcagctctagaggaggacttctgggttaaagctggcctggaatcttggtggctgctccttgaagtaattgggtctttaaatcttaaggagaaattctgagccataaagaactctcagaaaggttggagacatttcttggagtgtggaagtgagtagtggaaggcatattaaacctggagttccccagcgtctggctctgatttggtctctgttgggcttcctgaacttggcacctcttctctctgcagttgtataacttaaggcctgtagatgagttggcttattttctaaaacagctgtttcagttgttgaggaaattgagctactgaaagtcatggagtcaccccagaggggagtattagaggcagtgcttctctagtgaaaacgcactcctctagtgccattctgctccttagctctctactggaaacacgaggcttatagtcaaggcaaaggaggcacgtgaagcaagttcaatatgtgtctctcctcagttgcttctcttttatggtaaaatgaaagtttgctgctgaaaagtttacttattgatagctattttgagcttttacttttttctagggttttatttgacctgtactttgatttagtgattcagccaacttattaatgtaataacttctgtgtatggtttatttccatgaaaaggaagtacaatcttgatgattttaaacctttccctgaccatgtatttttaaagtaatgtgtgagatctttgtaattctgtgtaacctacagtactctttacagggataattttcccttgaattcttttttggttgtgtcatttaatctaaattttcaaagaagtttgaaggtaattaccatttttaagaaggtttttttttcgtatttaattgagtcctcaaaaactaagagatgagagtgcttgcctcttgcaaattcaaggccctttgtttgaaattctcaaactaaggaaattccaaaattgactcgataaggagaaaatctgaagaaggcgttagctgctgcaggcctccctggactgcagttgtactttccatgcctggccctggagccctgagagggttggagtgcctatgaatggccagcttgagcattcagtcacttcctctggc

SEQ ID NO: 105189 - DNA, 1380 bp, Homo sapiens
gatctatagtttgaaaactaaaacctcaaagacagatgttacagaatcagccagttctgtaaaactgatattgtctattggttattgatcttgccatctttatttaaaaccatgtcccttctatgatcccttaagaaagctgcaccaaatcatctgcctgttttttcttgatacttactgaaatagaaggttttattgcagggtttattttggtttgtttatatctttgttgtgaatgatgcttttttgtatttattaatatcaaattcacttatgaataaacttgataatggaaacggacaaaaaaaatcaagtgcgtgtgtgtccttgaccgtcttctgtttctcacgtaataaacaaattatcgagacatgggagtgaccagcaccttttctttaaatggtggaacctggtttccttttaccatgaaattgtcttacttgaaaatattgatcctgatgagagagaagatggtgccaaggctgtctttgtataatgggctcaaattctctacctcttcagggctaatacttttaactgagctgctgcctatagtgtcttttggaaaactacttaaagggtgattttctgttactttttagcaaatttttttaatcacctcttgctacacccattcttttcatgtgcagccgactcaaaaattaccagttttggtgaaaggctaaattagataatttggaaccaggatactaatgatttctcatctttacttttttttaatcctaatataaagtgaatttgattgaaaaggcaaatagctattagggaagcagtttgccattgttgcagagttatctgtactttgtttaactgaaaaaaatgtagaaatatatgtaaagaatttaagacaagagtactgaatggatgatttgtcataggctttcccctttctttctgttctagcagcaggaaaagtttctctatatcctctccctctacctgtaacaattttgttttctactgttaattacattgtgtatttatagttctatgcttactgttgtgcatatactggcaataaaactgtacataacattacttgaaaaagttaataatgtatatcagtttttctgtctcactgtgtaacaagtcactcagttttattttaactttagacggtcttgtatcagtggtggtctcttgaattttgtaagttcatctgaggagaaaagatttttcaggtgtagctaccacaatcaaaggtatatagctacatacgcatgtatatattacagcttatctgtaagaagaaaatgcattttaaacacaactcttctcagtagcattttatgacctttggatatgtttgtaatcatttcgaatcaaaatattgatttaattttgacctctggtttaaga

SEQ ID NO: 105190 - DNA, 1052 bp, Homo sapiens
taaggtctgtgcattctagagtaactgtaaggtgtccttggtggaaggacaaagagacatgtactttaatgatatatagctgctattttttattttgctaattatgctctgagaatatacattctctaatcctgtctttataaatatccttatataatctcctcagatgtgtttgtattttaaaactacacctaagtaaaaattagtgtcgtctttttcatagtgcatttgattatgacacagaaaatatgaactctgaagatatttatagctctcttagaggtgtcactgaagcaatccagaatttcagcttccgtagccaagaagatatgaatgagccattgaaaagggattctaaaaaagatgatggcgattcagtaagtattttaatatccttactttccagactattttattgttcattaataattttttaaattacattttgctttctgtcatttttgaatatacttttctagggatcagtcactctacaagtatttactgagtatctaccacataccaggcactgtttgaggcattagatttatacaacaaaatcactgccttcaaattccttttagattttcatatagagatgagtattatagagttttaggatagaatgtgctttagaggaaagtgaatcttagattgtgtggtctaagatgcattagatttatacgacaaaatcactgccttcaaatttccttttagatttttcatatagagatgagtactacagagttttaggatagaatgtgctttggaggaaagtgagtctattttagattgtgtggtccaagaaggcctcactccaaaggtagcatttgcattgaaacctaaataaagccacataaaatctagaggagaattccttgaaataattagcaaatccaaagacatttagatgggaacaagctttgtatagttgaggactaggaagaaaaccagtgtagttggaccattgtgagagaaaaggagtggaacatgggccagatcacattgagtctttttttttttttgagacggagtctcgctctgtcgcccag

SEQ ID NO: 105191 - DNA, 1046 bp, Homo sapiens
cattgtctgttaggtcatatttgttatgcttttcatattcccttcttaccttaaaaaaaaaaaaggtaggtcaatattttttttttatccttccagcaaaacagtttgaaagcaaataagaatatcttccttttccctgggaaagatggtcaagcttcgtgctattgaacagaaatgtaggggaagaaaacggtcttgtttgagtaacaaaaatatattcatctactgtatgcctttgttttttaggcagcacagtcagtgctgatttcattatttgaactcaataccccagagtttacaatgttattaggagctttaccaaaaacttttcaggatggtgctaccaagcttcttcataatcaccttcgaaacactggcaatggaacccaggtaattgttacttattttcttggctatcatataatgtgatggttgatttaataataattgctttcttttatacgaagtaaacttgatccttaatatataatttttgcatctttatttggcagcatttcctgagcagaattaaatattgtcttggaaagaacagagtccctattcctgtcctgtttatattatattataatttgtgtgcattaggatagtggtaaacagtggccaggtatgaacaagaaaagcaaaacgtgagcaaaacatagatgagagcaccagctggaagccattagaatcaggacatgctctttagatgaatcaattcttatttgaggactaacaaggatgacttattccagggttaacaaataagattcaaaggaggtagtgctttaagaagtgtggtcacattaaatgatcacaggcttgtcagtccatttatacttggatgtgcaggaatttgttttgaagaagtaagttctgagtaaatgaaacattgaaatatgtatatttgtgtgtttgtgtatacatatatatattttttactggtatgaaataacttacattatatgcctaaagaattgaactgaagcattaaaaagaaagacatttaatggcaaataaaggagacacactgatggcaggcttaa

SEQ ID NO: 105192 - DNA, 1281 bp, Homo sapiens
tatggtatttgtaacactacctcttgaaccatactcttgagtcttggacaactacggtagaaattcaatctgtggctactaaaatgaggcacagttgaatctcctgacgagcattctaggcagctcagctgcctgcagtctttagatcaggagaccataacacacatcttacctagggaaaataaaaagtagtagtatagttacttttattacttccaagcaatagttattgtttcaagccttcacagaaatattttaacttgtgaaagtattgcttctgagaggaggaaaaaaaagagaaaagaaaggaaaaaattctatggactatgctttggaaccaaatgttggccccattcagaagtgggagtatgtgtctattattcttggattattttcagatgtttaacctcaaggattgatagggtctggaaaaaaaagagtttttgtctttagttttcttaattttcctggcaaagaggtgcaagagaaacaaaatcatatgttcttctcccatactattcatttaagtcttgttttaaaaactattttgagtttatcataaaacttcgaaaaacatttgtcactattattttctgagtgtttttcttccatacaggaactttgcattgatggcgactaatttgtgtgtttttcttttttttctttttttctttttgcatgctgtcccctgtgttggaactctcaatagagagtaagttggttcaatatttgttggaaacctaactttactgcatgactgtgaaattaaccctttttctctattttctctcccaaagagttcatgcagtgttggaacctttgcaatccacgaaatgctatttgcagttatgcaaactatcattctgtttggagatatgctttttaatctactaattaatctaatttgattatgttcttctgttctatttgatgactggcacacctaagatataagggagttaaagaaaagtctgcctcaattgtaatagctcgaatattttaattcttttccaacaaattatatttatgagatatgtgggataataaattgattctattgaagattgcttccattgaattattttaaaatgattctgaagtttcacaatttttaaaaaaacatttaacccctgccttcccacaaatgacattttattaatgtcattccataaaagcaaacagagtagattatgggatagtaattctcatctttgtcttctgaaagaacatgtgaatcactagttttatattagcatagccactttccactttgttctttaa

SEQ ID NO: 105193 - DNA, 2996 bp, Homo sapiens
aatgacagaagtttattcggcatggtttgggagactaggaagtctaagattaaagaaccagcaaatttggtgtctgatgaggacccattcctttgttcacagatgatgccttctcattgtgttttcaaatgttagaaggagctagctagctttctggggtctcttttgtaaaggcactaatcccagtcattagggcaaattggctcctacaggccccacctatctcctaataccatcaccttgaggattaagatttctacatatgaatgaagcaggtgttgtagaaggtcagtcagttagaccatagcaccatctgtaaaattgaatagtaatttactgcctcattggatgtcaggattaaaggagataagattttattagttactagttaccatagtggttttttttttacactataatgttcgtttttttgtttcatgcttgtaccttcaacatttccttccatttgaatacttcttttgtctcctgtaggcctgtctgtccacttaggtgtaagatgtgtttttgtgtcaggaatgatggtgcaatgctaatgttccattgccctatttggcaatactctgatcattaactataaagaataacaccagtgttaactaactctccttgcctgacagtagtgctgccactattccttgtttctgtggtaatagatgaggtttgtatggtcctgttattccagcctccagacaccattccagatcaactggtgccctctacgcccccgaagtgtatggggcctcaggtgaaggatgagtacattttcactatcatctggcattcatctcagattttatccttttcagtttccattaaataatattcatgttttaaaattgattttttattatttaaatttaatttgttggagaataaactttttttttcttttctcccaagtaacgttttcccctttagcaactgtattgagcatttttctcactggtatatggacatttttttgtataacctgttgtgtcatttttaaatatagaattgtttttatgttctcatctttgtatatatgtttaaaaaaaaaaaaaccaaaatggtggatgaagtgttttaattgtaaatgatggtatagaaagcagttgagggggagaattcatctctggtttgtctctgtatgcctcagaatgtcgggcacatagtagacacttaacagttatcaaatggatgtctcttagttgtagaataaaacccacttatcttgaaggagaggagataataattagagcttattttccttgtaaatttctagtgtgccttcatggatctccctaaccactattggttgaggattgatctttgtcctgggttactctgtgattcagccgtatggatgatatttgcctgaactgatagagctggattacagggctatagacttgcaagcccttagtctgccagccatgcttccttctaccttgtggttgtaaatgaatagtgaccgttctttatttttcacacattgtcagtaattttaattgtctttacccttttattttgccaaaaactaaatgtgcccagaaaatacaatattgcttttaaaatgctttgccccattggttttttttccttcccctgtaaaggtcttaaagtttcccaacctgacactgttatatttatgactccttcaaatctattttccttcttttgatgaattaggtccaggttatgggatcagccaatcaagtcgactgtcgtcttctgttagtgccatgcgagtcctgaacacaggttctgatgtggaggaggcggtggcagatgccttggtactcttctccattttcttatcattataaatgttccaattacgaaactgttgaatgagtaggccagtctatccatgtgggaaaggggttggggaaaaatcagtgattaaatctaaagataaaacgtgggcagtgtaaaaagcagaatataattaattcttgatccttattaatcagaattttataccagggccagtattactgatggcctatcagaaatataaatatagatgtctttaatatggtaatgtgttttatacactatagtatacttaagggagataaactatataaatatgtacacttaaaatcatgtaatttcaactctagcttaaactttggtatttaggaattattttactttggggctggattttgtttagtattttatctgtgttttttgaactaaaagaaagtacaacctcaaggcaaattataattaagatatattatatcttatagttagatataattctttatgtctgacacattaaacagtgagatttaaaaacatattctacagatccatgatagcttgtcagaagattgcaatacatatatcgttgtttttgtcacttaaaattatgtaagaagtagcatttttaaaaatgtatgtaattggctttggctaatttcccaagtcaattcagtatcacttcctctttcagattatgatattaatcctatgtttgagaaacatttactcagcttcttacccagaacttgtaagaggcctcatctttgttttgaaattaaaaaaaaatatgcttcctaaaatcatagatcccatcttaactagtgttgatataatacagtgtttgccacatagatttgaaaaggcaggtttttaaaaatattcattggtaatagctataatttattgaatatcacacgtgtagttctgcgctaaccatttcgctgtgctgaatttttcccgttacttcagccacttgattattttttataaattaatataattaagtagggactttgttctcttcaacatgggatatattgatcacatcttgttctgatgatattaaattaatgagatgtttttgatttgctattcctcatccctgtatctcaaatcatgttttctgggttttttaaattggataatttaccagttaaattctgcttacataaatgttacgaattgattgggtttttcttgaactattacttagaacactg

SEQ ID NO: 105194 - DNA, 1022 bp, Homo sapiens
tgaacaaagagaaaaattgagttttactgtattgtacagtatgttaaatatttttatttgcagcatttttagtttggtaaaatattatttgcccttctaatttcatacaaactagaggaccatatttaagaatttaactgtattcctggtaatgcttcagcaagagtaatttcttttcagccttagaaaaatttaagttactgttcagtctttaagaaagaaaaaaacaaaattttttaaaatgcaaactctgttctgttttctcccttactgtgtgtgctgctgttgcttcacaccagcccgaagcagtcgtattcctcgaccaagtgtgagtcaaggatgcagccgggaagctagtcgggagagcagcagagacacaagtcctgttcgctcttttcagcccctcggtacgtattcgggcaggtgttatgtgcattgcttatccatggtgttatcactatctgttaacttcagcatacctgggatttagctttctttgtcgacagatctttctctctaccccttttctgtcattttgaggaaaggaaattacatgtttgggaaattcctttgacttgatttacatgtctgaaatgaatatgttagtcattgtattaacagattgccttcataatcaagtaaatgtcacacaggtttaaacttcagaatattgaagtctagatctttcttaacaagtaaacctgcaaatttaaagatatttaaatatttaatctcaagtgaaatgcggactagtttgataaaatacttttgtctttttcagcggaaatgttaacatttcagcttagatcatttaacttaggttactaaaaagaatgccacaaaataacatctgaactacttattaatggtagggattaacatttttataatattttacagtttaacagtcatttcctatgagctaatgctcttgtcactgcggtaaaacttgtttgtccccaactgtattgtaaccttgattgtaatactatatttacctcaattataaaaatattaaatga

SEQ ID NO: 105195 - DNA, 1021 bp, Homo sapiens
tatttctatttcttgtttcgtcaacctcaatcagtatctcaacttccatactttttccttcaccttccactcttagagttatcaatttttacattattaaagtttacacatacattttcttctgtatccacaagcaagtcttatgtacttgttccataagttggctttaaaagatgaaaagctgtaaataacatatactgtgttatgagtaaatgaatgttgtttgcagccaagacacctagtgtactgtgaacccatttcttcccaaaggtacagtgagttccctagggaccacttgaaggagagtgttcctgttataaggagatgaattctctttccttacattcctaccagttatttacttatgtcattataacttataccagttatttacttattatgccacgttttcatttgctgtgtatatagaaagtgactaagaatagtgtgcacttctcatatcctttaggattgctttcccttcagtattgctgaaaggaaatatgcagttccttattttttccagactttcttttcagttctctctggattagttgcatctaggcctcttgctcagctatcttcttgagattcctatttgctgctttcctggtttgaatcactccctcctggatcctctttctcttcctttgctcttttgctttgctcgtacacattcacaaataattccttagaaatagtgtgtaggagtcaagctttttgaaaccttacttgtctgagaatgtctttattgagtagatggcaccgatttcgtttaggcctacagactgaattactgttcctagcgcttttcatttattctgtgcctggtatttggcccatgagcctctgaagttttcatctaactaattcacttctttttgttttccagacattattttaaattctctactccacctttagtcagtcttcacccctgtttattgtttctttcgttccatatttgtgggtttttcatttgtgaggaggtgagaaaaagaatgggaatcgaaagcattgg

SEQ ID NO: 105196 - DNA, 1063 bp, Homo sapiens
tactgtgatcatcatccttactttgtcataaagtaattcattagggcttgcatggtcttaccatatctttgtatcactacttagaaaaaaaaagtctctcagatcaaagcaggtgtgttctgatggctaaccaaaataaataaataaatggagactcaatggagagagcactagatctatatttatgacaaaattgtgtctctttttctgttggtagtggctggttgtatacaaatgattgtacagcccgtcagaaactttgtctcctctcctcccatcttttgtttttcttggtgcatcttaagaaagatgacatttgtagctttttcatgtaatttttcttcagctgtacaatattgtagttgttccttatgagtagttttaaattaaatgtttaatgaaaacatttaatgattttgattttcgactgtcagtagtagaaaagctgaagaatttacatttactgttgcagtctcatttcatctgctttgtacatgagtgtctgatttcagttgattagctttaaaaacaactaaatgtactgcttttgttaaagacatctgtgcttttgggattttttaaagtttgctttttttgccttagggttttttaattttctgagaactgactaaagctttcttatttccatctgccatccatttaaaaactgctccttccctcttcatggattataatccttaccctaattctgcctttacacttgttcaggatcacaatctgctaataccattggtggtaagaatctatagactttatgtgtgcatctgttgtttgatcacctattttcattatgaagaatgggttctattcagcagaaattcttaacgtcatagtctatcatttgtagtcatactggggcagaaattgccaattgtgatttttctttggcctttgtcttattaccaaaattttgattttttttaaatgacacaagttaataccgtggatataaacattcaaaagaaacaggagcttttgtcatgctttgaaatgctataaaaactataaaatggtagtttgaaaactttaggtagcacaagag

SEQ ID NO: 105197 - DNA, 1015 bp, Homo sapiens
ttaatctttagcagtatatcatagtagttagaagacgtgtgcttccatatgtgctgcccagaccagtattagcatcatctgggagctagttagaaatatacaatctcatatgccattacagctctactgaatccaatctttaacaagatcatcaagtgatttatatcacagttaagtcttgagaagtacatactggtttagatcatagatactggagtctgcccaggtttgaatactggctctttgaggttatttgaagttactgcacttctataatttcatctgtaaaatgaagaggagaatagcatctacataggattgttgtgaggattaaatgatgtagcatatttaatagacataaaatattgcttagccctgaataagcactatatatgttggctaataaaattgtcattattttttaattttttaaaatttaaaaaaattttaaatactgcagatgatccttattatttttaatcaaatgtcaactgaattttagactgcttttgtgtacttctgtaccttgttattcttactgccttcagtaaacagagaaataaacaatgaagttaggaaaattgaagcataaagataaccaaccaggaatttccatgtccattgtctaaggataaaaattaattgtgagatattagttcttttctgaaacaatactgaggctgatcttagggcaaagactcaaagggcttttttttaaaaatacttaagagacctccttttcaggtacattgtaagtaaggatcacttcactggaaaatagaataattttttgcatttggcttttcactttgaaacccattccataatcctccacatcttctcctaaattgtgaaaacacagtaattgactttcttagaccaaataggactttaagattagaagactttccctctgtaaaatcatttgggttttatattggagggacttttgtttgtttgcttgcttatttatttgaatgactatatgttccattccgaattcttttgtaaaaaa

SEQ ID NO: 105198 - DNA, 1017 bp, Homo sapiens
agcttatggtataacacgtaaaaaaaaaattactgtttataaaatttttaagagaaatagaacccgtaattgatgattacattattacagaatttggcagtacctaaaaatagtgagattttctcctctcattattaaacattattatagaaaaatgtttttaattatgtaaatattttatttctcaggccgggtgagagcaaaactttcagcaccacttgctggcatgggaaatgccaaggcagattctagaggaagaagtcgaacaaaaatggtgtctcaatcacagcgtatgtattgcttatcagccctcctatatttgtcactatgttaggataagtgtgttgcttttgtattactgtattagacgattgaccagtggataaagacaaagctaatttaaaaaaagacaagccacatactgagttcttgttctgtactttaggttcatcatcacctgacaaaaatgaaggtatttttttcaatgttttggatcagttgttgtgcatgttttggaattttttgagtgggtgttgtcttgtctttggtgttttattagggctgcatcattgatatctgccacttacaaagaaaaacttcatttgccatacaaacttttgcatggagatattttaaatagcagaaatccttagcattaaggtgttcacattctactcagaaacttgctaatgtagaaaattatgctttttagagacgaaataattgccatatattagcatcaaaatctggttatatcttaggtaacataattcaaggacagatacatgatatcttattttcccaaaaatctgttagattatctatttttgattaccatttttggcaggtatatactaatttatagtgaggaaacataatttgaaatgactgattctgtttcattcatgttaaatttaagatttacatttttgctctttcactggaagctgagtttgtcataagcatgattattaaaaagtacaattttgaggtctagctaaaattaattatttctat

SEQ ID NO: 105199 - DNA, 2656 bp, Homo sapiens
atagaatagagaaagtgagttagattcatccagatgtgaaattttaaaggggctgaaagttctaagaaaggatgtgggtggggaagcaacgaggtggtaaacagaggctaatgatgagagggcctaagtgtggaatttgggggtatattataggcaagagagaaaagaaacaaggcaatgtgactgtctgggaaaaactcacagactagagcaggggattggcatgatggcaaagtccaaagctgggacatgggcctcactaacttttctctttttaggctagtgaaatagactcattatcaacttttaaaaaattctctacttagtacattaggtgaagtctttatctcacatctggtttaatttcctagtctgttttagttgaaaacaagcttgatatatacgtctgtactatgaattctgtcttcttaaagaaaatgttttctaggaattataaaaatcatttcttctaatatactaagttttcctctgttctttgcttgtgctttcatcaaagaggatacttctgacaagctggatggtaagaacttcctttcctaattctactaaagatttttatggaacctggattctatataatatccttgttcattcttctcttaatttctaaaaatatattattaatacttatttagtgataatgttaatgtgaaaatggctacataattctctgaatgaatttggggttagggatatctattgggcataccatatcccagtctgctcaaatactaggtaactattttgttttaacttataaaatgtttgcctgagctcttagaagttcgcctctgaatattctcgattcgttaagtcttaataaaaaatattggattcagaagaatggaaagaaatctcctaagtcatttcattcacctctttagtctattaagtgatatgacaaatgacatatttcgtaagttcatatgattgtttttgaaaatgaaatgcaagttacagaggccgactttttaagagtgcgttgtaaactaacatttagtcaaaattgaactttaaactttgcccttttaatttcaatattcaattgattacagtttatctgtagtggcttggttcagtaacaaccctgtatgatattttttgtctgatactagatagtatattatccacactttcccttcacttcagcagataccataatgttacctatgagcttgaccttttttaaataacttaagatactaaactaaatctgtatgtcacattatgagatctaggaaaaacagacactatatatttttctgtaaattattatgtaaatggaaaattgatctaatatatcttctgttttaatgagatagaacatttattaaaccttgggttaggtacatgactgctagttatattagtgtctgcttttctatatgattataataaaatattgaatgaaatgatagcccatcaagagatggtttctatgtatcaaaccccttagacatcctaatattgatattctggatcctttaaaaacgaacttttatcactttccagttcaaaatattttcctgtttgggtaggaaatctcaatctatttgagaagtcactactgttatatgatgtgttactcttactgatgttcaatcctatgtttaaaaaaaatacacagacgtatattattgcgctttagtagtagtgagttatgatgtttgtacttagtcattttttatagatttcattgacatcttaaggaatgcacataaatgttgaataaatagctaatgaattggattgataggtttttgctttgtagatgctttgataaaaatgggcaagtgaggcctaggtcatagattttattcctatgtttgtcagttagctttttctgattccttcatgggctaccttttgaaaatgcagagaaaacatttctactctggaaaggtctataaaatttcattttcaaagagtaattacagagttacatttttttgagtgatgagtttctctaattttttataccatttcaaattttaagaatgcaatatagcagacaaaaagtgtttcctatagaattttgttatttttatttgtctagtttccgtgtgctgtgaatcattggattacctcaaattttgtttttctcaaaatgaaccttcccgcagttaatttaaggctgtcagactaaaagttaattttttgtttttaccctttcattgtagtgttgggtggggactgtgaggtaggtcttaatatcaacattggcagaatttgttgaaatgttgttttatttttcttatttaggaacagcatctgaagatggtaagaactatacattttgttagtaacacaaatacatctacattactattttcattggtaggaattaaatattagaactaaaataggctaatttctttgcaactctttataatttgccagttgtagtaagttctacatttcatatttggttgtcttagtaatgtgtggattttttttttttaattcttcatcctgctggtttgctttgtactttggatcatctcatgctggaaaaacataattgcttaacatgtttaataatatctagtatgaagtaagcatataattcattttttatagtagtgacattaatgcttttcttacatgtttgtgtttttgtttttttatttatgcc

SEQ ID NO: 105200 - DNA, 1062 bp, Homo sapiens
ccacacctctaccaaaataaaaatttaaccaggtgtggtagcacatgcctgtgggcccatctactagggaggctgaggtgagaggattgctggagcccaggaagtagaggctgcagtgagccgtgatcacaccactgcacttcagcctgggtgacagagcgagacctttccacgttctccaaaataaataaataaataaataaataaataagacaacaacaactacttagcagagtgatgatgattagattcgatttggaagtcattagatgattttacttactgtaatcaatattaaactcagagcattccttcttaaagcagttgctactggtttttgttatctctaaagtactgaattttttggcagcagggatattttaagtgttttgaagttcactctttaacttcagcctgaagaggaaacttggtggtaggaaacaggaatttaagttaaggtaaccttgatgtttgagtacatatttatgaatatttattctaacaattgagtttatggaattgcttgagtggaaaagaaaatatagtttcaatgaggtcatatggacagaagtcagattttagttggttgatatagaagttggaaagagaatctgtgtaaattattgttacgcctgacggtcaagaaaaggggtgaaagaatggtaggaattatctgtggttgaaagaacttatcatcttataagattggagaagttaattatgtttgtatcctaaggtggcaagtcagtagagatggaaaagttagaagtgtaaggatgaaaggagataattaatagctaagttgctgtggaaggtgtgaggaatgggatatggagcatagcctgggagttagtcttgaatgtggaagggtgagccatttcacagatgtagaaggggaggaagtgatggaagggaaggaattggaagaggtagtagatatcagatacgatattttggaaagttggacattaagaagagtgtgattggggaggttgttgtgactttctgcctgaagattcagagtcaggatcatgtgctaacaggtgacttgaagtttagaat

SEQ ID NO: 105201 - DNA, 1018 bp, Homo sapiens
tctgtgaagacaagttcatataccttaatcatttctattcattcttgttatttaaggatagtccatatgttttaatataattctatattgcggacacacttctgaggaatctgagctgccttgtttctccttttcccttgttctcatcatcgtcttgatcaaagaaacaattcttgaatccatgattgcctgtagaattttcataactgcacttctaccacatctagccactggtttctaagggggtttgggaagggaattggcttgtatctaactttcctgttttctttctcctacttctcttctcttaccaagaatgtgaagccttttggagatctgggagaactgcaaagctctactctgtctaaccaaaccctaaacatatattccaaaactctattcagtttgatttcttcatgtttttatgtctatcaaattaaaaagttgacgttggtttgcgtatctcttcttcatgcttccatttttttcttttgggtagtactgctggaacactaagcaggcagatcgccagaacacaatacaggttgagcatacctaatctaaaaatctgaaatctgaaatgctccaaaatctgaaactttttgagcaccaacatgacactcaaaggtattttggactgaggcgggcagatcacctgaggtcaggagttcgtgaccagcctggccaaagtggcaaaaccctatctctactaaaaatgcaaaacttagccgggcatggtggctcatgcctgtaatcccagctacttgggaagctgaggcaggagaatcacttgaacccaggaggcagaggttgcagtgagccaaaatcgtgccattgcactgcagcctgggcgacagagtgagactccgtcaaaaaaaaaaaaaaaaaaggtatttcggattttggatttttgaattagcaatgcctagggatgctcagtcatttaagtatgaatgcacatatttcaaaatctgaaatctaaaacatttttggccccaaacattttaaataaggagta

SEQ ID NO: 105202 - DNA, 1003 bp, Homo sapiens
attttgcatacagtagtaaactatgcgtattcagggaggtaaaggaaaacaaaggtttttaaaggaaaaatgaggaagattacataatcattttgaggtggttatcctggactacaaggatcagtaacaagggtgatgccaacttgaggttggacaggcagttgctgcgtagatgtccttgcagaatttttgtttgtttgtttgtttttgtaaggttgcgatagcctttgtgcaaggttgtgtttttttggagtcttttgtgatagctcttgttatcagtcatttattcataagaactctcccttaatggccttcctcagctccatttgtcaagtgtatgtgtatgtgtgtgtgttgtaacacaaatgacttcattttgattctgacaacttcacaccactatcgccaacaataataaagacaggaaaaacaagatttgtacatttgatgtttaagaagattgtaaagaactctgcctttttaaattaggtaaatatgtttaattaaatactgtgttaggaagaagctgaataagacattgttatttgaagtggttcaaacttttgacaacagttgttcagtcatctctgtcttatgtcaggggtcagcaaacaacagcttgcaggtaaaatgtggccaatagtctggttttgtacagcctacacatgctaagggggttttttacgttgttaaagggtgatttaaaaggtaggggatgggggtgaagaatatgagacagagactgtatgtggtccacaaagcttaaaatatttactgtccagccctttacagaacagttttaaccaacccgtcttacattgaggaaaatggtaattggaaaaataagaatgtgacagaagacaaaatcagaaaatgtaccatagaattgccttaaaaatggggagcaatccattaactgtagggagagtgagtggagtacaacctaagcagaaatgtaaagctatgtcatatgctgcagagccatcagataggcccctgaggc

SEQ ID NO: 105203 - DNA, 1128 bp, Homo sapiens
ctgcaatgaatatttttgtacatatgtccttgattatttgtaggtaggagtttctttaggatataaacataggagtagaatttcatagttataatctttaagtttacttagatgttaccctgtagggttgttttaccagttaaaactcctgtgagaaaggtatgatagttctaatttcatcatatccttgccaatacttgttgttgtcactcaaaatatttttaccggtatgatgagtatgaatactctttagcatgtctatttgaaaatattctcacattgctttacttgcaaactaccttctattgcctgtattacctttttagctctctgaaaggaaaattgtccttaaggtatttaagatcttaaaaagttacaagaaagccttaaaaagttttctgatttgactgtattttatccctttattgagatatatgttttttcttattttaagatactttttaaataatagggaaaacatatcccttcctccttttgtgttttacaggctttcatataagggaaagattagtgttgtaggaacaatcagtaaaacttagttgaacttgaatatttttattgtttgatatgttcttgtcagactggtaacatcatggtatgggcagccaagggctattcaactatacggaggggaaaaagctattttataattactcattgctttcttccagctggccctctctgccaccctcaccaccctgtaaaggtgttccacaccttccattgttcccttggaaacatctttttcataagcagcaactcccctaagtctttaaccccatttttaaagagtccgttcaatgttcttgccttgattagaatctgattttttttttacgctctttaaagataaagctgtttattattctcggctctcatactcatagtaattgataataagtttattgtgcttgcactcctcattattactttgtgaccattattcctatacccatttatatgaggttcatgctccctgaccagccttcttattattggcatgtactgatcttgacaacattccagtgctgcctaggtttgaatcccagctctgccacactagctgtgtaaccttaggtacattacttaaccctctgtacttcagtt

SEQ ID NO: 105204 - DNA, 1077 bp, Homo sapiens
atatattcacttccttttagtcagcttacctacgtatttaagttttctcagttgtcctaagaatattttttatagcttttaaaattcaaaccaggatatacttattctctcttggatagttggtaatttactgtttatttctcaggtgattttgtctttaaacaaaatttttggccaggcatagtggctcacacctgtaatcccagcactttgggaggccaaggtgggtggatcacttgaggtcaggagttcaataccagcctggccaatatggtaaaaccctgtctccactaaaaatacaaaaattagctgggagtggtggcacgtgcctatagttccagctgctatggaggttgaggcaggagaatcgcttgaacccaggaggtggaggttgcagtgagctgagatcacaccactgcactccagcctggcaagagagcgaaactctgtcgcaataaataaacaaacaaaaatttttttcctgactttagccagctgtcttttcatatcttctatatatattcagaattttttatattctcattcatctttcttttatacctgtaattgctgtttagttaatattgaatttatgttggagaattgtgttatagttttttccttcttggtaggtgttttttttaattttagggagttacttttatcagcagaaaatatttctgttcctttgttttcttattggagcacagtatagatgtcagattattttgtttatgatgatatattggattttcatagacctcaagtaacaagtagattccgtggggccaggaaaaaaaggtttgcttagtttttaagtttaagagggccctcttctgttggtatagtgaaatgcaccttctttactacgtgatttgttgggggctttctacttctgattctgtgattaccatcttatttgaacagagcccttattttttgtttcttccttttctttatccaccaggattcaaaaggatacctcccacttctaattgctatttacttcttgtcctagagagaaccttagttggtgtctacgttatacaactaactaccaggattcttttctacaca

SEQ ID NO: 105205 - DNA, 1251 bp, Homo sapiens
aatactgcattttgattttgaattacagaggattattttatatggtgttagccaatatataaatgcttattcaaaggacctttatttcgtattatatatcttaccaaagtaatgattttatatatggctttattttatttttgagctttagggaaaatggaacaaagcttagttctcttaaatacatttttctgatgctttgtgcagataaaagcttcgatgatgaagaatcagtggatggaaataggccatcatcagctgcatcagccttcaaggttcctgcacctaaaacatccggaaatcctgccaacagtgcaaggaagcctggttcagcaggtggccctaaggttggaggtaatgtaaatccatttcaaatctgttatgcatgctccatgcccttgatatggccacacatacttggaacttcagaggaatatgtttattcatgactgcagcacgattgcagatctggagtctgttgcaacattcagaagaatacgatgcccttttgaaatgtataaaatattgtatactgctatttcctctaagaatgtatgtgaattagtctcttcttgagggtatttatttttcagatgccattttgaaaaagatttatggaagttttttggggtttttttgttttttttaagcagagaacaggtttttcagaatttggctactaattttcaagtgcaatagctgttacagaaatgttgaattatgtaatgtttttacacattcctctaggtagtaagtcttaaatactccagcatttaaaaaatggttgaagatactgggtactgaatcatttgtcacaataggagatgggtggtggtcaagtaaaattgcctcaaaaatggttcctggattaaatcataataggaaaataagaaaaatcaggtttcatgcaattttataattcatagcatattcattgatcatattagaactgtttctagcatattgtttatctttaaattttttaatgggtattctttcatgtgttaattagaaagccgtgagtatatttccggtgttagtttctgctacatctttctgatagaatgaatctgtgaaaataagggtatttaattctaaaaagacagtaatctctttctcttttcctttctttcctttttaaaaataaatgtatgtcttagttgtgatattttgggaaaacatatctttccttgtttacagtaactggtgagaaaatcatggtcttgaggatttttgttttttctttttgtc

SEQ ID NO: 105206 - DNA, 1091 bp, Homo sapiens
agtagtataggcagagacaatactggtctggccttagattaggagtggcagcagaggtaaagagaaacagtggatttaagcacaagaactgttggtagacgatctctgtgggtcaaaggaaaacttgagcacattatgagcctgagcagctgagtagatggtgacgttatttactgggattggggaggacttagggagatcagttttggatgatgttggttttatgtgtctatatgaaattagagtggcttggagatacccatgggggagatacctagtaggcaattggatatataggtctggaactcagagatggtctaggctagagacaaacatttgagagttgtcagcatatagaaggtatttaaaaccgttgagaatgaatgaggtcatttagagagtgtatagtctggagagaaggagaatattcaacatttaattgttgggtagagaaagaacagccaacagaagagacttagctagagggacctgtgagattagagaaaagccaaggagagcttcccgttgtaaaagcacagtgtgggaagtgtagacagctaaaatttgagttttccaaggtatctgtggtataatagtttatagggattaatgtttcctaatctcagtttgtaatttagctgttagatataaccatagtcactgctggatatgcagaagtgtaaaacagctcagaaatcccaagtcttgttgttcattgttttaattagaacaaggaaggatacagcttcaagggaagagaggaactttggtataagaaactacttaatgtgaatcagagcatattttgtgcatgaaaatttatagtgttgggggttcttcttactgaactgtttgtttcactgaagaaaatccacataagatgtatttttttctatgagatgtggtataaattttggcttgctcttttatttgccatgtaaaatggtgcagtttatatgaatttgagaagcagaagtttcgggttttggaatacatgtacccataaaagtgaagtggaggccaggtgtggtggctcatgcctgtaatccctgcactttgggaggccaagaagggcagatcacctgaggtca

SEQ ID NO: 105207 - DNA, 1047 bp, Homo sapiens
ccagtgttaatgagaaaaattacggtgtgtttcatcccagcccatgatacttgagtagttttcccaggtagaaaaatatatcaattgaatactgaaaacaaatttttataagtaacaatttgaagggaaattgtacatgaagtaatatcatggagtttaattcaacttcttctttatttctgcacaatttttccccacaaaattttcaggcctttgttgattcatttttattgcacactaaaactaaaactaaaactgtaaataaagtgatagaaacaggaaaacattttaggacagagtaaaggctcggcatgaaatcttgtggaaatagttcatgcacacaaagagctgttgaagatactaccttttctctccctcacttggtgcatttatgcaaaataaattgttttgggtctgtccaaaaatggcacgcaattcaaatttgttccacctgatattctgtgaccagaaactattatggtaaacaaaattttttggtgtgtctttgcctgaaaccataataatgacacatcatacatcttacagcatattgatttagagtgtttcgtgatgaaaaaaatcattttactaaatacaagaaaccaaaggatttgttgtaaaggtgatataacttttttatagctaaaagttgtcatctgaacagtcattaagtgagttatagagtatttgatggttttttgaactcaacttgttatattgtaaaagtaagttaggcagagtccctaaatgcagtagaattagctctgctgttagaagaaaactggatttaaaatctgtcagatcgtgactagaaggagggaacaccagccctgtaggaaagaaaagactgaaagttggagaccccctgcgattatggcaggcgctggtgtcgttatggagctttctagacagtctcctgcacaaaccaaggatgtaaacactaacagtgttggtggctgtaattgcaaatccttttctctttcactgtgaaaaaaactatgcataattcttatttgtcgagtgtgtgtttaggacctaatgcagtct

SEQ ID NO: 105208 - DNA, 1159 bp, Homo sapiens
aatagagacaccccacatctacatatgtccattacttggtgaatagataaacaaaatgtggtaaatccatacgatggaatattatttggtcacaacagggatgactgatacatcatgcatcaaccttgaaaacattcatgaaagaagccagtcacaaaaggccacatattgtatgattccatttatatgaaatggccagatatggcaactcataggctagatatagtctttagagaaaggaagtagattagtgtttgcctaggactggagagatcagggtaaatggggaatgattgctaatgggtatgtggttattttttggggtgatgaaaatgttctaaaatggattatttggttgcacaactctgcagatatactaaaaatcgttatattgtacagtttgaagaggtgaattgtatggtattgaattctacctcaataatactgttattttagaaagataaagtctgagatacctaattgtctctttcatgttatacttgggatttactattcttattctaaacttttaagtctggactttggttagggttgcttttctaattctgtcctccttaccctatgagttagaaccttcctaatactttactggcctctatccttatcctaagtcagaaccttcctagagctttgtgggcctcctaaattgtgtttataatcttttggacaatccagtctctgttgtatttttcttccattgaatttcctaatttcttcccctgaattacttaaaatatcttaggctcttctttctgctcttaaattgtttatttcttccttttttcaccaaattatatgtataataatcatctattataaatgcgtttgtttttctaaaataagtgtatagagtttgatgatggggttggagggattcagtgagggccacgtagaaaattatactgtgttgttttgtttgctttaaagataagttatgaacttatcctttataaaattttgaacaagtgactaaaatatttttaataaataccaaacaaaagtcagatgttaattttacttgaaagttggtaaagtgagaatcattagaaggaaagagtgactgagaagagagagtagaacagtcataggaagagtgtattgagtaactgaagagctggcagcaaggttaatgctgcga

SEQ ID NO: 105209 - DNA, 1051 bp, Homo sapiens
acacaagaattttcgatctcgagaaggcgtgtgtctgtgtcttattgaaaccttaaacatgtaagttttatgattactgaaaataactgtcttgttttttatttctctaaaaaaaacctcagttcacaaagtcaaggaaagctatggtaataacacatttaaaattattaaagcatataacttcatttgatacctttactgttcattttttgtgtatgttatctttcatgttcttaatttttcagttatgtcagtaataagtgtttctctttttttctttagtatgttaatagtagccacccaaaacagatggtcatggaactgatatgctgataacttagtatctacttctgttctggattgaatttggaattgcttttaattcaatgatatttcacatattatagtcatttcccatccccaccctacccctagagcagtgtgggtgggtaccagaatcatagaccaagcaaaactttcccaggtaactggacagtgaggctggtagctgtgtgtagagttctggctgccgtagttgccacagaactatgactctgatctgaaaaaatgctaggacttttgttcttgctgtggattatttttttaggttctatgcaatgtcataggtcatatgtagtagctttcagcttttcctatagtgctacttccttttcttaactatattttcacttattttcttttattactttatagtcctttctgccctctagagcctataagtgtactcagtctgcacagctctttgtgctgggttttggctctcctgccataagcataaagatcttttaatttacttatttcattggaatgcatttatttgagaccagagtctaaaaaaatcacaattttaaaagtgaaaactctgattttcttaagttattcataggttgctaggtttaagagtgccattgttgaacattttaatctattagagtatgtgttgtcttcactgtcagttgtgattattcaggtttgcatactacattgcttagaattattttttgctacattgcttagaattattttttgc

SEQ ID NO: 105210 - DNA, 1072 bp, Homo sapiens
ctatagttgctttagttcatatttgcttcagtttttttgtcacttggttaattttatgaagggttttcctcaagtttctactcaactctgcactttaggttttccctattttcttgtgcttcatagaggattcttcttcgtgttcttgccccttccccactggtagactgctgttgcttcttatttcatgcttgctggtctggttgggggaaacagcgtcattctttgtttttctggtctagcttcagtcttaggaagctttttgttctgagtcttggggtaaggctttataaagaccatggctttccccaactagagacctttaattatatgggccccaggatgtttttctgctccttcctctggggtagaaggctttttatctttttcctctccttaatagcattgagttttacctgtgccttaggcgtaacagtgtttgatatccttcactgaggagcttcaaacttttatttcttagcttcaagcttttgtttcttacgggacaagggtactaggagcctttgtgcctttcctgcacaggcagcggtttccttcccccaggactgtaccaccaagagatactttatccaatatccttctcagcccttagtcttaagagtgtccagtggaggtttgtggagaaagagcttgcaagtaggtgtgaactagagcctgtaagtaggtatgagttctccttgtgtctgtggctagttgtgttttcatgctagcccacactcagttgtaaatagttttgttaagtataactgacttcttcttacccacttacatcatgggtttattttcctcctgtcctctgtcacatgtgacctactgcctgtgtcccatgtctttgtttagatttcaggttagttggttattctccagccttagctttttgatggattcaagaacagtcatgattttgtagacccagtgggctttttcttgttagaatgagagggatattctttccagtttctacatcccagacagaagatgaaattcctctgtaattaaagaggcctacatttttaactgttacatttaggaaacatttcaaagttacaaa

SEQ ID NO: 105211 - DNA, 1365 bp, Homo sapiens
atgtgtcttagtagataggctaatgctgggggggaaaaagttacaaagatgaggtgcgagaaagaatgagcctttctgaagagttggtggtaggcagggtgtaatgtagccgcgttgggaggccaggtaaatattttgtatttaacttgccccgtagtcgttagtagttacttttctttcttgtcttctggtggcagtgttgctttaaaatgctgactgcagcttcccatggatgaagtgattcttcttagtaacatattctcatgatccagcgaataggctgtactttgaaaccttttattcaaaaagagaagaaagacaaactctagaattatgacgcagatttaatggtaaagcccagatgagttttggaaaggttagactttttacaaggacaataaagtttgagagttacccacgtcgatgcttcattacataccatctcttgattattatttttaaaacgtttggggaaaaggtaatttaataatatatcattaccatttgggagattatttctttggaagaaacaagctaaatttactctgtaagaaaggcatatacatattcacactcaagatagttgattttatgctacagcatagactgttgtagaaagacagcgctttggtaatgtttgcaccccttccgaagttaagattggtgtgccatcttctacacgggctgttgtgaattggctttgggccatttcactcctcagatgtacctcagtgaatgacagttgagcaatcacgctgatattctgtgataccacagtatgctagttttctgttatgcctctaagccctacttctactcggtgctgtgtttttaactgttctttaagagttagaatccatcaggggtctcatccgggttcttttctgttttcactacgtattttctccatgctcctcactagataatgtagcccaagacaatttcagcagtcagaagagaactgccatagtctcccaccacctgtctatacacttccttgtagctgtgaccatataatcttcctttttccttgttagaatagataaattgcctgttttcctcatttatgcaattccctccacgaaagtattagattccatgccttcttgcttactcaaggacattgatccatcaattctgctctctttcctaaatcactagttcttccctttctgttgaattctatagcatagaaacttttctgacattgctagggaaagggcattctaattaatctgttgctttaagttttataagctaagttacccaactgggtaatcttttttttttttttttttttttttttttacttaagatacaataaaacatacttaactgttttaaaaagtgtgtcataggagcttt

SEQ ID NO: 105212 - DNA, 1051 bp, Homo sapiens
gttgaagtcattgtgtgtttataaagatgaataagatagtgtttatgattaccaaggcagaatgaccatttgaaatatcccagtgccagtattttactttttttagatttcaatttaaaaggagaaggaaaggaagttgggtggttataggagataatattttgagcttttgtcctttttttcatggtggatttttcttcaaagaagacttaatatttaatgagattcaggaaggttacctaattttctgttttctttcattctatccagatctgcttgacatttacctggaaggatgctttcgataaaggttcactttttggaggctctgtaaaactgggtatgtaatttttaataaaagtgataggaaaattggtctaactactttgcattgtttttagtttttaaaattgttatcctaatgactctttgtaaatactaaagttttttacatttcattctctttttagcttcaacttttaatgcaattttgaaatatttgtagagagcccatgccttgccaggcactgtcctagttataaaaatgaataaaaccgatgtacttagtttttgggaagatagttgatcatttaaaagtgtaatatgtaatagcctatgaacaaactcatggaagcatatatgaggaagaaagtaattctaccttttgaaagcagacaatgtttgagttaggccttgaaggatggatttgtagaaaataatattacagatacaaaatcataaccataggtcagaagggtgaggacatttgatctaccagctccagcaagataacctctctgtgccttaattttcttatctgtgaaatggagataatactatttctctcattggattctttttttttttttttttgagacagagttttgctcttgttgcccaggatggagtgcagtggcacgatcttggctcactgcaacctctgcctactgggttcaagtgattctcctattcttctacctcagctgggattacaagcacccgccaccacacctgggtaatttttttagtagagacggggtttcaccatgtt

SEQ ID NO: 105213 - DNA, 1032 bp, Homo sapiens
atttgctgactaccagtcagaaggaagagtaagagttgaggcttgactctgagatttaataagttggtttgacctgttggatatttattcctctttagtagaaaggttgactctgatttttctgtgttatgtctgggtagacatttctctggcattttgaaataaaggatttaaagctcagaagagaaagatatacattcgggaacaattattaggtgataataaatttattccttctggcagataattgactgagaaaagtatcaaagtcagagctaagtaatataacattcaggggaaatagaggaagaggttctgggaatgaggttgagaaaaagctttcatatcttacaggaaccagggtaaaatagagatgtgaaggaatgccagaagagtttcaaaggtgatgtggtccagtggttcccaaacctggctgcgtattagtattacctgggaaaaatgttaaaggtttatctttaaagatgaagatacagagtgccagatgtgataggagaaagttttggagtagggcactggaattagtatctttggaaatatctccgggtggccgggtgcggtggctcacgcctgtaatcccagcagtttgggaggccgaggtgggtggatcacgaggtcaggagtttgagattatcctgaccaacatggtgaaatcctgtctctactaaaaatacaaaattagccaggtatagtggcgcacgccttgtaatcccagctactcaggaggctgaggcaggagactcacttgaacctgagaggcagaggttgcagtgagctgagattgtgccattgcactccagcctgggtgacagagcaagattctgtctaaaaaaaaaaaaaaaaaaaaaaaaagaaaatatctccaggtgattctgatgatcatcccaggtccaggctggaacatccttgacagagtcattgtggcagaactcaagtcatgtaaggttggagaagtcactggatttagcagagagaagtttctcttggagtatcctgaataagcatcagattgag

SEQ ID NO: 105214 - DNA, 1069 bp, Homo sapiens
ttttaatcccagactgatttatttctttttcttagtataatttgtttcatgaaagcaaagttattttagtattaacaaaatataattgagatgaaaaatctgatggggaacatttcactagtgagctctgaaggccagacagaaatcactggcaatgggtagtaatgctgttcctcagaggactaggtgtatgtactacctggggtgtcccctaactacggcatgtttaattatttgaaagatgaatttgtttgggaccaaagcaagagcattgcagtactaaaaatattttaatgtttatccccgcctctattctcatgttaattttgaggaagtatatctaaaaatagtttaatcagattgttccattagtttactttgtttttccttgtaatttacttttaatctttgttaaatctcttgttacgctatagagttttagaaagataaccttattgtctgtaggtcagatgttttagattggttttgcataatataaaaatttaaatatattaactgttcactgagttaacatttgaaatgacttttatatgtaacagtaggaaattaagtcttgctgagttcctataaagaaattctttttcccccctttagtttgctagtggtgcctttttacatattaaagagacggttttatctgccttaagtcgagagccgaccgtggacatatctccagatactgttgggaccctcagtcttattatgctggcacaggctcaagaagtattttttttaaaagccacaagaggtaactccaatttatctttttgttgcatgtgaaaaaaagtgataaggcttttaaattaagaaagtgattagaatataatatgttcaatgtcgagctgtccttcttgaacttgatacatgaattatggaaaattttcagctatccttttctgaatttgtggcacaaatttacatttaagaatgtaggctgtgtttgaagtcatgaaatagatctttagtaattgtctttaaacactccattctggaatagtatttatgtatgtttttaacatgtcagacatttattcgcaaatatttattg

SEQ ID NO: 105215 - DNA, 1487 bp, Homo sapiens
cccctttcccccactgctggcaaccactaatctattttgtctgttctaaattttgtgcagaaaatgtgatttcatcaagaaagatgttttcagatgcgtgtacaaacttgtgacctcagtgtttatactgagacatgtcagattagctcatatttattttaattataatggtcatattgtattccagataaaatgaaagatgccatcatagctaaattggctaatcaggctgcagattattttggtgatgctttcaaacagtgtcaatacaaagatactctccccaaggtcagttattgtttttataaacacttgcttactttgcatgtgaaatatttagacttttttgtgtataagaagcaagttgaaacttataaagaaatttgaagttttaatagagttatctgaagtatatagtagaaatagtttttttttttttttaatttaagatgcatgaacaattcttttatgtttaggggatgcctttgtctttaccttttactaaacttgtttttccaagctagaactctttctggaaaatgttgaccatctgttttcaatacttttatcaaatcaaggcattgtgtagttctgaatcattggtgatttggtacaagcatgtatacttgagcatgttgatgattcacacttttaattattgtcctgttttcttaaagatgagccttaaagcgcaaaaacagacataaagaaaaaaggaaaagaaaacttaacaaattcatctgatactttgattagaattcagttttgccaacagggataaaaaattgggctgctaatggacagctaaggaaagcaaccatcttaaaccacatatcacaggaagtataatgttttaatgtaaacctttctgaagtgacaattgtaaagactattcagtgatgatcatttgttaatgacaaagcaaatcactagtaaatttggaatgattaataaagaaaacttaaagattgagtgaaatatatgtttcaactacttccttcagaaatgttcaaggaattagtttcatcatatggtatctgttacatgattttttttggtaggggaatttattgatttgtaagtcatattcaggaatctttgtacattaaaaaattgcagacaacttgggggtgaagtaaaaatgcacataagtgcattaacagtacttattactcagaaaatgatcaataaggaattaatgtgacgattcctggggatttaagatacaccaagagcctagtagaaatttgcccaggattcttgggtattaacagccttcctcttaaaaagagacttgggatctcctctcatgtttttttcatctgaaagacctcatgttcagctgcacagtgttccgttacatcctgttgggccattagttcagtcctgtcatggagagaagaaagtcacctacaaagacttggaagctacctctgcagcattcctggtattccttgaaaatctcctgtttcagaaccaagttgctc

SEQ ID NO: 105216 - DNA, 1037 bp, Homo sapiens
aattcgcttatatttctttttaccaatttgtttttgagggaacagtgatttttaagttttttcagatgcataattccttttggtacttaacttcataataatcactgaataaagttaccttgatataaatacagtaggtaaaatgtaaaaccctctgaagagagggtgaaaatactgcaaagccttccaaatagagaggatagtaaaatgccattttaatttggtttaaaatgctttgtttaaataggtaagctgagaaaaccctccagagagcctttagaaattcttttaagggtttctgaagtatgcttgcatttctgtagtgaatttgaaaacctaatccttccacttaaataggtttaatgttattaaacaattgacttttctctaggaattaggaaggttttcatgatcatgaatcttttaacttgttacattttttatgataatgttctgtaaaaatgcttttattatttttattttctttaggagtcttagatcatatttaatattaagttgttgggcctagtaaattgtataaatgtatctcatgcagatctcagttcttcggctctaactatcattgacaaattagctttagatcacattactctctggattaaaaaattgttcttgttccttacttgtatttgttctttgcttatagttttacaatgagttgactgaaatcctggtcaggttccagaacaaatgcagtgatatagtttttgcacggaagacagaaagagatgaactcttaaagtaagtctgttttgtgtaccaaattgtacttaaagaattttcttttaaaaaatcatgtagagacttttggtatgaacttggtagtatgagatagcaattttcctcttctcatggaagaaggaactagatagagtattttacaaagcaacaagtaaacagctgcataatctgggaatgaaaggatgaaaagaagcagaaactctagatgcaggaagtacagtgaggtcacagaaatgataaaaacagttcaggtggcagatctcaggaagtgccag

SEQ ID NO: 105217 - DNA, 1058 bp, Homo sapiens
ttttataagcagttatttacttaagaagtagttttgttttttttttttgatgaatgtatactagttttctttatgtctggagtgactggggcccttcttgagagggaaggttggatgcggacagtgtggggctttgctgttaattgttaaatcagggcaaaaggtactgtctcagatgttttgggacatgtcatatttacttctttgtgtacgttaatcagtgcagtgaaaagatgattgacatcatgtattacatggagtgcattttaccttaggtattgtttagtgtgattttgggataaatttcaatttactgttagaggagacagaattttctaatatttaatactaaattgtaatagtattttcagcaatatatctttcatgagtttatcttagtgacaggtgatgtgttatcttttaatataaaatatttcaacgccacatttctttgaatatcttcaggaagtttttatctagaaatttgcataatggtttgcataaaaggttagccttttcacctgttttattttgtataaacactgatatagtgattaaaacattagctacataactatgagtcactgtagttttctgataacttttagatagatgatgttaggagttttttaaatccagggactaccttttattagagggtgggcagtcttttaggattacttgcccagtttgacacgtttcttactctagctgtaactgtgatctctgaaaatgtttactttttcccccagtcttcagaaatataaaaaagatacaacttcattttattaaacaataggaagaaagaggatttagattctagtcaagaataaaaatgtagtatattttgtttttttcagtttttgttatattgataaataattatacatattatggggtacatgtgatactttgatcatgaatacaatgtgtaataatcaaatcagggtaattaggatattcatcacatatttgtggggcacatgtgatattttgatacatgaatacaatgcataataatcaaatcaaggcaattaggatattcatctcaaacgttt

SEQ ID NO: 105218 - DNA, 1051 bp, Homo sapiens
ctgaaaggtagtttatattcatttggtttacagacttggaatcccaaggacatgggtttgagtctcagcttgtccactcaccagctgtgagttcagataccagtgtgtgcctaagggtactccaggatccagctccaaagttacagacttcctggtcatatcatagctttagccagccattccctaaatcaggagtcaacacatttttcctggaaagggccagatagtaaatattttaggctttgcagtccatatggtctctgtcgtgactacccaacccccctctttgtagcacaaaggcatccatcgacaatgagcaaacgaatgagtttggctctgtgtggggaggtccagtattggacctaacggctgggaccagtgtgtacctagggacaccctggctcttgagctagactggcttctcccttttcagaggaaattttgtctcaggtttcattgacctgccctgttgtgggccttggttggagtccctgaagacatcctaataaactgccttatctttaaatctggaggagccagggttggggatcttggctgcttcctccctagaatgttccaggcttcttattaggttggtgcaacagttattgcggttttgccattgaaagcaatggcaaacaccgcaattatttgtgcattaatctaatatttaaacttggtctttagggtacagctctacaaacccagtaaagtggtagcttttgctaagttgctaaaaagcaaggtgttattagcccccgcaaagggggctgtgggacaaagaagatccacttccctgtttaagcagtagcatgaccatacagcctcaaccatacctggccttatggctgccatagctaccaaaggtaaaaagttgtcactgtaggcaaaggatcatctgttgttgtcatctgtgcattttcttggcccagagaggacgccatacgtactccaggaaataaaaggaaatttacattttaaggtatttcacattttaaggaaagacaggagccaataaaatgaaacattaaacgaatcacctagtgggcag

SEQ ID NO: 105219 - DNA, 1029 bp, Homo sapiens
ccgtataaatatttgtgtatcaattgtgcagggagtggggggcaggcactgttccagtgatgtgttggtggcctgaacatcttttttccctctgtgatataatgccacttgtcatttataattaaagctatcacttcacaactaacaaagtcattctgaccagcaagagacgactggaaggagtactcttccctacagaacaccaaactggcactgagctgtttgtgatcattgttttcattgtcttcctgtggttattatgttcattattaataatgatgatcatgatcattaggcctaggaagaaaataatgataaaatgtctgtaattacacattataaatacaacatgtttttattattatgttgtatagtataaattataatcattataatcactataacaatatgaacttctgcttgagtttgtcttctatatgatcaaagcatttgaagacatgatctcgttagccttcatgacattctgtcagaaggagagcaagtttcaaattacaaacctgtgtgttggagtaaatatggactgaagggggtgttgtgaagaactccagaaacccaaaacaaaatgcagccaaataaacagtgagtagacacacagcaggaagatgtgtctgacatgccataaagtctgaaatgaaaaggatttctgaaagttcagttctcttattttcactgtgcattttgtctctgccatttcccagttgtgtgaccttgagaaatttgctttgcctctctgagcacggtgattaatagtgctttattttcctattgcaattagaggcagtacctatgttctgttcctccccccactttcagtttaatgaaatgactcaatgcagcctgaaataaggtcccagcctgggaacttttgggaggaactgaatattcaacccagcacctggcacggagcttggtgcatggttggtttgtgcttaatgaatgtcagctgaatgactaaagatataaaaggagattgctttatttaacttatagacaggggaaattttaagt

SEQ ID NO: 105220 - DNA, 1052 bp, Homo sapiens
agttttctttttcaggactttctgatttttctctttactagtaatgcaatttcttcaatagaaatggtttaatatataagttacacccacatatacttattaattatatattatatatatattctcagtgagttcagcagtttgtggcttttaaggaatctctatttcatctaaattgtcaaatttatatgattagacttatttataatattttcttatcaaccttttaatgtccatgaggtctctagtgatatcctacttcacacataagcagggcttttgtgaggtttctgcaggacttttctgcaagtctatgagtcagttgtgaaggaagattcagatcttccttgttgtacacagtaaataacacatggtaaatatctccaatgctgggagcaggcacaccaactgccaagcacctactacaaataggtagtatcacattagatgtagaactgtggcacaagatcaatctgtaggtggacatatactttcccatggttctttacaaggcatgttgagcatctttgatgagtttgtcaacttctgtcaataataccattttaaaatatctgacagtttgtttcaagttgctgtgactgagccactgttttcaacatcttctgaattactacctcatcaatatttccagcatcactgggattaacttcaaggtggtaattacttgcaatggtgctaatttcaatttttttagatggagtcctgatggtctggtatttaattctcaatttttccactccaacaccataaagttgatgtagaacacacatagcacttgtcttttttccagaacctgatggtccatacacttaaaggtgaggaaactcaccaccctgcaccaggttgtatagctgggctgcctgctccctgtgatactccatccatcccaaggattagggctggtacttgtctacccagaggctcatgaaagcttgagttcctggggtctgataaatgaaagtcccacatacatgtctgtctttttaataataaccattccggccagtgtgagatggtatctcattgtggtt

SEQ ID NO: 105221 - DNA, 1040 bp, Homo sapiens
tgctcataaactacacacattgctgaatctgtaattcatagaaacatatcatggtgaccatcttgtaaatgccaatgccaagctaccagtccctttcattacatgccgtaattatggattaaatgatttcataaacatattggttgtttcaaagttggcatgaggctgtcttagagcccctgcaatctgtcatcactgttaatgagatatcaaccttcttgtaacccaagcaaaaaaaaaaaaaaaattctctttgaatgtcagccaggggagaaaaaaccctccagaacttctgcaaactctgcaacctcctctcaaacaccatatccagaaagtcttcaggaaaagggccagtgacatgatcaaatgacaagggcaacatctgtgcaatataaaatgtaggcattgatgatgtctgggattctttctttcctcacagcagcaaggaccaccttaaacaggtgaagctctttgaagaggcttcttaattttcactgaagaccttctaatagtaaagaataaactcatacactcaaggatcttggaggcatggcttctagatcttactatgatttcaaaatgtcctagaaatcttgtataatatcttttgatttttattatacaccttgcatcctattttacaatatgtctaggcttaatttagtatttaggaagctttggagatctattggaagatggcagataggaggaagaactagcttgcagatcccacttggacagacaaagcagtgtgcggagactcacatagtgaacttttgctctaagaatgacaccaacataccaggaaaactgagagaacccataaccctttgaaggaactgtatcaccactgcagattccttgagacattgaaaaatggtgagttggcttgctttctcagtggggaggctggtggcctgcagcaagttctcagccctggtcactggctgccctactagactcagtgctgttgtgggggcatggtgggagtgagactagcctttaggactgcaggacacatggaagcacagcaaggcctg

SEQ ID NO: 105222 - DNA, 1116 bp, Homo sapiens
cttatcacctttatcctgcttataatctactttgtgctgctccacttactcctctccagctgttgtccacccttctctgtcctgctctgggccccagcaggctggactttgtggaatgcatttcccaggttcgtttgccctctggcttctgattggatttgacaaatggagttaccagcaagcaactgaagggcagagggaagaaattatgtgtttattccctggctccatccccactggacaatagttagacatggtctctgtttttctacccaaggtcacattgccttttgggaaggtcctctccagcagctatagctcttgccaacttcacatcaccactaaccctttgcctgtcaggaaaggcaatgtcttcccactgattttgatcctatagtgccttgctactctttgttagtgcccttcaccctatctacatctttgcaaacacctcttcgttaaattctcctaaattataattgcttgcaccatctgttccctgcaggactctgaccaatccaccactgttaagataaactgagcacaaagccacttcaacaaagtatttgagtagcaaacaacaacttttttcatatgttcatggagcaagctccaagttagaatgaatatctgtctccacattgcatactaggcttcctaattaatctatcgcatcatttccaatttgtattatgaaagcttgtgctaaacagaaactttaaagagatctgtgttgtgagatcctgccacagacggcagagtctgcataaaagaagagctattccaacataaaaacagaataggggtggcagagaggccccactggagggagccagccttcagcaggtggtgtcagggagggtcagaaccaattgcgagaggttaatttgggttgctctgaatggccgaccccaagaagatagttcaggataggtgatgcccacaagtaattgggcagaggaggattctcatggtgattaattaaagtcttggcccctgactcctgtaaactcacaaggaaaattaaatttcccactagattcctcccctgcctggggacagaaaagcccgttgttcagcccctcaggatgcaggcaggcaaaagaattattacaa

SEQ ID NO: 105223 - DNA, 1041 bp, Homo sapiens
gtcctttctagttcacctctggaactcagctttgttcagaaattttgatgcaatcataaggtaggtttggagtaattcagtactagtgatagttatagtaaaagtgtatgactggtttaatttttaaaaataaatcacagcaattgtgtaagatgtaatctttgggataaactgagtacacggggtctgtctgtactcttccagtgaatcttccactgtaactttcagtgagtctataattacttcagaattaactcttaaaataattatagcaaaaacaggaaaaaaaattatggctgattcaaaggtcatcctatacagatggcatgctcacttcctgcttaggtgggaaagaggtggagtttctcatagcctcactggagcctcacttacctgtgctgtggccacagtgagctcctggtatcctgttctcagctgtgctatgcttctctaaaatttagtttttgtgtttttccaaaattagagtaagcccattgaagtgtgtcactttgtagctatagacaaatggctcatcatctttgtcctcaatgttatctttagctcctcaacggagagctgaagcagctgtacaccgccatcacacgggctcgggtcaacctctggatctttgatgaaaaccgagagaaacgggctcccgcattcaaatatttcattagaagagattttgtccaagttgtaaagacagatgaaaataaaggtaagatcctgttaaaatactcttaactgatggaggaatcgtgtttctctcaactgttcttatggtcaggaataaaaggtgtggtattttgaaagtgctttctttcttttccacaatcttctgagaaatggaagttgttacacatttgccaaggtgcatgggaaagtgtagctgtagtgggattgggaaggttaactccttcagggaagatcttttatttgtcctttaaaagtggggattatggacagggctagaggaaataggcccttttgggagaatacaaagtgctatgagtgtttgtacagctgattaacagtatctat

SEQ ID NO: 105224 - DNA, 1094 bp, Homo sapiens
caaggccatctgcaatgcctacaaccggggcttgtcctgtgtcctgcggaagaagctgaaaggtatcaataaaggccaagtgtcagctaacatgaaaattcaaaagcgtatacctcgctgctatgtggaggacacagaggccgagaagggcagggagcatgtcaatcctgagtactttcccccagccagtgcagtggagacagaatataacatcatgaagttccacagcttcagcaccaacatggcctttaacatcctcaatgacacgacagccacagtggagtaccccttccgggtgggtgagcttgagtacgcggtgatcgacctcaatcccaggccactggagcccatcatccttattgggcgaagtggcactgggaagacaacctgctgcttgtacagattgtggaagaaattccacgtttactgggaaaaagctgagcaggcaggaagcccattgctggccaaacaggtctggctgaagagaaggttggaagtggaacccggaaaagagagtccaggtggggaggaagaggaggaggaagaggacgaggaagaggaagattctattgaagtggaaacagtagaaagcatagatgagcaggagtatgaagcctgcgcaggaggagccggtgtggagccagcaggggacggccaagctgcagaagtatgtgcaccagaacatccccaccagctggagcatttacatcagatctttgtgaccaagaaccatgtgctgtgccaggaggtacaaaggaatttcattgagctttccaagtccaccaaggccactagtcattacaaaccactggaccccaacattcacaaactccaggacctgagggacgagaactttcctctgtttgtcacttccaagcagctgcttcttctgcttgatgcttctctgcccaaaccattttttctgagaaacgaagatggaagcttgaaaagaaccatcataggatggtctgcacaggaagagtcaaccattcctagttggcaagaggatgaagaggaggctgaggtggatggggactacagtgaggaggataaagctgtagaaatgcgtacgggtgacagtgacccccgggtgt

SEQ ID NO: 105225 - DNA, 1048 bp, Homo sapiens
ttagcagcatccctggcttccacctgctagctgccagtgacactcccctagctgtgacaataaaaaatgtctctatacattgccaaatgtcccttggggagtaaatcaccattggttgagaaccactgagctctttaatggatttcagattttttgggggagttcagcattctgagatgcccctggctggcatcactctcaaaccccagggtctgctgtcccctaagaagagtggctcagtgctcacagggttttgtttgtgtctttcagctgacattggttttagcttcctcagccatctgttggatctgttttggtccaaccccactgaattcgactacctcaaccccaatgtccaggacagcaatgggaacacgctgatgcacatcctcttccagaagggcatgctaaagcgcgtgaagaagctgttagacctgctggtgaagtttgacatcaacttcaatctgaagaacaaagagggcaaagatgcacggcaccggattaagaagaacgactctctgctcttggcctggaacaaagctctgatggagaacaggaggaggagccggcaggactctgctgcccacctggggaagctctcaaagtccactgcccctggtcacacatctcagctcaagtcccagggttcattcaagtcagtgccatgtggtgccactgccagaacactgcctgaaggaagtgcagtccctgacagctgggagactctcccaggtacccaggtgaccaggaaggagcctggagctctcaggccctgctcgctgagagactgccttatgcaggacatcacagttttgattcagcaggttgaagtggatccgtctttcccagaggactgtcttcagagctctgagcctctggaggcaggagctggcaaagaaggaaagaaagatgacaagccgactctgggtgcaggggcccctgactgtagtgaggtgggggaaggacatgctcaggtgggccttggggccttgcagcttgtgcctgatgataacagggggaaggagggcaatgatgatcaggatgactg

SEQ ID NO: 105226 - DNA, 1027 bp, Homo sapiens
tgaaattctgtgattccaagtgctagggtagatctgtgagcaggaggccttaggcctcattagcaggaagatagtttaatttactgcactcagggaaagaaccttgtcctctcttcccagtgtggggtggatatgaatagagctccatggcctaggcagagaatgagagaatgggagacaggcaactcctaatagattattatcccagccagtcaagggagggcccaggaatccagcccaagtggcaggtccaacatcctacctgcagtgaggctctggtaattcccaaatactgcagacagaagcatcttttaaaaggccagcaatctgcccactagaatgctgaacttatcatgtggggttgagtgtgggcagcgaggcttgtttagggcaaaaagttaagaatgggcatcacagaggttgcagtgagctgagattgcaccactgcactctagccagggcaacaagagtgagactctgtctcaaaaaaaaaaaaagaatgggtatcaatctgaaagaaactagaagtgagatgtggccatgggctcagttcctgtggtcctaagtccactggcaaaagccatacatgagagaggctggagctgagactgggtctccagtcatggtcataacagagccgggaattcttagatctgttagcatacctgaatgatctcagtaggggcttctcaagatgtgctgtgagacctgtgaaaactggcttaacttctctgggatttagtctcttcagcaactttagatagggtcagtagtttaacaactgggtctctgaaaagaaaaggtcccgatttgtagcatttgctaactttggtagtataaatactctcaccatggccaatttccagctactaatatgacatacaagacttggagttaggaggagatgtgcatcatcaactcagtagctgataggagccggctgcagcacaccattgacagggtctaatgggctccaagtacttggggcttttaaaacgctgatgtgaggaataattgattgggatgg

SEQ ID NO: 105227 - DNA, 1101 bp, Homo sapiens
tctgcatcttttaaatgtcactgttctgtcagaagccaggccggagttatgggaattccaaacaactgcttcttgatggctgccccttaagataacctgggtggttttcattctgcccccaacctgaaagggggcagttaacaggacttcttaagatgatgcagccaatactttaccaaagtactcctttttggaaggtaaagaaattggcgtcgcccagtttctaaattttgaaaaacatatttatgggaaactttgtgtcatttcatatagtatgcgtttgttttgatatttacttattttttgaaattaataaccttggaagaggtgccaagttattctgagtcttgacctgtccccttggacattctcatccatgaatttgagaaatatggttggaggatcaccaggtgcaataggtcgatgggccaccaggtcagaagaatgtgtattgatgacaagagttggtagatctgggttccagtcttgtttcttgtcatgaactaactgcatgatatgccatgaaacctatcttcatttgtcatagtttctaatgttttgggtaacaatatttgtcacatttttcttaaaggaagtgagttttgtaacttaagcttccatttcctcctctataagtggagataataggcacttccttagtggtttatttgaggtattgaacataagcacatatcactgggcttggcaactagaaaggcaaagcgaatgttaattatcctgcctaactcttaggggattgattttatgatgaactgaaaataattgccacttcaaccaattataaaggacttcatactactttgaaaatgcctttctttagggtatctttaatttaccatttgtctatgtgtgaacttaattggaggaccttttcccaaatgctgtagactttccccacattaaaatccctaaattatgaaactttcttttaggtgactccattgttttgcaaagtttcttgccttgctttgatcatattttcacaactggattcccaacagaagtgtggcaatctgtaatagaaaagttggcaaagaaaggattatggcatgtaagtaaaaggagatggctctcacgggg

SEQ ID NO: 105228 - DNA, 1041 bp, Homo sapiens
aatacaggtatacacgagtacacccagctaatttttgtatttttatgtggagacagggtcttgctgtattccccaggctagtctcgaattcctggactcaagcagtccgcccgcctcgggctcccaaaatgttggtgttatacgtgtgagcctctgcacccggcggcaaaactggcttttaatcaaccttttggctaaaggatttctctttttatttatttgtaaaaggatttcccatttttatctttctttttgatattaaaatgttgcctcatcctacccagtaagtacttgaatttgaattctcttccttttcatttttgcctgcaaactgaccagtcttttctgagttcatctcttctgtacgttttgtcaagtgcagtgaacagcaactacaaaatattttgtttttctgtctttttctttagtaaagggtagatgatctgcctttcaggttatctcaaggggcagtttcacctttccataatataaattacccttgtgtaagttatttcttccatcttctgatagcaatttcctgaatgcctgccagctaaccattaagccagtgttcagtattttagcattttaaaaaacaagggaccaatttctgtgtcagcatgggctagcttgccattgaataacaaaggcaaaatctcactgtctcacacaacttttctattgcaacttgcctagggactttggtttagatcataggttggccatgatcaaactatggtccatgggcaaaatctgtctagctccttatttatctaaataaagttttactggaatatagccttgtccatttatttattatctgtggctactttggttctacaatggcacagctgagtagttgctacagagtgtgtacatctcacaaaacctaaaatacttattctgtggccctttacagagaaagttcaccaatttgtgctctaagttgccttcattctgggtctcaggctgacaaagcagataccatcaggagtgtgggtgctaactttgggaaatgaaaaaagagtatggcaaatcact

SEQ ID NO: 105229 - DNA, 1935 bp, Homo sapiens
tatatgtaagatagcacacaagtagaaatatttaaaagcagtcttattcacagattgcagtaattctgtatttctactaagataatctgctttgtgccaaaacagtaatttccaaacttctgttcaccatgaaaaggcaatcttaaagttcattatgtaaaactaattataaacaggacccaatttatattcatagatcctctcaagtattatacaatttaaaaactcttgttccaaagtcctgtcttaactattgaaacaccttaatctgtggttactaatccagcaaattcaaggaaccaggctatgactaagaatttaggtggaattgatgtctgggcaattaaaataaatggcataagagcttaaaaaccaaagttgtgccagtggctttcaactagaggcagtaacctgtcattccagaggatgctgagaaatgtgtaggggcacttttttggttgtcatatttactaggggcttctgttggcatttaagcctaaagacactcacccctgcagtgcatgggacagcctggcacaatgaagaattagccctcccaaaatgtagattattttatttcaagggatagggcagattaccattagaagcaaaattaaaagtacaagctgggcaaactgacagaatactagataggagagactaattccaaccttctaaatttggctagtaaagtgcaataaaggcattgataagttctgttagctcaccatagcacttgtaaatcaggaattaataattgaatcagatttaagggctctgtcctgttatacatatttaaggcagaaaaaaagttacatgtcgattaggtacttatcaagaatggtcaagctgagattttggttaatagagtaagcttacatatctagagaaacaacatagtggaaaaccgaaaaaaaaaaacagaaaaatctaccggtaatttcccaatagctttgaatattcacagcagagctttattacttgagagaaagactggaagacctgaaagccacttctgctttctaaccccagttccttaaatattgaaatcttgtacattttgtgaaattccagtatgttttgcttaaggtgttaataaaattagtttgcatcatgtagtcattgagtgagggggagatataagccaaggattttaaattgacccttagctatagagaatttgctataagctagtcttgtttgtaaaaaaaaaaaaaaaaaaagaaaaagaaaaaagtgtattttactgttttctgtattaagtaattctgtaactgcatggcagtctttttttttttaaataaatatagttgttactggtcctgttgtagcagtgaatatagttaaaatacgtacattaaaaaaaaaattattaggtccttaccagttactgtcctatagctcattcctactagttttcttgacagatttgtattcccagtgtcccgtattgccactcaaattgctctactatgctaagtccttgttaatagtcttaccctccttgaaacacttgaacacttgatgactttagctttgaggagataccatctccaggtgtgctttcttagtctttgcaggcacctcttcccttcaatatctgttcttcgtatttttaaaaaaatttgttttagactgccttgttctgtgtcagctcgctagctgatctcatttccttccatggtttccttaccatttatatgcaaatgactgtcagattcatatctcctttctagatcttccctaattgatgtatctaattgctaacaaatgctctttgctgtctcaggcactacatgtcattgatcttgcccccaatcctgctcctcctctcatgtttcctctttgactaaatggcattaccactaccaaccattcatttgtcctttttaccaattctccaatgctgccattttaattcaggccatcaaccta

SEQ ID NO: 105230 - DNA, 1101 bp, Homo sapiens
gacatgaaaattgcttgaacccgggaggcggaggttgcagtgagctgagatctcgccactgcacttcagcctgggtgacagagcaagactctgtctcaaaggaggttgcagtgagctgagatctcgccactgcacttcagcctgggtgacagagcaagactctgtctcaaaaaaaaaaaaaacaaaaaccaagaaaagaaaaaaaaactcttctaagaggatttttttttcctggattaaatcaagaaaatgggaattcaaagagatttggaaaaatgagtaacatgattatttactcatctttttggtatctaacagaaagaagatctggatattgtatgtgaaaggttcactactagtaaactgcagtcctttgaggatttagccagtatttctacctatggctttcgaggtgaggtaagctaaagattcaagaaatgtgtaaaatatcctcctgtgatgacattgtctgtcatttgttagtatgtatttctcaacatagataaataaggtttggtaccttttacttgttaaatgtatgcaaatctgagcaaacttaatgaactttaactttcaaagactgagaattgttcataaataaactattttacctgcagagacctctgatatatgtttcttgatggaagtacccagtaccacctatgaagttttcttgtcaaaaaatcaaatgtgaatctgatcattacttagatctaagtaccaatatatgaaaaatataggagacaaggaagcatggtaaatgatactgagattgggagactacatggaaaaagacttgttcccttcaacagatagacagcagggaaaaaagaatagagaaaggagtaaagaacctgtagattaaaagacatttaagggacatatgaaccaggtccagtgtatagatcttacctaaatcctgatggagcaaactataaaaaaatttttttgagacaaatgtttgaatacaggttgactatttgatggcattaaggagaaattatgaattatcttggtataagaatattgtcatgggtttttttttttgagtccttacctgttaagatacatactaaaatatttgtgggtaaaattatatga

SEQ ID NO: 105231 - DNA, 1216 bp, Homo sapiens
tggtgatgcatatctgtagtcttagctactccggaggtgggaagattgcttgagcccagcagtttgaggctgcagtgagctgtgattacaccactgtactccaaccttaaaataaataaataaataagggaaaatatcttcaacaaaggatagttctgtctgtttctcagtcttcctcaacagataaatgtgtgaagtaatggaaggtggagatttcagattacacaacattaatgctaagggcgtttgactctgtgtgaattctaattgccctagatctagacgggctgatactattagaatcccctgtcactaactgaagacagagttgtaagttaatgccttcctagatagcctagattgtggtatgctgctgcatgctaaaatggctccccttccatagcaggatgaaatagagtcattatcttggcaaccagcccctgccaatgtgctctcagtctgcctttccagccccttctctctacctattcccagctgccatgtattctaaagcctctatgctttcatttttgtttttgccttcctggatggtctttcctgctgtctccacctgaaactattcctctctaaagaacagatgaattgccatctctctgggatgcttttacccaccctcactcccacctcaggctgaatggacccttctctagatcgcttagcatattgttctacagttaggtaaaaagtctacctatcactagatcaagagctttgtttttttttattaatttaattttcttttttttttttcttttttttttgagacagagtctcgctctgtcgcccaggctggagtgcagtgcacaatcttggctcactgcaagctccgcctcccaggttcacaccattctcctgcctcagcctcccgagtagccgggactacaggcgcccaccaccacgcccagctaattttttgtatttttagtagagacggggtttcaccatgttagttagccaggatggtctcgatctcctgacctcgtgatccacccacctcggcctcccaaagcactgggattacaggcatgagccaccgcgccgagccccaagacctttctttattaccagggcttccacagacctgacacatggtagttcctcaataaataattgcagaattactgaaaaattttactgttaacttaggcagtggtaaaaccattgtttggtagctcagaactcagcaagtaaatag

SEQ ID NO: 105232 - DNA, 3501 bp, Homo sapiens
tgtaatcccagcactttgggaggtcgaggcgggtggatcacctgagatcaggagttcgataccagcctggccaacatggcgaaacgccatctctactaaaaatacaaaaaaaattagctgggcctggtggcaggcgcctataatcccagctactcgggaggctgaggcgggagaatcgcttgagtccaggaggcggaggttgcagtgagctgagatcgtgccattgcactccagcctgggcaacaagagcaaaactctgtctcaaaaataaataaaaataaataaaaaagagatagtggcgtgatatccttgattctatcagcaacctataaaagtagagaggagtctgtgttttgattcagtcacctttagcatttttatttccatgaagtttctgctggtttatttttctgtgggtaaaatattaataggctgtatggagatatttttctttatatgtacctttgtttagattactcaactccactaatttatttaactaaaagggggctctgacatctagtgtgtgtttttggcaactcttttcttactcttttgtttttcttttccaggtattcagtacacaatgcaggcattagtttctcagttaaaaaagtaagttcttggtttatgggggatggttttgttttatgaaaagaaaaaaggggatttttaatagtttgctggtggagataaggttatgatgtttcagtctcagccatgagacaataaatccttgtgtcttctgctgtttgtttatcagcaaggagagacagtagctgatgttaggacactacccaatgcctcaaccgtggacaatattcgctccatctttggaaatgctgttagtcggtatgtcgataacctatataaaaaaatcttttacatttattatcttggtttatcattccatcacattattttggaacctttcaagatattatgtgtgttaagagtttgctttagtcaaatacacaggcttgttttatgcttcagatttgttaatggagttcttatttcacgtaatcaacactttctaggtgtatgtaatctcctagattctgtggcgtgaatcatgtgttctttcaaggtcttagtcttgaaaatatttatagtgtagtagaactattttatcctccaatgctccttcttttccttgtatttccattatcatcactttaggatttcacttatttatcattcaacatttattaattgcctctcatattccaggctttgtgctagaagttagggatataaagacaaataagatatttcctgcccttaaagactagattcgtgttgctaagtcttcattatcaagaaaagcataagtggggaaaagtgcttgcattatggattcctcatagttgctcccctctgcatgtaaaaatcaccatttccatcatagattcctagcggtctcaggactttataaagcccaaagtgcctatgtcataatatgaggaaaaatactgagacccttccatatatgggaggtatatggatgagacagctcctgacttcacttttcccagaaatctgaaaagcagcagcagtcattccagagcccagtttctactttgaagggcagattatttattctttgagctaacctgactgaggaacaattagtttgcttttaatttactattttctttttcttttcttttcttttttgagacagagtctcactctgttgcctaggctggagtgcagtggctcaaacttggctcactgcaagctccgcctcccgggttcacgccattctcctgcctcagcctcccgagtagctgggactacaggcgcctgtcaccacacccagctaattttttgtattttttagtagagacggggtttcatcgtgttagccaggatgatctcgatctccagacctcgtgatccacccacctcggcctcccaaagtgctgggattacaggcgtgagccaccgtgcccagccactattttctttctaattgttaatgaattaattttttaaaactgtgctcctagagcgaagggagagctctgtttacagtgtaacttttcagagcttctttaactagattttaagatcagaattagttgttgtgaaatcttagggactgtacaagattagaaatcctctatagcagcatttcccaaagcaggcttccagaacactagcctcatgaggcattttgggaaaaaagagtttgctggttcagtgtgtatgggcagtgccacaagccgtaccctccgttgaagacactcattccacacattactgcataaaaagcttccaccagccattcggcaaacttattgagtgtctgctatttcctgggtattgtgctatatggtagggttatagtagtgaacaaagaagaaatgatgcctgctctcagctgactttgcagttggaaagacacatgaaataattacgccattcattagcagattgtgctagatgcctcactggaaaaataaaggacatgatggaaaactctgtagggtcagagaaagggatcattagagaaggttctttgaagaaatattttttgaaatatgaaggataaataggaattaactaggtaccaataggttaggagtagagctttccagacagagggactagttcttgggaaggtctccagacagaaataagtgtggcttgtctgaggacctcttattcgcctattaaccttccctccccagtaaacactcctgggaacaacacacattgtagaaccacgttgtggtgctgttcagtatagcaagtaattcagcagagataagttcttggaatctcatctttgggatttagttactaagatacattcaagtttgagcaaaataaggtctcagagcttggattcattgttctgttccagcaattagagcagtacctggcacatagcacaagtgcttgaaaacactgactgagtagggtaggtgggtgagtgggtgggtgggtgggtgggtggatggatggatgggaggatgggtgggtgaatgggtgaacagacaaatggatggatgaatggacaggcacaggaggacctcaaatggaccaagtcttcggggccctcatttcacaaagttagtttatgggaaggaaccttgtgtttttaaattctgattcttttgtaatgtttgagttttgagtattttcaaaagcttcagaatctcttttctaatagagaactgatagaaattggatgtgaggataaaaccctagccttcaaaatgaatggttacatatccaatgcaaactactcagtgaagaagtgcatcttcttactcttcatcaaccgtaagttaaaaagaaccacatgggaaatccactcacaggaaacacccacagggaattttatgggaccatggaaaaatttctgatccataggtttgattaaacatggagaaacctcatggcaaagtttggttttattgggaagcatgtataatttttgtcctaagtctgtgctcagccctcccacatgtgctcattgctggttga

SEQ ID NO: 105233 - DNA, 2498 bp, Homo sapiens
agtaatcccaaacacagtctgaattttttgttttccatccagaaataagatgaatctttccatttccgtgttttcagttttcatcatttttatcctataggttacttatctttattttaaagcatttcataataattttatagtttttgttttgtttgcttgtttgctgttggaaatggaatattccctccttccatttagactgctaaccagctgtaaatgtttcaaaatatgcatgttttacagcagttgttcaaagcaatacaggaacagtaaggacagagccagtcattttacaaccacattctgttaaactgatgtctattagcagggtttttcctattttattaggaaggacttacacctgatatataacaaagcttgttttaatcaaggctcagaaaatgtttttcattagtttttttcctaaccatgaagaataactgctttgtaacacacatgctggctataaagcagacaaaaaattcactgtaggtgctgcctgactggcctctgtccgtgtttctgttggggctgcttaccacagcctctgcattatcattagctagtgtgttcacaataccaagttcccagtagcaaagaaaggtcaagctcttacgcatgccattcatttatctacactgtgcaggcgcactcaggtggcagggacaaagaccactcctttggcgcatctcaagttcagaattctcagtagaggggctccagctgtccttttgtcaggtgcccatgcctgctccaggcctgtgtggtcaggacacgtgttacagagtacagtgacattaatgatggggccatggatatggtcagcactcagaggatgttagtctcttcattgataaagtcacaaccacttttcctgttggaaataaaaagatttgacgtatccttgtctacagcaacacaggacaacagataatcagcaggtcatctaaatctgttcagagagaaaggagagctgtttcctgaaaatacatcttcccctgattttagtcttatttttttctgcctttattgctttctaccctcttcaaaccagcctcatttcctaaattaccttgaatatgcattgacacttgtactgcctgaaattctggaaaactcagtatggctactccaccgtcagaacttcctgagcaaagttagttgctctctcggctcactgttttgttttgttttgttttcctgcctcaggtttatttgtacaaatagcacaggaggaccagccccatgcagatggtagcccaggggcgggggtagggggtcacaccagtccttctgtcctcatgttggcagagatatctactctgaagcctttgtaggggcctgggcacctttgggagcctgagctggaactgaaggtggagctgcagcctgggccttggtttgatccttggccttggcctttggccggcacagcctgagccccttggcaatacgggcacgagcacgcttcccaagcttgggatgggcaatgtaggcaagtcgatcgagcttgcggctgacaccctttgggatcttgggcttaacctccttgggctttacgagggccttgatagcctcggcacgtgcactcatggccttggcattgttggcctgcatcttctttaggcccttcttgttgtgcttcttggcaaagtgcatgttcctcaggaacttggggtccacccccttaagagattcgtatctttgtgatcggggtttcttgataccatttctgtgccattttcgggactggttgtgtgtggtgtggttcttggacttcgccatgtctacaccttaagccgcggctcccgaagcacctagaaccggaagagttggctcactatttagcacacacacacgtctataatagtgctggccacttggggttggaattagtttatttatcagcatgttgtctcccagcacttggtgtgtgtgatatgcagtatgtatttgcagaatgaaaagtctgagggctgacatcatatttcccactgtgcccagaaagagcacagttagtccacatgagctaatgggggcaaagggaagtgaggagggagaatgtactgccttatcatgttttctattacttggctgaagtaaaacagtcccaagccgatagtaagatagtgggctggaaagtggcgacaggtaaaggtgcacctttcttcctggggatgtgatgtgcatatcactacagaaatgtctttcctgaggtgatttcatgactttgtgtgaatgtacacctgtgacctcacccctcaggacagttttgaactggttgctttctttttattgtttagatcgtctggtagaatcaacttccttgagaaaagccatagaaacagtgtatgcagcctatttgcccaaaaacacacacccattcctgtacctcaggtaatgtagcaccaaactcctcaaccaagactcacaaggaacagatgttctatcaggctctcctctttgaaagagatgagcatgctaatagtacaatc

SEQ ID NO: 105234 - DNA, 1122 bp, Homo sapiens
tatagtccagagctgacttatggaggatttctttctattatttctgggtctgctactaatttgtctatttcatatcctaattatccttgttttcattttgattgaaagggggagagcatagaaattgtggtaaaaggtagttttattttttatttgagatggagtcttgctctgtcacccaggctggagtgcagtggcacaatctcatctcattgcaacctccacctcccgcgttcaagcaattctcctgcctcagcctcccgagtagctgggattacaggtgtgcaccaccacgcccagctaatttttgtatttttagtagagatggattttaccatgttggccagtctggtcttgaactcccgacctcaggtgatcctctcactttggcctcccaaagtgttaggattacaggcctcagccactgcacccagcctaaagttagttttagattaagtgttttcatgttttcccttgcaaagtaataaactggtcaagttatcaccttgttccatctccatattaatcagggtccaaacaggagatagaaaccatgcaacaatttgagtagttgaataaagaattataaacaggagattagagtaataggggattagatagtaagaggtgaagagataggaacagcagatataaagaacaaccatttcctcctatggctgagataccatcccctcaccacactcccccacctactcactgagatgcagaccttattgaagagaatgtaactggcttgctgcgaggtaaagtcaatgaggcgctccccagtaccactctgaggggatgctggggaaaactgcccatgagaagagggcacatgctgctggccacttgtgctaaagaacttgaagtctgataggagtgcaccctaacctggcatagaaaccctttcttcctgctgagtccctctagcaccttatactggcaaagctttacattgcaaacctccattatcacagagcaagcaatgaaagatggactcagagctgaggcgataaattgatagctagcatagcctctaaactgacttttatgactacattttatggatagaaagtgttcttatatatattgtttctttacataataggggacttattc

SEQ ID NO: 105235 - DNA, 1050 bp, Homo sapiens
atcatgttggccaggatggtctcgatctcctgaccttgtgatccacccgcctcggcctccccaaatgctgggattacaggcgtgagccaccacgcccggccacttggcatgaatttaattcccgccataaacctgtgagataggtaattctgttatatccactttacaaatgaagagactgaggcaaagaaagatgatgtaacttacgcaaagctacacagctcttaagtagcagtgccaatatttgaacacactcagactcgatcctgaggttttgaccactgtgtcatctggcctcaaatcttctggccaccacatacaccatatgtgggctttttctccccctcccactatctaaggtaattgttctctcttattttcctgacagtttagaaatcagtccccagaatgtggatgttaatgtgcaccccacaaagcatgaagttcacttcctgcacgaggagagcatcctggagcgggtgcagcagcacatcgagagcaagctcctgggctccaattcctccaggatgtacttcacccaggtcagggcgcttctcatccagctacttctctggggcctttgaaatgtgcccggccagacgtgagagcccagatttttgcctgttatttaggaactttctttgcaagtattacctggatagttttaacattttcttctttgaacctagttataaaggtattgtgctgttgttcctaggcttagagtcataaggcctgagctcacttcctcactttgcctccatctggaaccttagaccaacttcctaggaaaacgagctgtctgaaaacagaatagggtgcctcttcaatgtgctcttcactggagatgttcaggaggaggctactcccacctacacagggtgcagtggagggtctgggccccagggaggcagcaggaagagtggaaagagcggaggctctactgttggacagacctgggttaccagccgtgtgactagccttccctggcctccatatccccctcagtaatgaaggaatgtgtcatccccaaatccagggacagttaca

SEQ ID NO: 105236 - DNA, 1033 bp, Homo sapiens
ggtaatctgcttgtctcggcctcccaaagtgctgggattacaggcgtgaattactgcgcccggctgccttttatttctttctcttgactgactgcactggctagagcctccaatacaatgttgaatagaagtggtaagaatgggccaggcatggtggctcatgcctctaatcctagcactttgggagagtatggtgggcaggttacttgaggccaggagtttgagatcagcctggcgaacatggtgaaactctgtctctattaaaaatacaaaatatagttgggtgtggcagttcacgtctgtaatcccagctacttgggtggctgaggcatgagaatcacttgaacccaggaggcggaggttgcagtgagccaagaatgcaccactgcactccagcctgggcaacacacacacacacgaaaaacgaagtggtaaggatggaaatccttctcttcttcctgatctaagggggaaaggggaaagttacaaaacattcagtatgctgttagccatataggtttttttgtagatgcccattatgaggttgaggaagttccctctgttccttatttgctacagattttatttaggattggatgttgaatttttttcaaatgctttttttgcatctactgagataatcatatgatttttcttttatagtttgttaatatagtgaattacattgattttcttatgttaaaccaatctttgcattcctgggatgaactctgcttggttataatatataatcctttttatttattatgggatttgatttgctaaaatttttattataattattttatctgtgctcatgattgttactagtttatagttttcttttagtctttggtttttgtatcagggtaatgctggcctcatagaatgagttggtaagtatcccctccttttccattttctgaaagagttttgtgtagaattgatgttaaaattattgcttaatgtttggcagaactcaacagtgaagccatctgggcttggagattttcttcatgggaaggtttttaac

SEQ ID NO: 105237 - DNA, 1043 bp, Homo sapiens
aattaaaccaaaataggtataagaaagattaaaagtcagagcagatatcaatgaaatagaaaatagaaaaatctatgaaaccaaaagttagttctttgagaagatcaataaaattgataaacctctagccagactgaccaagttaaaaagaaaagcctgaaattaccaatattaggaatgagagaggttatgtcaccaagagatccatagataataaaagaataagaaatattataaataactttatgtcagtaaatttaaaaatttagattaaatgcgacaaatttcttcaaagaaacaaaataccaaagcttacctaagaagaaacagataacctgaatagctctatactattaaagaaatagaatttgcagttaaaaaccttcccatgaagaaaatctccaagcccagatggcttcactgttgagttctgccaaacattaagcaataattttaacatcaattctacacaaaactctttcagaaaatggaaaaggaggggatacttaccaactcattctatgaggccagcattaccctgatacaaaaaccaaagactaaaagaaaactataaactagtaacaatcatgagcacagataaaataattataataaaaattttagcaaatcaaatcccataataaataaaaaggattatatattataaccaagcagagttcatcccaggaatgcaaagattggtttaacataagaaaatcaatgtaattcactatattaacaaactataaaagaaaaatcatatgattatctcagtagatgcaaaaaaagcatttgaaaaaaattcaacatccaatcctaaataaaatctgtagcaaataaggaacagagggaacttcctcaacctcataatgggcatctacaaaaaaacctatatggctaacagcatactgaatgttttgtaactttcccctttcccccttagatcaggaagaagagaaggatttccatccttaccacttcgtttttcgtgtgtgtgtgtgttgcccaggctggagtgcagtggtgcattcttggctcactgc

SEQ ID NO: 105238 - DNA, 1074 bp, Homo sapiens
caatttaacttactctccatcctcacccgcccagctttggttatgaggcagtagaaagaaatgatctgcctgtggttttctagaaatacgaaagttgagtccttaaggctacacagaaagaaagtacctccccagggcttcacccttcccatcctttcagcaggctttttgtctgtcgtatcttctctgttgaaatggccattgacaagaggaggaaaggggttttgttgtggattgttcaggcacttcctttggggtatatgggggatgagtgttacatttatggtttctcacctgccattctgatagtggattcttgggaattcaggcttcatttggatgctccgttaaagcttgctccttcatgttcttgcttcttcctaggagccagcaccgctctttgaccttgccatgcttgccttagatagtccagagagtggctggacagaggaagatggtcccaaagaaggacttgctgaatacattgttgagtttctgaagaagaaggctgagatgcttgcagactatttctctttggaaattgatgaggtgtgacagccattcttatacttctgttgtattcttcaaataaaatttccagccgggtgcggtggctcatggctgtaatcccagcactttgggaggctgaggtgggcagataacttggggtcaggagttcaaaaccagctggccaacatgatgaaaccccgtctctactaaaaaaatagaaaaattagccaggcgtggtggcgggtacctgtaatccaagctgctcaggaggctgaggcagaagaatcacttaaacccaagaggtagaagttgcagtgagccgagattgcaccactgcactctagcctaggcgacagcgagactgcgtctcaaaaaaaaaaaaaaagaacgttccaaggtcaggactaggcctcccctcagaagcagcaagtgacatatgtgacatcctctccactccctatttgcatttctaggttatataactgtactactatccatgcatgcctactcttgttcccagggtgaaggacccagacatggagagccgaatccctgcaggccatt

SEQ ID NO: 105239 - DNA, 1032 bp, Homo sapiens
ttttaagtgtttaggtctgcccccagtgcccagcccaatcaagtaacgtggtcacccagagtggcagataggagcacaaggcctgggaaagcactggagaaatgggatttgtttaaactatgacagcattatttcttgttcccttgtcctttttcctgcaagcaggaagggaacctgattggattaccccttctgattgacaactatgtgccccctttggagggactgcctatcttcattcttcgactagccactgaggtcagtgatcaagcagatactaagcatttcggtacatgcatgtgtgctggagggaaagggcaaatgaccaccctttgatctggaatgataaagatgataagggtgggatagctgaaggcctgctctcatccccactaatattcattcccagcaatattcagcagtcccatttacagttttaacgcctaaagtatcacatttcgttttttagctttaagtagtctgtgatctccgtttagaatgagaatgtttaaattcgtacctattttgaggtattgaatttctttggaccaggtgaattgggacgaagaaaaggaatgttttgaaagcctcagtaaagaatgcgctatgttctattccatccggaagcagtacatatctgaggagtcgaccctctcaggccagcaggtacagtggtgatgcacactggcaccccaggactaggacaggacctcatacaatctttaggagatgaaacttgcccatctctaaaatttcgggatttctttgtacccaacaaggttcaaacacaacagtcagcttttattcatgatttttacttccatctgctgatgtagaacatacctccagagtgacctcagaaattgtcaaatgtgaaaacacaagccatcacagtgagaaatgggaggttgagttagattgtctaaggctggagagtccatatactcccactgttagctctgaagtgtgtagccagtcttcagattctgggtcagttgcctcagtctctcttagcttttgccttactcttta

SEQ ID NO: 105240 - DNA, 1033 bp, Homo sapiens
atatcagtcaggatcagacatgatgttagctcctgctacaataaaaccattttctccctgaatgaaaacaaaggttccacaggagacagtcccacagagcagtggcttcttttcctccctttaaaacctcatgttggctggacacagtggctcacacctgtaatcccagcattttaggaggctgaggtgggaagatggcttaagcccaggagtttgaggctgtagagctatgatcacaccactgcccttcagcctgggtgacagagcaagaccttgtctctaaataaacaaacaaacaaaaaatcctcttgtgttcaggcctgtgggatcccctgagaggctagcccacaagatccacttcaaaagccctagataacaccaagtctttccagacccagtgcacatcccatcagccaggacaccagtgtatgttgggatgcaaacagggaggcttatgacatctaatgtgttttccagagtgaagtgcctggctccattccaaactcctggaagtggactgtggaacacattgtctataaagccttgcgctcacacattctgcctcctaaacatttcacagaagatggaaatatcctgcagcttgctaacctgcctgatctatacaaagtctttgagaggtgttaaatatggttatttatgcactgtgggatgtgttcttctttctctgtattccgatacaaagtgttgtatcaaagtgtgatatacaaagtgtaccaacataagtgttggtagcacttaagacttatacttgccttctgatagtattcctttatacacagtggattgattataaataaatagatgtgtcttaacataatttcttatttaattttattatgtatatattgtgtcagttcagatgccaaaaagaggtcttgaacatgtcacaggctctgatggcactgaccatggagaaagcttgatttgatcatctggtgtctacaataaccaaagctaattattaaggaaaaaaacttgaagaaagaaaatagtccttacttcatctataatg

SEQ ID NO: 105241 - DNA, 1050 bp, Homo sapiens
gcaagactccgtctcaaaacaaaaaaacaaaaacctcattatagatgaagtaaggactattttctttcttcaagtttttttccttaataattagctttggttattgtagacaccagatgatcaaatcaagctttctccatggtcagtgccatcagagcctgtgacatgttcaagacctctttttggcatctgaactgacacaatatatacataataaaattaaataagaaattatgttaagacacatctatttatttataatcaatccactgtgtataaaggaatactatcagaaggcaagtataagtcttaagtgctaccaacacttatgttggtacactttgtatatcacactttgatacaacactttgtatcggaatacagagaaagaagaacacatcccacagtgcataaataaccatatttaacacctctcaaagactttgtatagatcaggcaggttagcaagctgcaggatatttccatcttctgtgaaatgtttaggaggcagaatgtgtgagcgcaaggctttatagacaatgtgttccacagtccacttccaggagtttggaatggagccaggcacttcactctggaaaacacattagatgtcataagcctccctgtttgcatcccaacatacactggtgtcctggctgatgggatgtgcactgggtctggaaagacttggtgttatctagggcttttgaagtggatcttgtgggctagcctctcaggggatcccacaggcctgaacacaagaggattttttgtttgtttgtttatttagagacaaggtcttgctctgtcacccaggctgaagggcagtggtgtgatcatagctctacagcctcaaactcctgggcttaagccatcttcccacctcagcctcctaaaatgctgggattacaggtgtgagccactgtgtccagccaacatgaggttttaaagggaggaaaagaagccactgctctgtgggactgtctcctgtggaacctttgttttcattcagggagaaaatggttttattgtagcaggagctaacatcat

SEQ ID NO: 105242 - DNA, 1056 bp, Homo sapiens
agttgcactccatgattttaaaaaaacctcttggacagggtacctctaaaggtgaaactcaagtctttaaaagttctacattccagattgtttttccttgagaaggagacaaaagaagagggatgtggttgccatgatttgttttaaagtctcctataacaaaatgaacatgtcagtagccaattgtggttggcaaaagggtgtatttaatagaatctgcaggcagatttccaatctgcctgccctgccctaccctccccctttgggtttgtttgaggtttcattccacaaataagcagcagataaaatactttacaaggtacagcacagttgtattgaagaaaaaaaggacccaactcttactttaggagtattaggcctggacttcccctgccccatgcaataaagcaagttttatatacactccccatatttttttctaacattttcttatataaatttaaatattttacaaaaaaaggcttttttcctccaaacatataaatctgagtgaaacatagattccccacccgagaacttgtttcttcactaaaatataaatgttgtctgatattaagggtaaatgtcttttgaccactggagatcactgaagtctgaattgcaccgtggagaaggcacttgtgttttctgaggtctccagcaagtatctcagtgagcactcatagaattgctgtctgtcctccagaacccgtgccaaggcctccgagtgcccagttactgaggcagctggggaaaaacgttgagtaaacatgattctacaattacggagataaaaaataaaaacagcatggactggttctaccctagaatcaaactacaacaaaatccaaagtgttcattcatgtagattcaaaatgacttcattctgtcataaattataaaatacaaaggtggctgttttaatgacaaaactcaaaacagtactaaaaggggtttgtgtcaatggacaaaagtcagtccctctaggtagggccccaaggagcatcacccaggttgaagggtggttttcctactgctgggccagaagtgctgtcc

SEQ ID NO: 105243 - DNA, 1100 bp, Homo sapiens
gtctattctattcattttacccgaattattccagtttttctcatttttctacttctgacctcataataaaatgatcactgcagtcacactaattcccatagtaggaagatttcagcaggaatttgtagttagcctttgttagtgattatgtgtaattctcggacagaggagattttcatttttccaataagaatagtgacttttctgataactaatattaaaatcttgtttattccatggacttttcatctaaaccttctgagataggctgccaagaaaagacatgttggggccaggcgtggtggcccgcacccataatcccagcatttggagaggctgaggtggtggattgcttgagctcagaagtttgagaccagcctgggcaatgtggtgaaaacccgtctcttcaaaaaaaaaaaaaagagaaaagactttttgggttaaggcttattaatactaacttttgatattggtattatcttttctgttggacatcagttaggacacttgtgacatttcctggtgaatattttgttcaagaatgtcattttggtgttggcggtagatgagaacagggacatgggaaaaggcaggctgactagttaggaagctactacagtggtgagcctgaaccagttcagtagctgtcagcagtcttagagagagggtagggaatagatctgagagattgtccttaagcagcaaatttaaaaggaaacagatttagggggaatgggctggcatttatgtgtgaatacttcctagagtaggtaggttgttgtatagctggtatttgcagaaggtaaagtacccaggcaggaggtgtagaacaaagtgagctttgcaggactgtgggaaagctggcaaagacaaaagcaagcagcttccctggaccagaaggccaggagtggagcaactcttggttctggatggtgccttgcctattatgagagtgttttggaatgggatttcaaaacacacatgaagttactgagataagagacttaaacttttgaaaacaggaagggaaaggtggtttggagagtgagaaggaagaagtacatttggataatcaatagattgctgaggataacaattta

SEQ ID NO: 105244 - DNA, 1132 bp, Homo sapiens
tttagttctgggaaaatttcttgaatgattttgttactgatttttttcccctcccatatgctgtgttctctattttggaactcctattcagtcattcaacaaatgttgagtgagattctactatttaacatgcactattctaggcactgggatatttcagtgaataaattagtttagaaaaaaaaaattcctgcctgagaggcattctagtaggaagacatcagacaatattatatgatatgttagaaggtttgtgtgaatgcatttattatatgtgtttctctggctacttacagcagcataggggcaggcatggagtgggtagagagctagattttactaggacagtattaatggggcaggagaggtgagggagtatgtaagaaaatgattataatgatggaccttgaaattaaactggatgaagaggattcgggagatattcaggaacacatcaaggtatagtagaaagaagatgtaatctgtagattagtggtaccagtgtggttgaagggttgttggaattcgggtctagagagaatgacctggaaagatgaggaatagtggttagagagaggatacatggaactaaattgtgtagggattacaattgtctaatgatgagatctggtatatgactgtgggagtgagtagctgagggcaagaagggatagatagcaagatccttggaagggaggtgggttagtccattttttgcttcgctataaaggaatacctgaggctgggtaatttataaagaaaagatgtttgactgggcacagcagctcatgcctgtaatcccagcacttttggaggctgaggcaggtggttgaggtcaggagttgagaccagcctggccaacatggtgaaaccccaactctactaaaaatatacaaaaattagccgggcatggtggtgggtgcctgtagtcccagctacttgggaagctgaggcaggagggaggtggaggctgcagtgagccaagattgcgccactgcactccagccttgggtggcagagtgagactttgtctcaaaaaaaaaaaaaaggaaaaaagaaaaagaaaaagaaaagaggtttaaactggctcatggttctgcaagctgtagaggaagtatgttgtcagcatctg

SEQ ID NO: 105245 - DNA, 1126 bp, Homo sapiens
gtttgaaaaatttttaattgtttatgtactatatcatcacatatttagtttatgatctttttcatttgttttagatgtaaggctacgaaaacttgctggagagaaggaagaactactgtcacaggtaaaggcattcttattggagtgtaatataattttaacaaagttacatggtaaaatactggctaattgaaatgttcattaaaaaaatatgcttctttcaaacatcagtactcaagtgagatatgaaggatagataattcatattttacctctttgttattttctgttcttaaaacatttttttaaggacacatagtttaaggagtcatatagttttttacaaagcttgttatgaacacagcagtcccctgccctggctcctctgacctcgcccctgaccatttctgttaaatacttttagctgattcttgtgtactgtccttgtatctctgtataacatacttatgttgcatcttgattgttctgcttcaggcattctatattgacatccttttatggaagatgaggatttagctgtttttcatcctttgtccctgccacacacatacttattttccactcttatatcctcctaataaaggaacagtgtaattccagcctgcttgtgtcattaggaccctctaaacactactcacacagtggagccaggttgcattctaggatcatctccctcagaactattagtttcctctaaagttaatgttatggtttttctttgtatttgcttggttttctatcatcaatttagccacagaatctccaagagtagattaatcccactcagtattttcagatgcatctggtgttatttcagttccagtttgttgaatcttggtgcatctgacttgtccctttctaaactagtgacttgccctctcggtacatagatgtggtcacccttcattggcatctggagattttctttgcatgtgatttaggttgggttccctttttccggtgtctcatgcctttctccttatttattctcttattttggtacatcttccagtagcttcctgagaagagggtttgtggattgttaatttttcatgaccttgcaggcctgaagatgtcttcattctaccctctcacttgattaaaa

SEQ ID NO: 105246 - DNA, 1029 bp, Homo sapiens
tagaaagtggcaaaattcaaatgcgtatgaagttcacctgtgtaaagagaggctgtattctgtggtatcactgcgttctgaacaccagtctgttattaaaattataagagtaaaatttctgaaaatattgatgattcttcattttatgacccttacagatatatgttgttgcaattcttttcatctttcagaggctatgttgctgcttaattttgttttcttggggaacagagagcacatattgttcttataaaggcattatcggcttattattgtcttcctgtttcacatgcatgttactaaacaaggagttccccaaaccgcttgtattttatgaaaatgcatctttatgtgtttgtggcagtgctataatttcctgttatattgcatgtattcaattaacattttagatatcagactgatgacttaactctcatttaggaatctttgtctgaagtggaagaaaaatacaagaaagccatggtttccaatgcacagttagacaatgagaagaacaatttgatctaccaagtagacacactcaaggatgttattgaagagcaggaggaacagatggcagaattttatagagaaaatgaagaaaaatcaaaggtaatgcttatcttgtattttctcttggggcagaaaataaaagcctgccacttacaaagtgatggaagattgcagcatacttatttaggaatgatgtttcagtcaaaactgaatggcccaaggaaattgacagaacaccatgagatatcaggccctggatgactctttttttatttaaaaaaatattttcttgaggaaaagcttatgtcttctgttaagtttctgaaaatagaatacaactcaagttttagcttcattttctatctcttaattgggactgtaattacagtgttacttatttcttctggttacaagtgactggaactcccgcaaagctccaaagactctcaataggatgattcattttttttctatgaacttctgaacggttcaagagaatccattttctaaataatt

SEQ ID NO: 105247 - DNA, 1026 bp, Homo sapiens
agtaaccaagtcattgaaagaaaactttgttcatattcatttattatatttttaaaaaacttttgcatgaatcattaaaatttgccacctcttattaatttactgtatattttactagttctaggtgaagcattgtgctaaaaaaattttaagtgatttataaaatattaaaagttgtatgattttaaatattataatttatatagctttttcctccatatatagccctgtccccatttgctacactgttattaacagaatttaatgccaagaaaatatttaacattagattgattactctagaccttcccccagtcccactatcccctgacctatttgcccttttcagtggttgggagtgggagttatgtttttgtactttgatttctctgcttttagtctggaatatacaaaagtgagtcacatttcatctgaatcctttgcgatttaagatacgtttgtgcatggttttatgcaatggttcattcctatgtcctgcaggatatctatgaccttaaggaccagatacaggatgtagaagggagatacatgcaggggcttaaagaactaaaggtatcagggcccattctgcagcccaagcatgctctgtatgcagaagtgttggcaatggtggctttgcaagttctgttaaccaactgcacatagctttactaacagtgtttgtctttcaagcatgtgcttaacctgcagtgcataggaatggtgaactttcaatctctgcttatgtttaaatgtgtagtacagtttttgaatattccgcagaagatatcatttacagttttttttttttcttttttatttttcttgtacagacaggatcttactgtgttgcccaggctggtctcaaattcctgggctcaagccatcctcctgccttggcctctcaaagtgctgggattacaggcatgagccacctcgcccagcctcctttacagttttaaaaccttgtaaaatacatgcatatccgtggtgtcttagccatacaaaattaaattggtcaaacac

SEQ ID NO: 105248 - DNA, 1083 bp, Homo sapiens
gctgcaaatagtatcttcacctttatcaactcaacagagtattagagaaagaagagattgataagcagttcagaaattaaaaaggggaagtgctgattagcatatcagttataaaattctaaaactgctttaagttaatctgatgtgctcacttaagtattgtttacaggatagcaaagataaacttagaaaataaccctcataaaaacgattttctttttggttattacgaattatagattttgataaggtatttgtgtcatgaaattttgcttagtatgcttgggcccttctctgtatacctggatacctgcaaagccaatctaaattgaccattgattacacatggtaacttcttcatctgaaacccacatcttcccccaaccaccctgccctgtttttagtttccacagcaaacatatttttaaagaaatgagacttagaagggtcatatttctctttctagccttcatctcgaaattctgcctcagcaacaacccctctaagtggaaactcatccagacgaggaagtggggacaccagcagcttaatagatccagacacttcattaagtgaattgcgggtaaactgaagtttttggttttctttttaaaagcagttttttgacttggtaatatactggaacttttaacctttaatgtgacttagtagaaagaaggaatatgatttctttttaaaaaataagtactgtacaaaagtgtgactcaagtgtttcagagcttgaaaggaaggagattagatagttcttttttctgtcctctttcctgtaaatttaatggtgttggaatttctgctaatttacaaatgccaaaaaaaacccactttgtaatgtatgtaaaagtaattctctcagaaacaactggccatgttttaaatggaaaatatgtgagtgtacaaagaactagattgtgggaattattagtcttttgagccttgatggtattcagctgcttgaatatagttatctctcagtttttcatagtaatagaagtgtaataatatttgggtaacagaaatacctgagataatgaaaagcttatttgactcattaagtctccatcc

SEQ ID NO: 105249 - DNA, 1015 bp, Homo sapiens
agagcttacattatagaaagagagcagacaataaataaatggataaataccgtagtgtcagggagtgataaatgctatgaagaaagatgaagtaatttctcaaatctctgagacttggtaaggggaaaaagaagatgtagaacatatatgggacacttactagaatttttttaaagactttgtggttggttgctattagagactggtggtcagggtatggcatggtagggagagagccctactcatactcttttgtgctgtttgattttttttttttttttggtcatgtgcatgtattactgagaaaacaaaaaatccttgatgtgggggaaaatattttggtgacatatttaacatgctttaatctaatctgaacttttttggctgagtgtactagtctttatctgtgtgtcctgtgtcctaataatgtttagaaataaaagtttttcgcttttggttttatcagacttttctttttgatatgtacaagctttttttgtattaacatttgcagtgctaaaactttatatgtagccttctttaatgtgttttaaataccttaaacagaaaatttacccaaaagttctaaacttttgagtaaacatagattgcttactcagtgtctcccttaggataaaaattaaagttgctgacattttatcttatgttaaactggaattttaatttcatttttaatatgtttatttttaggcttcaaacatcattgaacttggaaaactcaagatcacttttttcctcccaaaaaaagtcaacttgctaagcatctttactgatttttatctttgttcttttctagttggatgaaaaatctgacaaacagtatgctgaaaattatacaagagtgagtatgtaaattcctaagggaaattctcaaggtcaattaaacttgctatctgtaacttgttcattatttattttacaacaattggtctgatgtagctgctcttcctcccttcatctatttcctgtccttgaccctccaaaattccttcgg

SEQ ID NO: 105250 - DNA, 2227 bp, Homo sapiens
tttaccaacgatgacactgcaagcattgtgtcttctgatcgtgccagtcgtggacgaagggagagtgtggtgagcatgatttgcatgcaaagaaataagatgagttttaaatgacagcaatgcatgatcacatgaagtctgttggaaagtgaagtttgcatttgacaaaaagagcattttcctcaaatttagttatataaatattttgccttataaaacatgttgagaacacatattctctgtgggctgtgcaagctttcattaataatttgcctttttacatctcttaggagtgaatcattatttgaaaagtttttactttttcttctttgttgctgttttatgcacatacatgtgtgtgcagttcaccaaagacaaatttcttcagcaaaattaatgtttccatattgtataaaactcataactatggattacaaatcatgttaccattaattgctttctatattgttgtatttagatttaaccagtgtttatccacctgttaagacctgtaatccagtcagggtggctcatgcctataatcccagctacttgggagactgaggtgggaggattgcttgagcccaggagtttgaggctgcagtgagctatgattgcatcactgcactccagtgtgggtagcaaagtgagactgtgcctctcaaaagaaaaaaaaaaaaagacttgtgaacttaagaattgctaatgacaaaatttaaaaattctagtcttagacattcaattggataataattgtagaggcaacaaatagctatgttagaatacaaataatataatttcaggttattctttaatgaagctttaaattttacagaaaactgatgacatttttgttatatttaagaaattgatttggaaaatacattgttccggatggtatgtcagcttagagctagaataaagagcataagaggctgtaattcctttaagaaaaataggccatttaacatgagttatgtgaaagattataaacccgagttttcatagagaaggggaacattaaatgttggagagatttgttaccatacattcatttatttaattaaagccgttttagttccttagcaaagcaactaatgctcacgctcacaactgaaggagaaataatatgccacaacacctaaaaacaccttggaacgcagtggagtggaaagggcagggactttaaataatgatgcttgggcttgtatccacttctactacctgttagtgtgtaaatggcagtgtctttatttgtacattggggatgttaatactatctttgtaggtaggtttaatatatggattaaatggaatactatatagaaaatgcctatcaaaattctcaaataggtgccaataaatattaatatctataaatgcaatcattattattattattgtgaataaaaataccattgcttgattttatcagtccttagcaaaacttcatacttgtaagcctgttttatctctgtggatgggcttctgaattcccttccttgagaagtattttaaagcaaggcaaacagtcagctgaagtaaggaatagatgatgaatgaggttaaaaaaaaatcacttattttaaaattaaataaatgtttgtggagtacctgttgtattcaaagccctgtgttaagtgctaggaatactattttaagccagtcagactagatttctgactttatggaatttatatcctcgtgaaagagatggaaaataagctagtaaagaaacaaaaagaaagaaatgtcagggactgtgaagagaacagataatgtgatagggaacctggaggggtctatgtgtgtgggttaccctttggatggggtgattagagatgcttctctgagaaactgacctttgagctgagacctgaaatgtgaggagccagttgcttgaagagctgggaggggagcgttctaggccagtgccaaggcctaaggtgagggagaactggtgtgtttggggaactaaaaagaggccggtatagtttatttccttcattattttgtcttacatttcctggtctttgggaatataaaaaaaggggaactgtgtaaactgagaaaaggtgcagtaaacaccctgcaaataattctgcattcagcatatatattcttaacagagttgatagctataatgaattataaattttgagaattatagtagaggtatatactgacctagaaatgcctctgttcagggtgataaatatcttaaaca

SEQ ID NO: 105251 - DNA, 1083 bp, Homo sapiens
agtgctggtggggtcaatgtcatggtgctaactctatggcttgacagcttttctccaaaatagttaaggacacatgattttagtgtcatgtatactgcagaatgtgctgcctgtgcttaaaatatacaactttagggtattaaaaatgaacatattcctttcacagagggctgttggtagcccttgcttagaatcagtttttttttatctagagaagatagatttgcttgagtcctaccacactcacatacttttgtgagatggctgcttatggaaaggatattgtttttctttgggacagttatgatcttggcctctgatactaggatctaataaagcaagctgactagaaaagtaaaagcagtagctctgtgtaatgtgtgagctgtgaatttgttgctttcaagctgtttgttgtgttgtggcctgttctagtggactgggatcctgaggttttataacttaattttattgtagtagtaggcaaaatgctctttgtacctcagtttcctttcctgctctgtttcctcttttgagaagataaatgtgtacacgttaattctcccagtttcataacatgatggtgaaagaaaatactgtaaccaggggtgttttttaaaaaatgaagtgcaaggttgatagcaatttttgcatataaatgagtattaccgccttcagggttttcattctgggaggctatacacttatatcattctccaaaacttttttggtactgagtattgtgaaaacattaagtcattttcaaaacaaccttgaagctaaatagctaagtgatatttcctttgttccttaggcatcattgtacaatggtggattatataacccttatggtcctcgaactgtaagtctaaataggggaaggtggtgaagaggagggaaatgtgggtgggcacagtttactttcaaagaaaaagtcaaaaattaataaaaaagaaaaatatacaaagaaaaagtcatttaatctgacctggaattactctctaagctgtgatcaagtcattgagctagccagttgtgactctcacccaagctgtgataaaatgcctgctggaaatcatgatt

SEQ ID NO: 105252 - DNA, 1016 bp, Homo sapiens
catttagattatataattcattatatttcctttatcacataattatctatttgaccctctaaccatcaattcatcttagtttttgatacatttcaaaataagttgtaagcatccatatacttcagagtgggtacccttttaaaaaagcttacatataaaaatgtaaacacgtggcatgagaagaatgtaattatttaatgttagaatctcttgtttttttaaaggcatttgacacatcatacatttaagacacattaagtgtatggcacacagtacatttaaaataattttgtttaaaaaacctgcacacgcaacttaagtactcttatttttcatctctgattgggtttggtgaaaacttgaaaagtatgtcctcagatgacatcaggaaaagcaagatttaattcctttaaaaacatgctgtgttcttttagtgcatggattcattgactagtacaatttatctaattcaactaaggcactttgtccatggcttgttttgaagaacaggttttctaatctatttggaaaagagtgtttgtagagataacttggagcttatttatctggttctccaaaaatcagtctaagccaattaggagttggtcataaaatcactgaaaatatcataagaactgggtgagtgggatgtggccactgttttccacactcccggtaccatgaccctctttccctcagtgttttcttacttgccattccatatcctaacaataatgctcgaagaccaatgggacataaacatatttataattcatagaaaactgttccagctgtttcttatcccttacaattaatattcaaaacaatttctaattacttaagtttttcttatttcttgtgtttcttaactaccttaagcactcaggaattgctaatgaattatggagtataaaatcataaacttaagtcctctgcattcatgatggtgagaccaattcatctttgtttttgtttttgcttatttattttgtttttgtctcttagcagtcttcttc

SEQ ID NO: 105253 - DNA, 1074 bp, Homo sapiens
actgcagcctagaactcctggactcctgccacagtctcctgagtaggtaggaccacaggcatgtaccactacacccagctaatttggggttgggggaacaggtagagacaatgtcttgctatgttgtccaggatggtcttgaactcttggcctcaagtgatcctcctgcctcaacctcctgaaatgctgggattacaggcatgagacaccactcctggctaagggtataggtaacaagataattcatttccttctatagtcttccttacctaaaggtcaaaaagcaatcttttggaacaattaaaacaggactgagagaacaaagaacatgacattaaactgtcccagacagtactcttaacccaaattagtgaatccacagtatgtaatgctcaggaggaaaacaaccaacatggtatggattgcccagcataccataaatggtcaccttataaaagggtcccttgaagacaggattgtctcaatacctaacttttcctaggagtacacagccaagtacatatggggaaattaaggctagcaatactactaaataggtaaattggtagataagaaatctaatctaggtacgtactacttgcctgaaataagagagtgtggctagaagtgccctacctatcaagagccaaaggcaacagactgctctaggtaaaccatctcacatatatatagctgtattcccaatcaatgattaaaaactcattttacttttttttttttgaatatgcatctttttatacattactctgaatattttaagagatgtctatgtaatttagaaactcaggcaacctattgacaaaatattaacccaagaaaaacaagctataacttaaattccttggttaatgacataccataaaaaactaaccaaatcaaaccaaaatgtttggacataactgatgtcttaggtgtcctctaacactactggatgttttctatctagcaacttcacacctgccagctttgtgacatatgacataaaacacaatttgggcttgtgctcaacatgaagacaagtttctaacagtgttagaatgacaatgagtatat

SEQ ID NO: 105254 - DNA, 1165 bp, Homo sapiens
aggctggtctcgaacttttggtctcaagtgatcctcccaccttggcctcccaaagtgatgggattacatatgtgagccatcatgcccagctggtagtaatatatcttttcttaaaatgatgagccacccacctaacatatactcattgtcattctaacactgttagaaacttgtcttcatgttgagcacaagcccaaattgtgttttatgtcatatgtcacaaagctggcaggtgtgaagttgctagatagaaaacatccagtagtgttagaggacacctaagacatcagttatgtccaaacattttggtttgatttggttagttttttatggtatgtcattaaccaaggaatttaagttatagcttgtttttcttgggttaatattttgtcaataggttgcctgagtttctaaattacatagacatctcttaaaatattcagagtaatgtataaaaagatgcatattcaaaaaaaaaaaagtaaaatgagtttttaatcattgattgggaatacagctatatatatgtgagatggtttacctagagcagtctgttgcctttggctcttgataggtagggcacttctagccacactctcttatttcaggcaagtagtacgtacctagattagatttcttatctaccaatttacctatttagtagtattgctagccttaatttccccatatgtacttggctgtgtactcctaggaaaagttaggtattgagacaatcctgtcttcaagggacccttttataaggtgaccatttatggtatgctgggcaatccataccatgttggttgttttcctcctgagcattacatactgtggattcactaatttgggttaagagtactgtctgggacagtttaatgtcatgttctttgttctctcagtcctgttttaattgttccaaaagattgctttttgacctttaggtaaggaagactatagaaggaaatgaattatcttgttacctatacccttagccaggagtggtgtctcatgcctgtaatcccagcatttcaggaggttgaggcaggaggatcacttgaggccaagagttcaagaccatcctggacaacatagcaagacattgtctctacctgttcccccaaccccaaattagctgggtgtagtggtacatgcctgtggtcctacc

SEQ ID NO: 105255 - DNA, 1641 bp, Homo sapiens
tacccaaataatattgtgagttctaagttttcatcaaattatttgcttttaaaataatttttccattaagctgaattgttagacaacttttgtcctctgtagatggcctaaacactgacctaaatttccttgtggtttgctatataattttggagttatgcatttctcagccagttatttttaaaaacttaaggccgtgtactaagaggtctaatactttttgaacgtagtatttgatgtttgaacattagcagtacctgaatgtgaggtggatatatttatggtcttatgctgcattcttaggactttaggtttctccttttgtccaattaactttcatatactatctttttgaaaggtggcttaccagaagctatatgggctggaaatgttggtgtcagtgctatagacattatgtataaaaataaaaacagcaaaggtagttcaagactgtgaatggtaggattgggggagggaagattaaatcaaagttaggaatttagaattgaaacaatctgtgtctattagttttgtataatgattggattattaatagtgcagaacattagtagctgcttggtcattgctttatacattgaaatacaagaagacagtaaggtaaagatccaaaattagaaaatgaagtgatcttggccaggcacggtggctcacgcctttcatcccagcactttgggaggctgatgcagcagaatcacccaggagtttgagatcagcctgggcaaagtagtgagaccttgtatctactaaaaataaataaatacaaataaaataaattagctgggtgtggtgctgcatgcctgtggtctcagccagttgggaggctgaggtgggagctgtccgggaagtcgaggctgcagtgagcgttgattgtgccacagcataaaaacgaagaaaaagtgatcttgattgaatcagagcagtagggatacattgccttttctcattggtggagatttttactgttgcatgtatttagttactatttatataccagtagccttggtataattttaatgaatttaatttttaaaatatacttacaattttgtgttttattatttactattacactgtttaattctattgaagaacccatcaaaggatataactgggacactttggagtagagccagtacacccaaaaggaaagacactatggtgtgtagcccaggaaaatgtgtggtattagtgttatgcattcacttttgactttcagtgtccttgatatttgagtaataggtacattctaatagagattgacacttgctgaactttgttcactgtatgtactttctttctagtttgtttcctaatgaaaactttcaggcaagtttgacagttaaaatttctttaaaagattacaatagcaaattttggatttttttttaacttttaaagttaaaaaaaattttcttttttctctatggttatagcatcaaaaatttggaaatgagcccttactattttcacttttacctcctttgatgaatctttcttttctttacaacaatataaaggccaacttttacttattggggtgactttttttgtttgcccattgttctagtagaaattggtatgcccaaattatggattttcctaccagatagattcaacatt

SEQ ID NO: 105256 - DNA, 1018 bp, Homo sapiens
ttttatttttatacataatgtctatagcactgacaccaacatttccagcccatatagcttctggtaagccacctttcaaaaagatagtatatgaaagttaattggacaaaaggagaaacctaaagtcctaagaatgcagcataagaccataaatatatccacctcacattcaggtactgctaatgttcaaacatcaaatactacgttcaaaaagtattagacctcttagtacacggccttaagtttttaaaaataactggctgagaaatgcataactccaaaattatatagcaaaccacaaggaaatttaggtcagtgtttaggccatctacagaggacaaaagttgtctaacaattcagcttaatggaaaaattattttaaaagcaaataatttgatgaaaacttagaactcacaatattatttgggtaaaacagaaaaagttttatctcaattatatttcttttaaatgaaattagtagtgagccttcagacttgtttccaggaaagtctaaacatttaaactgtgttagatgtgcactcacagagagtaatgtactagaatctcctctaggatgtaaaacttttattaatttttacatttatacattgacgtttttaaatactgggagttttattctatcccatagtaacaaattttcaaaatcaacataatgaaattaaatactggagttatatcttaaatttgtttaatgatacaaatgccataaaaataaaatcatcctgattatatacattctggtatatagttattatcggtttaactgcagattccttttttgtttgcagatttgttttaaaggcccccaaatgttcaaattttgctggttctacctttaagttaaacaaatatataatcaaatttcctaaggccacatacaaatttataaataaccggcttaataacaactgtgtgaaaatacacactgcgaacattataatgaaaagcaaatgaaaaagccataaatacaagaagaggattattttcacagcctttg

SEQ ID NO: 105257 - DNA, 1019 bp, Homo sapiens
tttggtgtgagttggttgaaggtaaacaaaataaataaaaagaaaaagaaaaaaagaaaaaaattaaactgattcttctgctcatttatctttgtctctctggctgctttatctgtgagcccataaggagaagttggcatgtaatagttacaatacaaaatataaatggctaatgtttatagtaaaataaatgatgcatacacacacaatccacaataggattgtcagttactagaaggaaggaaattttcctatatttgtaatttcccctaattataatacctttttttgggtgggagtgtgatgttgggacatgaatagggaatgaaaaggaaggaagctcagaaatgagtccaactttgagtgcatactgtatatcagcactgtgctagggctttttacataggtttttatttcacattataagacagtattactgtctcaattttatagacatgtttataaagaattggtgaagtaaataacttgcatagtcattggcagaaccagtatttgaaggtatgagagagtgccacacctggtaatgtgctggaaggtgaaaggaccaggaagaaaaggacccacaccttcctgggcctcccattagtgttagtttagtcaactttccatgaacccaatgattctatttttaaactgggtgtctttcttaatcagtggtgattctgaaagagtaaatgcatgtcttgaagagtaaatacggtttttgaagttccttctaatttgaaactgaaggaatgactttggtgtcaacttagtaacaaatactatttgttgacagaaaagatggccaggtatattcatgggactgtggttttcttttaatagaaccattcatcctcccttcaggtgaacgtttaaaaacaaagagtatatttcattttcattaaatgtatcaaaacagcattttgaacaaatacatgtctttttttttttaaggcgttgtactgtttgtccagtctttagtgctttagtgctaataaggacttttgggataatga

SEQ ID NO: 105258 - DNA, 1132 bp, Homo sapiens
atgctaatctctgtatctttccaattttagtatatgtgctgccatagcgagcacagcttcaatttttaatagcaagttggatcaggattgtgggagaaaattctagcttgggcatagagatttacagactaacagtatggcccaggagagaatatagaatgaaaagagcaagaggtgaagcttgaaaactttggttatattaacatttaagatgctagcagggaaaaatgtgcttatgaaggatgctgaaggagagagatgagagaataaagaggaaaaccaggagacactagtattggagaaagctaagagatgagagttttaagaaagaatatgtgtttagtgatattgaaagtccagaaaagacagatgagataagaatagaaaaattctattgggtttggtagttagaggtcattagtgacttttgtgatgaacaatttcaataaggtgatatgagcagaagccagattgcagtcatttgaagagagtgagaagtgaagagggaggtgtgagaaagcttagctgtaaagagaagatagggtagaattggaccagggtgagattttttgcttgccttttaaagatcagagagactttgaacctagttatgatgaagagagtgaaccaatagaagtagagagcaaagacccagaagagagatcagatagttgggacaaagtcctggggaggacatcataaaatggagggtgtgtatgtgtgtgagtgtgtgtgacggggcttgggagggtttgactttcaacaacagaagaggcagctcttcagtagaaccacagggaaagtaagaaagaagggaagactgggaagtctgttagtggctttggagggtgtgaagcgaatgccttcttcagaccttaaaatgccttctgtcatgaaaacattggcacaggaggggaaatactaaaagtgtcagaactggaataatgaaagaagtgctgaactgataaggtcttgcagagaaactttttccattgataattcagatcatttacattatatatcttggaaataccttcctgttttgttgttgttttttaaataggctacacattgattggtacccattttgtttttaaaaaccttgtatggttcattgtgcagagcctctcct

SEQ ID NO: 105259 - DNA, 1424 bp, Homo sapiens
ccggggctcacacaatccgcccacctcggcctctggtcccaaagtgctagaattacaagcgtgagctaccatgctcggccaacccaacgtctttgccctatacaatgaaaatacaaaatacaaaatgagaacacaaaaaataaagcattacattgtaaaaatttaatttaattggtccaaaatatacttaaataaaatatgcatttcaataaaaatgtctacagtgaaagactttatgcattctgggaaacttcataacatgtagatagggccaacattcacagaggataagggcatttgtatccaatcacaatttgtagcaggtttcttattccaatctgcaagttacactgaacacatcatgagcatcacttcgggagaaaaccaattttgttggggaaaagaataagaaagctccagcctcaattttgagttcattacaacttctcaagagtatcaccaacagcctaaacagtacgagttcaaaaaagtaaacatgttaaggtgatatagtttagatgtctcttccaaatatcatgttgagatgtaatccccagtgttggaggtgaggcctggtgggaggtatttgggtcatcggggtggatccctcacgacgtggtgctttcaacacaacagtaagttctcgtgagatctggctgtcccccttgcgctctcgtttccactctcgccatatgatgtgcctgctcctgcttcaccttccaccatgagtaaaagctccctgaggcctccccagaagccaagtagatgccagtgccatgcttctacagcctgccaaaccataagccaattaaacctcttttctttataaatcacccagtcttgggcatttatagcaatgcaagaacagcctaaaacataagacaagcagataactctttagaaacctaaatacgttttcttgctgtctttatgttgaattctccatctacaacgggcagtcatgaagatggtcttcgtcaggacaacatggtcacaggactgggacaatccaggggaatgagagggagagtcaggggacaggggagagaaggcaatgcctcttgctgctttttcacattagagacaaactgtaacacacagtccatgggcctgcaatcttctccttttatcatctggcattaacacttgatgtagtcatcgactttattcaagaagtcctccttgtcctacaaatgatgttctgcagcttcaacattcagtggatcgtcaaaattcagaagattagtaaacaaataatttaatctccaaataacatcctttaatgatctcgtgggagcccagccagtgctgtcaatcgaatgtcctcagtaaactttagacatatttcccctatctctgatgttagggtaccagatcctggtcaggcatttcactttggaaggcaccacattgtatgcatcagg

SEQ ID NO: 105260 - DNA, 1096 bp, Homo sapiens
gaacctgccacctggagtcgatgtagctatgaggggccgtgtctcaccaccactgcccaggccaggcatggtgttgggcgccaggcctgcctcacctgtcttggggtgcccagggtaaaggcaggagtagcgctgacacctgtaagcaaactgaagtgcgatgacagtctcgaagggtctgggacgtcagccatagcatccggccccagtcagagggttctgtgagagacaagttgattgttaaagaggttgcagagcttgagcttatttaccttgtacatgtcaagagtatttcctgatctaaaaagcttcattgctttctgctgactgtaaccccagacgagggttactactagggtggaaaatttcagctcgaaactggacttcctgatgcatacaatgtggtgccttccaaagtgaaatgcctgaccaggatctggtaccctaacatcagagataggggaaatatgtctaaagtttactgaggacattcgattgacagcactggctgggctcccacgagatcattaaaggatgttatttggagattaaattatttgtttactaatcttctgaattttgacgatccactgaatgttgaagctgcagaacatcatttgtaggacaaggaggacttcttgaataaagtcgatgactacatcaagtgttaatgccagatgataaaaggagaagattgcaggcccatggactgtgtgttacagtttgtctctaatgtgaaaaagcagcaagaggcattgccttctctcccctgtcccctgactctccctctcattcccctggattgtcccagtcctgtgaccatgttgtcctgacgaagaccatcttcatgactgcccgttgtagatggagaattcaacataaagacagcaagaaaacgtatttaggtttctaaagagttatctgcttgtcttatgttttaggctgttcttgcattgctataaatgcccaagactgggtgatttataaagaaaagaggtttaattggcttatggtttggcaggctgtagaagcatggcactggcatctacttggcttctggggaggcctcagggagcttttactcatggtggaaggt

SEQ ID NO: 105261 - DNA, 1057 bp, Homo sapiens
cccaagctggagtgctgtggcgcaatcttggctcactacaacctccgcctcctaggttcaagtgattttcctgcctcagcctctagagtagctgggattacagacatgcaccaccctgctcggctaatttttgtatttttgatagagacagggtttcaccatgttggccaggctgcccagctatagtaattttaaatggttaagtagaatttctgctgatggcagctttctgaggctaatattataatacacacagattgctgtgggtagcatagtgaaaagaagtaggagttttagtaattagtataaaattaaatattctaaaatttattggaataatttggtagtgggaagaggtatttggtgactaatttctctgttaaaagtgaatatataaatgagcatgaaaattgcacaaagaaataccttaagttattatgtttttgtttacttcagggctgaaaacacagttaaatcactttcaaagttaaaagactattaagaacacaagatggggactcctgcttctggaaggaaaagaacacctgtgaaagaccgattttctgcagaagatgaagctttgagtaacattgccagagaggtatgtttggtaaatcccctctcaacactgagttgcacagatgtattgtaaaaatgccgatttgacagagatatagacgtttactcattgaactagtttcagatgtttattatgagcaagatgttatagctagtctctaaaatagtgtgttagaataaaatatagttggatattatcaacagaaatcaaatatagagatgaatctctgaacaacacattttatttgagacagtagaattgtaatttgggcatacacacagactgcattggtctttggtatgtccaaagaacaaagaaaagattgaggtttttattagagaaatgttatgcattgttttgaaagaaaatgcattggcactagcgaagtttttgggagctggcatgctctgatttgtgagtgactgtggtaggtaaaactagtcttagagttatagcagttcgtttccgcagctacta

SEQ ID NO: 105262 - DNA, 1048 bp, Homo sapiens
cacatatgtctaggagaaatatattgtatctttcattcttatctttggcatatgaagatctttttgtatttagcacatatttcttacttttttaaaaaagaccgcatgccttgctagtgtagatgaaccataatttattcattttccgtaatttattttaccattttctattgacagatatttaggttgtttttagccttctacaaacactgctgtaatgaacaatacatatataagtctttgcattagttagtatctatacagaatgtattttcaaagtgtgactgtaagattgagactgaagttatgaaaagttaaaactatttcaatcccatgttggctttatttataatagaatttaacttatttcttgggcttgtggaaggggaaaggagctcttaattactttgtattctttatccatctctccatttaaaaaatattgcaaattattttataaggtacttaaaaacatttgagtgtcaggtgattaattttatttgtattggtaaaagtagaaatattgtggtttgaagactggtactgtcatatagaagcatttatatttgataatagttaaatggctacatcttaagtaggttgattgtttcagaattttatgaccagtatcaattaaaagcattgtgtatagtttaaattcttgccctgcataagtcggctactatattattagtcaggaaagaagtaaataatctacctccttttttcctttaccttccacatcctaatctatacataataaaataaacctctatggagtttgagatccaaaaatccttttgcaaactagagtgctatttgatggattactttctcaaggcaggaaggaggtacagattcaatctttattctgcaaagtttttgtaaacagaataaaggaggcttaggtttgatgttatataggttacttgtggccaggaggaggttcaggattctttgcctttttgaaatgagagagacactagagagaaaaaaaaaaaattacatactgaagggctatagtttgatgaagtcggaactcatgagt

SEQ ID NO: 105263 - DNA, 1519 bp, Homo sapiens
aaaaaaaaagaaaaaaaaaaccccaaaaaaacaaatgtttaaatgagcttcccaaactctgtggacaggtgtcttgtgagcttagatcctcataactgtcagtgaggctggtcaggttgtgggaacagcccaagtccctgggtctgttgactctagtcttgagcagccactccagttaatcccaaattctctagaaatacataattttctataagtgccatgaagtaggggtaaaatattgggaggcatcagtctaaacagcactgtacagaacatatccagtgatctttaaagaatatcattggccgcgggcttcgtttgtgaggaagggggcctaggcccgggcctgcggtggtgggggttgctgcgcgccgggggtcgctcctgctgtgtcttccgctccagcttcgcccacttccccttgccagcggggtgggcgcggagaagacctgccggagccatggaggacgaagtggtccgctttgccaagaagatggacaagatggtgcagaagaagaacgcggctggagcattggatttgctaaaggagcttaagaatattcctatgaccctggaattactgcagtccacaagaatcggaatgtcagttaatgctattcgcaagcagagtacagatgaggaagttacatctttggcaaagtctctcatcaaatcctggaaaaaattattagatgggccatcaactgagaaagaccttgacgaaaagaagaaagaacctgcaattacatcgcagaacagccctgaggcaagagaagaaagtacttccagcggcaatgtaagcaacagaaaggatgagacaaatgctcgagatacttatgtttcatcctttcctcgggcaccaagcacttctgattctgtgcagttgaagtgtagggagatgcttgctgcagctcttcgaacaggggatgactacattgcaattggagctgatgaggaagaattaggatctcaaattgaagaagctatatatcaagaaataaggaatacagacatgaaatacaaaaatagagtacgaagtaggatatcaaatcttaaagatgcaaaaaatccaaatttaaggaaaaatgtcctctgtgggaatattcctcctgacttatttgctagaatgacagcagaggaaatggctagtgatgagctgaaagagatgtggaaaaacttgaccaaagaagccatcagagagcatcagatggccaagactggtgggacccagactgacttgttcacatgtggcaaatgtaaaaagaagaattgcacttacacacaggtacaaacccgtagtgctgatgaaccagtgacaacatttgttgtctgtaatgaatgtggaaatcgatggaagttctgttgagttggaagaattggcaaaatatctggaccattaagaaaacggattttgtaactagctttaaactaggccaagcaactagttttcctgcaaatcaaatttttaaagcaacttgagttagactttgtttttgacctaacatcccttccttaaatg

SEQ ID NO: 105264 - DNA, 1071 bp, Homo sapiens
gtatgcactgttacagatggtgtatggagatggtcactaccttcaaggatctcacagtttagtggatgaatcctcacaatacacctgtgaggtcggctgggaaagtactgtgtttttctttcttccagatgtgcaaactgaaggaaagtgacttactgaagggcattctacctctaggtgacagacctgggacctgcaccccagtcctctgactccaggtccaacactgtttcagcaataaccaagtgttttgtttttcagaaaacaatgtattatgtaaaatgtcaggaatataaattcaacttgttagaacttttattagattattgctggtgatggggtaatggaagtctaaatgtatgtattttaatccacacattctgttgggttttggttgcagtcaggtgacacacagtcttttgcacagaagctccagctccgggtgccctccgtggagtctttgtttcgaagtccgataaaggaatctctattccggtcttcttctaaagagtctttggtacgaacatcttccagagaatccctgaatcgacttgacctggacagttctactgccagttttgatccaccctctgatatggatagcgaggctgaagacttggtagggaattcagacagtctcaacaaagaacagttgattcagcggttgcgaagaatggaacgaagcttaagtagctacaggggaaaatattctgaggtaggagcatgacctttttgcctgtacaaaaatttcttccccttgttctctcattcatattactgtattgctttactcctgtgattggctaaactgttaattctctggatatatcctggttactaatggtatgtagtctgtggcattatctagttaaagactctcaatatctagttaagtaaagacagaggccctttggcaagactcagtaaaattttggagaagattgttgtctgtagccttctggttcttatattctgttcccctctcctttcgtagtccctctgttcaaggtcacttggacacccagtgtggagttcatcttctggctcatatcctctcctttattcctctct

SEQ ID NO: 105265 - DNA, 1005 bp, Homo sapiens
ctctgtcgcccaggctggactgcggactgcagtggcgcaatctcggctcactgcaagctccgcctcccgggttcacgccattctcctgcctcagcctcccgagtagctgggactacaggcgcccgccaccgcgcccggctaattttttgtatttttagtagagacggggtttcaccttgttagccaggatggtctcgatctcctgacctcatgatccacccgcctcggcctcccaaagtgctgggattacaggcgtgagccaccgcgcccggcctatagtaagatatttctaagccttccttttaaataattctgcatatgaacaaaatattaagcttgttttaccattattggaggttttgataaagagaaagtgaatgagatcccagagattttacctctgttaaggatgagcttccttgagttacagatctcggtagtgtttaagaagttaggatttacagcatgcctctctcaagcatgttttctagtgtctcagtctacaggttgcttccttgttttagtggtaaagacatatctaaccttctatgctttccttctgctttttaaatacctgcagacatctgtttcttatcattatatcagggtccaaatgcaagcatcctctcttctataataactatttcctgtggctgctgcttgtgaagcttttgattaagtatgtagggataagaaactattatattcagggtgacccaccttggccccactatgtcatcctgtttgcttgtgtttctatgcattggctatggaaatttcccactaggtattccaggtgataattcagagctaaggagaaatatccattccctttcaaatggtgccatcagtttgctgtgttttaaaataaaatatagttggccaggcgtggtggctcacgcctgtaatcccagcactttgggaggccaaggcgggtggatcacctgaggtcaggagttcgagatgagcctggccaacatgatgaaaccctgtctctactaaaaa

SEQ ID NO: 105266 - DNA, 1077 bp, Homo sapiens
ttaacaaaactagtgttattttgagaagtttgaaataggtagctttaggacaaatcaaagtaagtttaatgttttaggtattctaactgtgtaatttatcagtccaagatacagatttaaaaagtatagatagccttaaaagggtcaggtaaattaataaatctataaatagtaattgagaaaaactagtataattgtgggaggaggcaaagaagaaaaacaagggagtatagattaggatgatatcatcaatatagccgtattgtcccatagaatattctttgttgttattgtcaatgacagactattgcgtgaattaacaatcagaattaatcatataggaatttcctgtattatattactaaagttttattcttattgctatcatgtttgatttctagtctctcgcaatttttttatatagccaaattactgaatttttgtggtatgaaagaaagattatatcatttaccacaattcccaaataaattctttaaaacatttctaaacatgactttgaaaaccaggctaatttacttttgttatactgacaagaccaagcattggcctcaataatacaaataattacagatgtcctttattaatgaaaatttgtacaacttcttttggattaataacgtagaaaaatgtatacccactttggaagttatagagaaggaacaaaaccttaactcctggtctgcccaagattctgctttcctagttggactgggaatgtgttagtactcagaaaagtatgcatggggattaggcgtatgcaacaaaggggttgtaggaagtgagagaatgatagctagggtatcctcttttgtttctcctgccttatattaatagaaagaaagtgcttttagcagctaaaagcacctttgcttttgctagaggggcaaataatacggcatttctacccaaaagatttttctgttaagctaatatctttttgcttaacatttcttttttacttgtcttgtgttttgggaataaatgaagggtgttgataggtatcttgtatttctggtgagaaattaaatgcccatgttttatacagttaatgattag

SEQ ID NO: 105267 - DNA, 1073 bp, Homo sapiens
gggagaccaagcctcactctattacccaggctggagtgcagtggcaagcctcaactcactgcaacctcttcctcccgggttcaagtgattcccctgcctcagcttcccaagtagctgggaccacagatgcctgccaccacgcctggctcatttttgtatatttagtagagacggggtttcaccatttgttggccaggctggtctcgaactcctgacctcaagtgatccaccctcctcggcctcccacagtgtgggattacaggtgtgagccaccgcacccggcctgtcttaagtgattatttattttctccacattattatcagtgcagccatcattacagctctggaaagtacacttttttcttcttggatcttcatattctttaaggaacaaaatcatttgttgatgcaaatgttttaaataatgttaatgttttacatactaattattctctaattattgttgctgataccttaaggggaatgcaaatctgtattcaacatgtttttaaattttgaaaactttgtattttttgttttatactgaaaattacctgtaaatcattttatgttttaggagctccaaatggaccagcaggcaaagaaacatctgcaagaggagtttgatgcatctttagaggagaaagatcagtatatcagtgttctccaaactcaggtaaaagagtaaaagaaaaagtgtggaattttttggataaagaaaaatagagggggtttgatttggatatctgcaaggttgcaaaagttttttcttttttaagacctatttttaaaactttttgctttcctcaattttttttatttttaattttttttgagacagagtcttgctctttcaccctggctatagtgcagtggcgtgatcatagcttaactgcaatctcaaattcctgggctctagcaatcctccagcctctgcctccagagtggctgggaatacaggcatatgccaccacgcccagctaatttttaaattttttgtagagatggggtctcactatgtcgcccaggctggtctcaaacccctgggctcaagcgatccttccgccttggcc

SEQ ID NO: 105268 - DNA, 1454 bp, Homo sapiens
ggtgttgccagctgatccatcaagtgcagggtctgcaaaatatctcaagcagtgatattaggagcagtttagtggtggtcagaatcttgtagccttcagctgcatgactcctaaatgataatttctaatcttttggctaatttgttagtcctacaaaggcaatctagtctccaggcaagaagggggtttgtttgggaaatggcttttattgtctttgttttagactataaactataaactaagttctcccaaagttagttcagcctacacccaggaacgaacaatgacagcttaaaggttagaaccaagatggagtcggttagattagatctctttgactgtctcagtcataattttccaaaggcagtttcatattccttactgatgggcccttcttatgttgctttattgttagtggaagatggaacttctgtaaaaacactggaaacactccagcaaagagtgaagcgtcaagagaacctacttaagcgttgtaaggaaacaattcagtcacataaggaacaatgtacactattaactagtgaaaaagaagctctgcaagaacaactggatgaaagacttcaagaactagaaaagataaaggtaaaagagcagatgagttttgttctaatttaatctataaagttagatccacaggctccacagcatggcttgtacctccgggagaggagagtggatggaaagggcatttttgtttgccctggcctacataacaccaaaccttgagacttactgtgtacttttttccttctgcactgtaacatgtatataaattagataaatgtttagagttctcaaatgagaagaagctttattagagatggaaatgaatttaaaaattttttttaggaccttcatatggccgagaagactaaacttatcactcagttgcgtgatgcaaagaacttaattgaacagcttgaacaagataaggtaaaacaacaaaacctatgatactaaaatttgtcaagaggccccaacatttacttttggaaacagttggaaacattcatgcttgtttctgttttctaaaaattattgcagctttttccatgaaaaatctttaatttctagatttttgtaactactagcattagttttgtgtcatgtaaaactgattctctgatttcttgatcccagtcagcattatgatttgtagactagaataactgttgcaaaggaagtttatatttatagtacataactactttacagagaaaagttatttatagttaaggcattataaatgtgaatgatatcagtatgttctttcagataatatggaaacagattaatctctcagataagttgcctaacaaataaataaggggctgggcacagtggctcatgcctttaatctcagcactttgggaggctgaggcgggaggattgcttgaagccagaagttcaagatcaacctgggcagtaaagca

SEQ ID NO: 105269 - DNA, 1959 bp, Homo sapiens
aagtattgaaataattgttatgctgtacttagcaagaaatatcattttttctgccttttattttttgttttttaatttttaatttttttttgagacggagtctcactctgtcacccaggctggagtgcaatggcgtgatctcagctcacttcaacctctgccccctgggttcaagcaattctcctgcctcagcctcctgagtagctgggattacaggcatataccaccatgcctggctaatttttgtatttttagtagagacagggtttcgccatgttggccaggctggtctcgaactcctgatctcaggtgatccaccctccttggcctcccaaagtgctgggattatggacatgagtcaccatgcaccatgcccggcctttttctgccttttaaattaagttttatctgtgctgttgatgatgcagttttgttatgcaaatgttttagagtcttcacttctattcagggaatggtaatcgcagagacaaaacgtcagatgcatgaaaccctggaaatgaaagaagaagaaattgctcaactccgtagtcgcatcaaacagatgactacccagggagaggaattacgggaacagaaagaaaagtccgaaagagctggtaagaacttgagggttacttgttttatgttggaactcaaaagttatttaaagtgcttgaccagtatttttaaaaatgagttaaatattgataaaaattcttaactatagaggctcctaataagacacccatctgctcattagaggaggcagaggttggcaaactgtggcctgtgggccagatccagcccacagcctatttatgtacagcccttaggctaaggatgatttttacatttttaaatacttgaacaaaagaaaaatatatgacagagaccatatgtggtctacaaaacctaaaatatttatcatctggccccttacagaaaatgtgtgctgacagagtatcaaaattcagatttaaaattgtagaacttcccagtaggtacagcatggtacttattaaataattgctaccttatagatgctttagggtaaacaaaaagtctaagttatagtctgcttttaaagagaataatgaacacttcagtgttaatagcatgttttgacacaataaatgctgggctataaagtatagaaaccagcatagtattcaacaaggtacaaaatcgactaaagctaggaaaggagggatgtttgaaagaggagagagcaggatgaactgtgccttcacatcagtgaagatgtgagttttgaattggacctcaaataatcaatagaatgggcctaacaagagaggtgtgggcagcacacatttcagatgctacaatgccgtaaacaggcacagtgatcatagtgggtgtgtgaatcagctgaaaaccattcttgctgaagtgggaaatgcagttggattgtaaaggaactgactattgaaatcttaaaaggtaggtagctgagtttagactttgatatacagagtaacaggaaaccagtaataggaaggcataatgtgatgggagctagggttttatgtagaaaagaaatgaaataggaagtcaaacttagaagcaaagacagaaatccagtttgagggactgtgagctttagccgccttgctaggatggtggttctgggaaggagaagaaaggtagaatctgtagaatttggtatctgatcaactcagggaggcagaagaaaagtaaggactctaaattgactccaaagttttaagcttaggacacttaatgaatagtagtgtggaattagaataggaaatctaaatggggaagttgagaattggagtgaaatgatgggttttttagatacactgaatttgacccagtcatgagcttttcaaatggaattgagttgcaggaatttggaaataagaaattggaacatctttcaggagtcatcagcctaggatcgaagcctgtggttaa

SEQ ID NO: 105270 - DNA, 1029 bp, Homo sapiens
atactactgctagccattacttactttagtaatgctctgctctaagggctttgcttgtatttacttgtattgcatcctcacaagtgtatgaaataatactattatcttcattttacaaataagcaaacctaagaacatagaagttaagtaatttacctacatttatgcacagagaataagtatatactcaagatttaatccaggcattgtgactcagagtctgtgctcttaaccatatagaggtcttgagtttggcaatgagacataaatgagaaaaaaaaagttacctcatgaagtcataggaattgtggatagttttttgggggaatataagatatgtttcaagaaatggagaaggtaagatgaagactttgaaaaggtccttgaatttggcaaggatttgatttggaggatgcagttttgagaaatgattttataaaccagattttaaggtgttaaggaggggactgggtctctagacagagaaatagttgactatttcataagtatctccccatcttcttggacttattttatggataaagtgactggggaatttagttaatgaatttgttctcatcaaacctaagaaaacttccctttagagagagtagatggcatctttcagaatataatctttgaagactgacttgaagcagtttgagtgttgtaagacattggttcaacaggtttgctttcagtgaacagaaaatctaatgcatagcctcagcttctcatatcaagcctttccatttttagaactgctttctgttgactgttgtagccagtagagagaaaatgttggtcaggggattacatttcttttaaaattcagtgtacttaatgaggagatagaaactgattaataaatatcaagttgaaaagggtaaatgatgaaaaggtagacaaaatatatagttcatttacatgcggataaaattttctggtatatgttccagttaaacctttagtagaacagctttccttcccttgcttgcttctccaaaacacaggtatattttgtctttc

SEQ ID NO: 105271 - DNA, 1055 bp, Homo sapiens
aaaattatatttgtagtcataataattgagggctatgatgcaaagttgtaacaaactgtctctacattgaagataatgccttttacatctataatgaaagctagttttgcacacaaactgtatttcatttaatagtcttagttgagtctaaacagaactgttcaagtaggaagtgattcttagttcaaatgtaaaggtatatgccaattgaaagaaaacttccaattaagtactaaacataagaaaaggtcaatgtaaaggaagtaggatttctataaatagtctggctattggaaaattcaattgctctattaaatatttgttttattctttgttagatttaaaattcaaaggctaaatataagaactggccatgtgaaggaaacattaatatcattacagcttgctattaggattttagaagtagatatgtctacataaaactcttatctagaaaataaactctccaaatgcattttcaactgtgaagaaatttaattctgatattgctggtaattcttgatgtgaatattagtagacaaatcactaattcctttggctcacttattctggatgtcaaaatcagctcaagaacgttccccactacttttcttgggaaacagtctcttaagctgctcctcatatttttttctagatgaattgtggtgcctttcatatgttggaggacagaggaaatctgaatgtctttgattttaaacagaatgattgtttattttctttgttttatttttctgtttttgcatgctggcataaaaagaataattctgttataaaatactgagactgtgaatacagtggtgtaccgatttcaggatggtgtatcaacctgcagttcttaaatagtctcctctctagtagaaatgttaggcatagtttttgacgtatgagagcatagcattcttgttttgttaaaaatatgtattttagtggataaagaaaacaaaaaataagtttattggttataagcgcttctgtaattgttgatagtgtttctttctagttgttacttaagaacagatggtcatatcttctat

SEQ ID NO: 105272 - DNA, 1302 bp, Homo sapiens
ttaattattgtaataatacggcacattcaattttgtatgttcttctcccccatttagcattatgttattgacacttttacgtgttgctaaagttaatatattttaatggctgtgtcaaagtgcatgtacatcatttacttggttatcatttccttattgtttatcatctagattattatatatttttgttatactattgtgacaattttgagatatagcttattagatctttgaattttatcttaggataaattcttaaccatagacttttagtcttttttgttagctacttttaagtgatttaaatatatatagccattaaaaaagtaacccatgccacaatgttaatcctccctcccattaaaatgttttttcctacaattatgcaacatgaataaagtattttgcttagattagggaagtttctagagtatagtaacttttgtaaaccccgtttccctttcatgtaccttgtctttgctgaagttacttgttttatatgattggtggcatttaaaaacttggactaactcataacattctttgcttttttattgtcatgttgtgtttgtgcaggaaatatgttttttattcatttgtatagtataggtctgatacaccaaaagaaattcattagaacatatttatttgatgtttgaaggactctttaaaatagtttatctgtttaaataatgtgtaagatttatgcatttttatataacaaaccaaaatcacatgtgtatttaactgctttgttagttgctgataatttatgtaacaaaattttcttggagtcttaagtctcacaaaacatcttatttttgtgcatccacacatgccaataagtgaatcatggtgcctttcccaagccttgtatgaacaggactggggtaagggctattttttttcttatcatgggtacttagaataagctttacaaagaaaattccatgtttctcaggcaaaaaaaaaaaagtatgaatgaaagtagattttaagtatgccatgttagataaataatacgtacgtattttggcactaaatgaataactgctggaaaaatttattttaagtggcttttaaaatgcaattatttatgtctccaacaatgtcactattacttgaaaccatcagtaatttaaaaacacgtttctttggtgcgggattatatttctaatttaatcaatgtacttagctttagcttaatatttttcaacattagcctgatgttttcaaggtatttgatagataaatatgtatgtaaagtgtacatgaaaatttggggctgggcgcggtggctca

SEQ ID NO: 105273 - DNA, 1856 bp, Homo sapiens
tataggccgggcgtgatggctcatgcctgtaatgccagcactttgggaggccgaggcgggcggattacctgaggtcaggagtttgagaccagcctggccaacatggtgaaccccgtctctactaaaaatacaaaaattagctgggcatggtggcacacgcctgtaatcccagctattctggaggctgaggcaggagaattgcttgagcctgggaggcggaggttgcagtgagccaagattgtgccattgcactccagcctggctgacagagcgagactcttgtctcaaaacaaacaaacaacaacaacaaaaaacaaacaaaaaaaaccagttataaatccattacatgttagcataaatactttttcattctacctatattttccaaaataaggtttagtgtgaagaatggccttgttttacatttttgttatctcattgcttggcttaataaaatgcagctggattttcatgcctgtttctgcatttaatccgttgtgatgtattattttggttgaaatatgggaagaaaatctactcttacatagacacgtatttggaaaagggagaatctcacagatcctctgaaagggtctcaagaccccaggatctttggaccacatattgagaactgctgctgtagactttgattttatttgccaaagaggcttgatgattcagtgggaattctgataaaattctttttgttgctttttctgttaatttgcatttcattcattttgtagtgcatttcattcactcattttgtttgtttgtttttgctgggataaagacaggcattggcttacttactcattcttcatgtcattaaccagcttgttaggatcatcagttaatctagaggttaacagccttttcacacttctgcatttttgtttatttcctacactgggagtagaagtgggtcttgttaaccatatagtgaagtgttctctggggcagtgtaacaaaatagtaatgctgcatgaaacctcagaattctggcatttcttattataattgattaggatactcaggatgaggagtatcctaagaagtgctggagtagcaaaaacaatgccacattcttcctagctgtatctaaggattagttattttattcccttttcttactacttcagctatctttttgtgaaatattttctttgtcacttaatacctagcatatgcttggcagttggtaaacagctgctaagtatgtatttgatgactgaatggttggattattgagctacagattgtcaacctttctcatttaacccttatagagagcatttgtccatttttataattcccatggatgtgagtgaacctcatctgaactggaaagtgaggagctagcaataaagggtctgccctgcattttacttaactgacagaggatcatacttacagttcattaaagattgacctaaaagtatttttaaagtgtgtgtgtgtgtgtgtttttttttttaaataaaaattgcctgagatacattgaattttgctttggaagaacacagtgtgttcttgcaacattctgcggcagttcgtgcttagccttcctattgatgtgtgccgtgactgtggttttcccatgcactcttgcatgttggcagaagacttgtcagctgtgactgatgcacgctttatttctccccactcacttatcttttgttgggaatttgaaagataaattgtctagacattttgaacatacttttttagtacttacattaaaatcctagtttcactttggaaagggtagggaattcacttttagaatattagtaggctgtgggcaccatttctaggggttacaaggtcaggtgagatgtttctgggtagtaagt

SEQ ID NO: 105274 - DNA, 1026 bp, Homo sapiens
ttatttggttccctgacatggtactggaaagtgggagagagggttaaatttagatgaaaagaactgtgaaaccaaatccatcctactttcattgttgtatgatggataataaattgacttggacaaacttttagtggattaaacactaaaattcgactgtatatagaagaatatcctgaaatttactgactagattagaaaacttaattagcagaaaattatatctaaacaggaacttgtggcatggattttttgttgtttgaaaaggtgagaacattacatttatttttttatactgtgctggattctggaatttaaaaaatgaaaacagaaaattcactagtattgactacatagttttgttttattttacttaattgacaaaaggttttcatttaaactcttattttgctgaaagggtatcaaaactgtcttcagtttctccagagcctgattgaagatatttctgtgaattactcagaaatgctgagatgcaattttatatgctggataataatgaaaaggggctgatgacacctaagcattaaaagacattgtcataaccttttttcattcctccagcgtttaaaccttcaacacaaactaattaggcagtaagcactttgtttcagaatctttcccataattagtcactttacttgactgatttttttaagtgagggaactaatttcttgttagtagtaagcgttcattatttccgtattttctgtatgcttaacgttagaatttatagtaaaagaatatgtaaaacaaagataccatttttgtttccaacatatttgtatctaaggattatcatcttggggtttgcaggcaaatgccagtaaagttagaataggaatcttttttttttttttttgagagacagggtctcacttgtcacctaggctggagtgcagtggcacaatcactgctcactgaagccttgacctcccagacttaagtgatcctcccacctcagctgctcagagtagctcagactacaggtacaagccacggctcct

SEQ ID NO: 105275 - DNA, 1086 bp, Homo sapiens
gtagatgcctagaagtggaatattaactcaagcaaagattacatgtatttttaattgttgcctagttgctgtgaggtctgtggaagacaatttataccctgacaagcaatgtattagaatatatttccccccaataaagatggcattatctaactttatctttccaagtttatgttaaaaaaattaatatatataactcttagcagtatgataaatatttttttctatttatttggcgaaatccttgactcacttttctattgggctgttggtcttttatggatttgtagaagctctttgtttatagtgagaattaggcctttgcacatacgtccttttagccaaataattttctcagtttgttatttgttgactttatttacaacttgttttcgtagaaaattttttttttccttgtagttgaatttataaggcttttctttaaatgctatgtggatttttttttttaatttaaaaacacatgttcggtcctgagatcagtttttaaaaatttgattttttcttctggcacttttatggtttcattttttttttactgttaacatctttgatccaactgaaacttatttagtgtaaggagtgaggtaaggattcaacttaaatttttcccagatggctaccaaatggtctccaaatcatttatttagtaatccacatttctccttctgatatgccatattatcttttttttgtagagacggggtctgcctgttttgtccaggccagtcttgaactcctgggctcaagcaatcctcctgccttggcctcccaaagtgctgggattacaggcataagccaccatgccccacccatattatctttaatacacactaaattattaaagtattaaatgtgagtttttctttctgcattctctgtgctgttctattgctttgtctgaccatgtgcagctgtttaattttataatatgctgtttggtagcttcttattattactcttattttttgaaatagtgttggttattcttgcatgtttattttgtccagtgggctcccccattctgtttttttttaatatatattaactttttagatttatataatg

SEQ ID NO: 105276 - DNA, 1080 bp, Homo sapiens
cattggtctcccaaagtgttgggattacaggcgtaagccaccgcgcttggccacactttctttttaaaacatttaaaaaattttaacaatttctttcaatatttatatttctctttcattgttgatgttcagtataaccaacacactttcattaagcagtttgtttatccatccctcccacctggcagtaggctatgattagggacaaaaaaaggaaaagatagattaattgaagcagtgactgcataattcaagaagagagtgcataattcaagaagaatgtcgaaaatctcatcagactgagtgtacccagagctcaaggctgagaaaattttggctgacttgcattttacagaagaagaaataaaaatggccaagtaatttttattttaagtggaataatttcagtactaattttcagtccatacgatggcttaaaaaagagttaaattaaaaaacttcctgagctaacaaaaacaaccagaaagcagattgagatttttgttgaaagattttttaaaatagcataatttgaaagtttaaaacaaaaaatatttttcttcacttatgaaagccttttatataagttgccataaaaaagtgttagtgacaaaaatgtaatttgtttttgtatgaaattattatccgtaagataatatgtgtaactcaaaaatgctttccgtgtaaaaggataataaatagtattttagattttaatcttctttcttacgtgtattgttgttttcactcttagttgcatctggggccccgagaatttctagcagcagtgattcttgaaatgagttaacaagttctctacccagctctgtgggggcacatggatttacagtatgattgggtgtctgtggtcatgaaatttacacatatatgggcacatatttgttttctttgttgatccagaaaagaattaaagcattttacaagaattcttaaactgtaacagtacaacataaattaaaaatgggggcaagaaagttaaggaacaaagtgggaaataaatagtgctaaaaatgcctgtcataaggacctactctgagttttcatgctggggtaactgac

SEQ ID NO: 105277 - DNA, 5055 bp, Homo sapiens
ggagtctcgctttgttgcccaggctggagtgtagtggcatgatctcggctcactgcagcctctgcctcctgggttcaagggattccccaacctcagcctcccgagtagctgggactacagccgcatgctaccatgcccggctaatttttgtatgttttggtagagacagggctttgccatgttggtcaggctgggtctcaaactcccggcttcaagtgatctgctcacctcggcctcccaaactgttggactgtgccttgccataatcttttctttgttatatgattcctttagtaattgagcatagattctttgtcttttctagtgtttggtatgataattttgatcttcaggtaggtggtagacatcatgtctgtgtatcattgttagtagacaagtacgtactttaataaaaatgcatctgtttttaattaacagagaattcttgaattggaaagttctttggaaaaaagcttacaagaaaacaaaaatcagtcaaaagatttggctgttcatctggaagctgaaaaaaataagcacaataaggagattacagtcatggttgaaaaacacaagacagaattggaaagccttaagcatcagcaggatgccctttggactgaaaaactccaagtcttaaagcaacaatatcagactgaaatggaaaaacttagggaaaagtgtgaacaagaaaaagaaacattgttgaaagacaaagagattatcttccaggcccacatagaagaaatgaatgaaaagactttagaaaagcttgatgtgaagcaaacagaactagaatcattatcttctgaactgtcagaagtattaaaagcccgtcacaaactagaagaggaactttctgttctgaaagatcaaacagataaaatgaagcaggaattagaggccaagatggatgaacagaaaaatcatcaccagcagcaagttgacagtatcattaaagaacacgaggtatctatccagaggactgagaaggcattaaaagatcaaattaatcaacttgagcttctcttgaaggaaagggacaagcatttgaaagagcatcaggctcatgtagaaaatttagaggcagatattaaaaggtctgaaggggaactccagcaggcatctgctaagctggacgtttttcagtcttaccagagtgccacacatgagcagacaaaagcatatgaggaacagttggcccaattgcagcagaagttgttggatttggaaacagaaagaattcttcttaccaaacaggttgctgaagttgaagcacaaaagaaagatgtttgtactgagttagatgctcacaaaatccaggtgcaggacttaatgcagcaacttgaaaaacaaaatagtgaaatggagcaaaaagtaaaatctttaacccaagtctatgagtccaaacttgaagatggtaacaaagaacaggaacagacaaagcaaatcttggtggaaaaggaaaatatgattttacaaatgagagaaggacagaagaaagaaattgagatactcacacagaaattgtcagccaaggaggacagtattcatattttgaatgaggaatatgaaaccaaatttaaaaaccaagaaaaaaagatggaaaaagttaagcagaaagcaaaggagatgcaagaaacgttaaagaaaaaattactggatcaggaagccaaacttaagaaagagcttgaaaatactgctctagagcttagtcagaaagaaaaacagtttaatgccaaaatgctggaaatggcacaggctaactcagctggaatcagtgatgcagtgtcaagactggaaacaaaccaaaaagaacaaatagaaagtcttactgaggttcatcgacgagaactcaatgatgtcatatcaatctgggaaaagaaacttaatcagcaagctgaagaacttcaggaaatacatgaaatccaattacaggaaaaagaacaagaggtagcagaactgaaacaaaagatcctcctatttgggtgtgaaaaagaagagatgaacaaggaaataacatggctgaaggaagaaggtgttaagcaggatacaacattaaatgaattacaggaacagttaaagcagaagtctgcccatgtgaattctcttgcacaagatgaaactaaactgaaagctcatcttgaaaagctagaggttgacttgaataagtctctgaaggaaaatacttttcttcaagagcagctagttgaactgaagatgctggcagaagaagataagcggaaggtttctgagttgactagcaagttgaaaaccacagatgaagaattccagagtttgaaatcttcacatgaaaaaagtaacaaaagcctagaggacaagagcttggaatttaaaaaactgtctgaggaactagcgattcagctagatatttgctgtaagaaaaccgaagccttattagaagctaaaacaaatgagctaatcaacattagtagtagtaaaactaatgccattctttctaggatttctcattgtcagcaccgtacaactaaagttaaggaggcactgttaattaaaacttgcacagtttctgaattagaagcacaacttagacagttgacagaggagcaaaatacactaaatatttcttttcaacaggctactcatcagttagaagaaaaagaaaatcaaattaagagcatgaaggctgatattgaaagtcttgtaacagaaaaagaagccttacagaaggaaggaggcaatcagcaacaggctgcttctgaaaaggagtcttgtataacacagttgaagaaagagttatctgaaaacatcaatgctgtcacattgatgaaagaagagcttaaagaaaaaaaagttgagattagcagtcttagtaaacaactaactgatttgaatgttcagcttcaaaatagcatcagcctatccgaaaaagaagcagccatttcatcactaagaaagcagtatgatgaagaaaaatgtgaattgctggatcaggtgcaagatttatcttttaaagttgacactctgagtaaagagaaaatttctgctcttgagcaggtagatgactggtccaataaattctcagaatggaagaagaaagcacagtcaagatttacacagcatcaaaacactgttaaagaattgcagatccagcttgagttaaaatcaaaggaagcttatgaaaaggatgagcagataaatttattgaaggaagagcttgatcagcaaaataaaagatttgattgtttaaagggtgaaatggaagacgacaagagcaagatggagaaaaaggagtctaatttagaaacagagttaaagtctcaaacagcaagaattatggaattagaggaccatattacccagaaaactattgaaatagagtccttaaatgaagttcttaaaaattacaatcaacaaaaggatattgaacacaaagaattggttcagaaacttcaacattttcaagagttaggagaagaaaaggacaacagggttaaagaagctgaagaaaaaatcttaacacttgaaaaccaagtttattccatgaaagctgaacttgaaactaagaagaaagaattagaacatgtgaatttaagtgtgaaaagcaaagaggaggagttaaaggcattggaagataggcttgagtcagaaagtgctgcaaaattagcagagttgaagagaaaagctgaacaaaaaattgctgccattaagaagcagttgttatctcaaatggaagagaaagaagaacagtataaaaaaggtacagaaagccatttgagtgagctaaatacaaaattgcaggaaagagaaagggaagttcacatcttggaagaaaaacttaagtcagtggaaagttcacagtcagaaacattaattgtacccagatcagcaaaaaatgtggcagcatatactgaacaagaagaagcagattcccaaggctgtgtgcagaagacatatgaagaaaaaatcagtgttttacaaagaaacttaactgaaaaagaaaagctattgcagagggtagggcaggaaaaagaagagacagtttcttctcattttgaaatgcgatgccaataccaggagcgcttaataaagctagaacatgctgaggcaaagcaacatgaagatcaaagtatgataggtcatcttcaagaggagcttgaagaaaaaaacaagaaatattccttgatagtagcccagcatgtggaaaaagaaggaggtaaaaataacatacaggcaaagcaaaacttggaaaatgtgtttgacgacgtccagaaaaccctccaggagaaggaactaacctgtcagattttggagcaaaagataaaagagctggattcctgcttagtaagacagaaagaagtacatagagttgaaatggaagagttgacctcaaaatatgaaaaattacaggctttacaacagatggatggaagaaataaacccacagaacttttggaagaaaacactgaagaaaagtccaaatcacatttggtccaacccaaattgcttagtaacatggaagcccagcacaatgatctggagtttaaattagccggggcagaacgggagaaacagaaactgggcaaggagattgttagattgcagaaagaccttcgaatgttgagaaaggagcatcagcaagaattggaaatactaaagaaagaatatgatcaagaaagggaagagaaaatcaagtaagttttatttcagcttgaatatttttatggcagtccttcttaattaagtctcctttttttgtgcctaatacagttattttaaattatttggataagtttcaccaacccaaaatattaaacataaatccaatatgttaaatatgaggagaaataaaaacaatttagggcaagtggcagtgttattccatgtccatttaggagagaaaaaccttttcttgcatataagattctggttattagggacatatccaagtaattattttctttttgttttgttgtttttagtattagcattattattatataacatagatgtgttttgaaaaaaaaattaaagtggaaaacaaaaattctctggtccccaggaccactactt

SEQ ID NO: 105278 - DNA, 2692 bp, Homo sapiens
tgaccataaaagaaactatcagtaagtaaaattaagttccataaggaacaattatatcagcagaggctataatttaagcttatcatttttgcagtggtggtaagtgcattaagtcattaaactggggaagaaataatccttgcccaataacattctctaatgggaacctgccctgcttggcaatgacttaccttaaggagagagggagcaggtaaaacaatctgaaagtattagctaattaattaccttgtaaagacacttttgctcagggagaggatacatttgatcactgttgagctagatgtctcattaaacatcttaaaatgcttatataaaattaaatttcatcaaaattaattggaatgagagttgttactgaaattgagatacaaatattaactcttgactaatgtgttttcttgtgtgtgttcatttttatttattagataaggcccaggaggtggaggctgaacttttagaaagccatcaagaagagacaaatcagttacttaaaaaaattgctgagaaagatgatgatctaaaacgaacagccaaaagatatgaagaaatccttgatgtttgtaccttatttcttctctctcacttttgaaatttagctgtaatagatttcatggtagtgccaaagatttccttttcaaatgtgttttttgaacgaaaagggtttttttttttgactcaatattattcaaattagtactgttatatgcagatttataaagttgagttgatttctgccaggattgtagtttcctgatgagattctgctaactaggcagcacagtccccttgctagtattgaagcaacagtagatactaaaaggaagaatagattctttcccatctgcctcacagattctgactgaactgtgaggggaaccagactaagaatcaagaccctgtgcttcggtgaagtctaagtaatgggatagtgagtgtgtatttaaatgtggctgcttaacttagctggaatctttctgggagggacaatcaactttactcttatctctacccagtgtgtggaggttgattggtctcaagagaagaaagctgggaaaaaatggaatgcataagccaaatcttttatatttagtggaaggttatttcaaaatacttactctactaatgccatgttgcaattcacagaatatgccactaatgcattgccattagcaaaataagataagccatgaagatacaccatgaagataaatcataaatgctagttagtactttggactaacatttgaaaatgttttcaaatgtaatacaatataaattgttcttggttgggttacagattctgtagttgctctaagccttatttcactatatgctaagaatcttttggtgattaagaattcataaatcaaagaatcatacctcagctgactatgtcagcagaagtctgagtcgggaacagattctaataattattttaaatgtaattgaaatggctagaattccaagatataacacatgcctataaatgccaccttttataattcttgagctttatatgtcattatgaaaagatttaaataatttcacattttcttatacttccatagaggatatatgtgctaaatgaaaaaaaaaaagtattatttcttgaatgcctagagagtgttggaagatacagtaaagctagtttagttctactttttttttttctgtttttgtttttcagaaggaaaagccagttcagtgtagttaagtaatttccctaaaactacatagtggtagagcagtgattcttcattagctttacacattttataaaaaaagacttcttcctaagaaaggaacttagagaaggcagttatttatcatggataattaagtcagggagattcatttgcagggagtaaattgtgccatagctctagaattcccttttgtgaactatttctttgtctcgggatgtgtggggtagcagatggtagacttttctagactcatgacagaccttttaggtagaagggtgagggaacagagagacaggttaccgtataccctttgacatggttcctccttaaaaatctgctgtattttagggaagttaatgaaattgtccttcaagcttcaggctttgagtagtacagcaagtggacaggaagtggagggtgggcaagggagtggcatggactcttttccaagttccttcctgtgccttggaccagcactgccactggaaatataatgcaagccggccaggcacggtggctcatgcctgtaattccagcactttgggaggccaaggcgggtggatcacctgaagtcaggagttcaagaccagcctggccaacatggtgaaactccatctctactaaaaataaaaaaaattagccaggtgtggtggcatgtgcttgtaatcccagctactcagaggaggatgaggcaggagaatcgcttgaacctggaaggtggaagttgcagtgagccgagattgtgccactgcactccagcctgggcgacagagtgagactccgtctcaaaaaaaaaaaaaaaaaaatgcaagccacaaatatgagccatattgtaatttaaagttttctagtagccacatttaaaaaaaaaggaaacaggtgaacttaattttaataatatatgctaccaatgcgatataaccaaaatactatcatttcaacatgtagtcaatattaaaaatata

SEQ ID NO: 105279 - DNA, 1306 bp, Homo sapiens
gtcgtgagaatctggcccagtgcctggcacatacgagcacttgataaatttgaaggaggcaacacatggtaggcagggaagaattcatttgggagaagggcatggtgacttgcaagttggagactcacaagtaggggtgcttaccaaatagcctaatcccaatctcagagcagtctcacttgcagagtagctcgtaaggctatattagatacaaaattggtttctttttaacattgactgtattttagtgattttgttttggcataataactagtcttcaaaacataacctgttatgtatatacataaagattcaacttagtttttcttagtgtttttacttcaaagcaacaatatactttttttttaaatcttaaaataagactagaaggcttttataaaggaaattacataactgttccttaaattagaaatgacacatcaaagattcttttctaattattgggggggcttgctttagattagtatcccacagatgtcaaaggaaatgtcagacatagctaattgtcatattagaaactgagcctgactaaataagtagctatagaggttattctttcaaacaaggctaaaccacattgacacagccatacaagaaatgtcaacaaaccaagacagagaacagtgatgcatttacaacaattttcggttgatggtgttttagaggtggaggccaaattcacgtgtgcctcggtgggaagatatctaagatatctaaggatatctagtagagatctctgctgtacttatgttgagaaaagggatttgtttttgcaattaagtctaagaaaatttcatgacaagtggtatttaaaattagattttctaaatgtcgtatgattcattgccttattttgtgccatagggcctaactatgtttgcatttgtttttgagaatggtgtttctgtttttggtaagtcaatgtctattaaatcagatacctgtttgtggttatttttcctgttaagtctcttgctcagcaaacacttgccctcattactcaaatcagatcaatattccaattccaaatattattttagcacaaaggttattgcagggtttataagaataaagagaagtctgggttgccctgtacaataaatcatggcaatgaccaagacaaatgagggaatgtaaggatggaaaacagccttttaccagggcagtcaagacaagagaggacaatttgtatgccaaattttataagtaggaatattggatcagtaagtcacatattgctctttctaattcagcctcgtctgttttttgcagtttgagacaaagg

SEQ ID NO: 105280 - DNA, 1994 bp, Homo sapiens
tgccatctggttgggtagtgctctgtataaaaatacctactactttattttaatgactattttctagaaatcaaattccaatatagaaaatgctgaagtcttaaaacacaggatacgtattgtagttctatcacaattctgttatatatctaattgttgcttaaacctgggaaccctagtttaaggggaaataaacagcttgatgagctttttgggatgaggagagagggagtgagggtgagaaaaatgatatcctaggaataatgagcattggaaagggcttggagtttaaagtgaggcatgaaggaaagtgtttagagcacaataatgaattaaaataaaaacagtagtgtgtgtctcaaaaacttaaatgtttatttccctacagaggtagttttctctataccatgttgcctctccagagtgcttttttgatgtgtttgtttactaatgcttcttttttttcttttcctttttttctttttttttaaatcctaaaggctcgtgaagaagaaatgactgcaaaagtaagggacctgcagactcaacttgaggagctgcagaagaaataccagcaaaagctagagcaggaggagaaccctggcaatgataatgtgagaggagtttgagtttgctgcacatgtttcttgaaaacattgtcatttctgtgatttgactagcctactaacatacatacatatttatctcatttaatcctaatgaaaaccctttgagatttttacctccgttttatagacagataaactaaatgttcaaagagattaaataaaatgttcaagctcacacaataagtgttgtggtgaggatttaagccaaatctactagacctcaaagcctaggcattttgttattaccagtgcttctccatcttttccatggaaacaatagcagaggaaagtgaatcttataaccctggagcatagctaaaaatggtccattgtaaatgtgatacttttagatttttggatttttgtgctaaaaattcacgttaattttatatcctactctataatacatccttagttgtagtcacataaaagtggtgtttttagttgtatatcattaagaaaaacaatttctatctttgttttggccagtggaccagatgcaaatacaatgcaatgatttgggaaaattggactgaattcaaagagaactggcctgaagatctaagcttttttttttttttttctttttaagtcctaatccttaagtaaaattgacactatgaaaggtagaccatgtttactccatggcttcttgtcctgctgtgcacctcagcagcacacacccacagttggggaaggctggcactgtacgtttctactgcctaaaatgttctcactcatccaggatggtcttttcatagcccagtcatgggggtaatgggaaagtgggtggtcactatgactttatcctggagaggattcgttacagaatgtcagttaccaggtaacaattttttacaccaccagttacatggatgacttacccgcagtgcagagaaagagcctctataaagagctttgctactctgtgtcacttggtaggcatatgtcaggtgtaagcactgagcaagctgagaggaccattttctgtttctttaatagctaagttagttctgtttaaattttctttactttctttttttctttttttgccatttagtcatgtagtcatgacttgagtattccaggtgctattatatattacttcttttgagaaaatacatgtatttaactgtctaacatgagcgtttccttagtatcaaagtattaatattgcatatagtaacattttaacttgtgtcaggatgccatagaatattgaaacattatgaaataagaaggacttctgagtcctttaccttgtgtcctaagaaaggtaagaaaatagccttaatttggccgggagaggtagctcatgcctgtaatcccagcactttgggaggccgaggtgggcagatcacctga

SEQ ID NO: 105281 - DNA, 1052 bp, Homo sapiens
gcctgaccaacatggagaaaccccatctctgctaaaaatacaaaaaaaaaaaaaaattagctgggcatggtggcgcatgcctgtggtcccagctacttgggaggctgaggcaggagaatcgcttgaacccgggaaggaggttgcagtgagccgagatcgtgccattgcactccaccctgggcaacaagaagagcaaaagaaagagagaaagagagagagagagaaagagaaagagaaagaaagagagaaagagagagaaagaaaacttaatttttatttctactcaacatttttttttctcctttattcttcataaatttgtatccttctggagcatcttctggtgcttctgtatatcttaaattgcaatatgtatttagagtataatattttgtaaaacaaaacagaacatttgtttagaagcacatatttaaagttgccttacctcaagtctgaccactcccttgagactcttaaccctgacttcctttttccttatatctttatattgctttgttttactgtttcttatagctattattgtatacactcatgttttttctttccattttttcaggtaacaattatggagctacaggtaaggctagttcttctttttttttttttcttttttttctttgagacagattctcactctgttgcccaggctgttgcccaggctggagtgcagtgatgcaatcttggctcactgcaacctctgcctcctgagttcaggtattctcatgccttagtctcccaaatagctgggactacaggtatgtgccaccacgcccggccaattttttttttaatttttgtatttttagtagagatggggttttgccatgttggccaggctggtctcaaactcctgagctcaggcagttcccctgcctcggctttccaaagtgctaggattacaggccccagccaagactagttattctttgaatttgtctgaaagtcatgcattttaggggtattcagtgttataagttaaaacttaaaaagactaacaaaaatttccaagcagtgcagaaatgtgtctgggc

SEQ ID NO: 105282 - DNA, 1188 bp, Homo sapiens
attattgatggacaatatatgtaagtcagtttaaataggaccatgtgtgtacaccttcaaggatgcacagtacacccataccaggatatgtggtatatgatctttagtaaagtctttttctaaactctgggagaaatagtggctcaaatcagcaggctaagtttgaaggctaaatctcctgggattttcccagttcttttaaaattcatacagacaaaaatcttgataattgttagaactgagtgatggatgggtatatgagcattaattgtactatattttcttggaatatgtttgaaatttttcataatatttctaaaatttcataaagataggtcccaatgtgactttatttttttgtttcactagtgatttagcttttcccatctattctcaagattactgctttaaaattcttaagatcaaatcttgaaaactgccctagcataacagtttttgtattagttatttttactgtgggaatatacacattaaaagttaacattttaatcattttagagtacacagttcattgacatttagttcatttacagtgttgtgaaaccatcactgttacccagttccagaatatttcatcaccccaagaggaaactccatacccattaagcagtcactccccattacctcctccccgtaacacctagcaaccactaatctgcttcctgtctctatggatttgcctattctgggtatttcatataaatggaataataacaatacttgaccttttatgttaggcttttttttttttttttttgagttggagtctgtctctgtcatccaggctggagtgtagtggcacgatctaggctcactgcaagctccgcctcccggattcacaccattctcctgcctcagcctgctgagtagctgggactacaggtgcctgccaccacgcccggctaatttttttgtatttttagtagagacggggtttcaccatgttagccaggatggtttcgatctcctgacctcatgatctgcctgcctcagcctcccaaagtgctgggattacaggcatgagccaccgtgcccggcctgtgtcgggctttttttcagcttagcgtgatgtttcaagattcatccatcttaatagcatatatcagtatttaatttcttgttatggctgaataatataccatcgtatggatatactacattttgttt

SEQ ID NO: 105283 - DNA, 1046 bp, Homo sapiens
gaaacatcttttcattggcttgttggccatttatatgtcttctttagagcaatgtctactcaagtcctttgtccattttttagttggattgtcttgttgagttgtaaatgctctttatatgtactagagacaagtcccttatcagatatttgatttgcaaatattttctcccattctgtagcttgtctttttacttcattgatagtgtctgttgatgtacaaaagtttctaattttagcaaagtgtaatttatgtatttttttcttttattctgtgttcttttggtatcatatctaagaaatctttagttttagttttttttttcgcagaaacaattcttgctctaaaccatttgtcttaattttatttgcctatattctgtcttcagcattaaaaaaccttgtggtgacagcaatctttctttttcttacatacagtttccctgtgaatcttatatggtctgattatttgttatttttagattcacaatttagaagaccgtttgaagaaatatgaaaagaatgtatatgcaacaactgtggggacaccttacaaaggtaaggatgatctcgtgtcatgttattaactgttatcttttattggtggatttgtgcatgatttttatttttgtttttgctaatttatatttttttctcattttaaaatttttaatgattttattttttcttaattgacaaatgcatatatgtatagtgtgcaacatgctattttgagttatagattcattgtggaatggttaaactaagtgcattacctgacatactaccttttttgtgtgtgtgtgatgagaacactttaaaatctactcttttcacagttttcaagaatacaataaattgggtggggaataatacaatacattaactgtagtcaaccgtattttacaatagatctcttgaacttattcttccttattgaactgaaattttgtatcctttggacagcatctcccaccccccacagtcccttataaccaccagtttacccggcttgagttcagctttttagattccacatgtaagtga

SEQ ID NO: 105284 - DNA, 1026 bp, Homo sapiens
agtctccattgtttcacatcctcaccagtgctttgtattgtctgacttttaagattctgctcatcagacatatgtaaatgacacataacacagtttgttttcacagaacaaatggttatttaaattctaaacccaaagtaatgtacaattacaataaaaggccagaagaaagaggaggaaggaaaaagatgtgagaaataaaattgttatagtaattcttgttttcgcttccaagcataaaatagtaattggaatgtttagtgtgcatgtgtgtatacaatgcaatatgatacaatataaaagcatgcctctctttgttccattggttgttttttaaatctatttttataagtaataagtagtttacctggttttgtctttacagtttgatctatttttttatttggcaggtggcaatttgtaccatacggatgtctcactctttggagaacctaccgaatttgagtatttgcgaaaagtgctttttgagtatatgatgggtcgtgagactaaggtataaatcatgtctcgtgatttggtgtgtggcttaattttaaaagaaatatgttccacttttaatacacatgtgaatgccatatgtttactattagcaaatcagacatgctaatagtaggtaatagataattattttattgctcttagtttacaaagtgaattggtggatcttgcttatatttattacatttataaaacattaattttgaaaatactattgggtaacactgaacgctaaacattaaaatttcattaacataagaataatttgtgaaccatgtggctttttttcttcttcatatctttaagttagaagaatagatttcattttcaaggagactttaggatattatggataatattggaaatagtcataattattagctacctagagagatttagaaacattatgctttatagttactgtaagaaaatccttctgcacttgtggaatatcgatcatttaaaaattaccccatgtaagtaataatgcttggctaatttgttttc

SEQ ID NO: 105285 - DNA, 2718 bp, Homo sapiens
ggagttgctgagtcataggatactaagcaggttcaagcactgatttggcaaatatatttaaaacctaaaaagcaaatatcttaaaataatattataaaaggaaatatcttaaaagaatatgataaatgtatagattggagattcagctaaataccaggagtgggttagaagtcatttgaatccttaatatctgtagaaatcacatttcattatatcaagttaaagtaatatctaatattgtgaacaggtatcacagaagggagatattaaatcacagcaattcagtgtctttttttttcctcaatgccatttttcaaaaagttcaagggtagctaaaactaattttctccttatcttttaaaaacaaaactaacgaaatacagctttctcttattatgtccctatgggacatacactatctcacctcaaatacagggtatattatgtccctgtggggggatatttgaggtgggatagatagtttaaagttaccttgttattgtattgggggtggggaggagaggcatatctttaaaaaacaaaaagcttctcagaactttagctaccttggctcattagtgaatctaaagctatgatgcaaggttgttactaaataatttatttagctttttcttgatctgtaaaatggagagacagactgccttaacctgtttcttctgaaggttatgaatgtatgtgagatgagatagctacggagcttaactaccctgaagaaagacctagcataagcataagcataagaggcttatggggcagtaccagttcatccaagtctaagcttgtgcttcagggctctgcagttaatcttagagtgtgacttgggaagtagctgaaagggatgtcccatggcacaagcagccccatctaataagctggctgggaatttgtgttgaggagtagtgctctctctcctctttatcttcagcgtcgattctccttttctggctctaaaaatgaagagtagtctatcattctgccatcacattttataggcaaatagaaaattggtactaggtatttacttttaagttgctgcacatttattgagcatggccctttatcaccatggtagatagcaagatgacatttgataccatctctaactttaaggcgttcactgtgcagtaaggaagggaactgttctcattaaccataatgtgatgatgaatgcagtaagtgctgtaagacagaaacagagtcctcatatttacctgtgagaagatcaaggagaacatcatggaggaggtggtgtgtatactgggatttaagaggagatgttagattttgatagataagcccagatggtggaggggtagcccagacaggtttcaggcaggaaacatagtgtgggtttttgaaatcacaagtagcctggtccaactaaaacgctggattgatgaaggggaagtaatttaacttaaggctgcacagagaatgcagggccttgaatgttttcagagttttacctgtaggtattgggagggggtagccctgaaaattttcaagtagggatttacaagatcagagctgtttttagacatgtcttttgtgggtttgcccaatttctatacattaacaaagaatttgaaatggagaccaggttgcggttttagaataagtcggagtatgttgtgctctttgtgatttgattaccatctgcagttgtttcttgtctagcaggattcatatgtcttctcacctgtgtttcttcgtctgcttttgtacacagtgttctttattttatgaggcagatgactttttaaaagaagactatatatagtacatacgttcttgtagtatggagttaagtaagttcccttccttccttctgtccgtatactttctttttcttgggttttgatcctccatgctaatgctgaacctgaaattcagcctgttctccttttcaacataaagtgtttctcatcctaagctttattgaagatgcctctccctaaggaatacctggcaggagagatcacttgtaaatcaggtggctcatttgaacttttccttacttcccagggcctgaggatattgtatgtagagtagacagtctgatatcttttccaaggtgtggcaaagagcctgggcttctccattaaagtgttttctggcaagccagggatgagctttaactcttcactgggtaatgagctgcagattcactgatgaatttagaggtgggtttaccatttaatgttgtctagaaacacgaagagacaactagccacagctatattttttccccaaacatgcttgtgcatgcatgtatatgttgtttcttagtaaatataaatggactttttggtacttggagctttatgtggtgttgatattagagaaatgcttcctataattctgaatccctgaattttagattttttggtacttataaaaaaacctttatagatagtataccagaaactgcttcaggttattattaaaaagaaaaaactgaaatggttactacttcatatttctctttccatttcatgccacatgtttacaggcataccttggaggtattacgggttcagttctagaccactgcaataaatgaatatcacaataaagcaaatcacacaaattattttggtttcccagtgcatataaagttacatttatactatactgtagcctattaagtgttcaataggcattttgtctcaaaaaagtatataccttaatttaaaa

SEQ ID NO: 105286 - DNA, 1607 bp, Homo sapiens
taatgaccttccccagatcacttccactcttctcccttcccccatatgcaaagtctatgtaactatgatcaaggaatgttagagtcagttttctgggctaccctcccatccacggtaggaatctttagaatactaccacctgattttgtatgtaagcactgaagttgttatcctacttatttcataagtggtatcttctttcctctctgtctccctcaaaacatctcatcttgatacaaaatagggagtttcaacctttgaggagaattttccaggagcttatgggtgacagtctgacttacggtatatttatttagatgtgcacaatttatgatcttgttttgcaagccatgtgtaatgtttcgattcatcatgttttctaccaaataaaacatcttgtgtttatttaaaatgtaatttgtatttctattaggttgatgtgctgcatgtcttgaaaaatacctactgagcatgttcatgttcatgcagtagccgtgtttatgagatatatgatgtgatttagttaaagctgaacatggggggtatttaaaatctgattatttagaacatatgttttggcaatacatcacttactagatagatttctgcaaataagccttttaaaatgaatatgtaataaagttttatttaaataaaggggccaagagcattagaattttatatagcttcatgctattgtaaatgcatcttgttaaaataatatgtgtagacattgtaaggagtccttttaaattgaaattctagtgttgttatttccttgactaataccttcacatcatacttctttgttcgtggctttcattgagagcactaaagaatcccaccagcagaacatgtcagaatgggttgagactttatatgcttcactgtctgttagtgatcatctcttgtttttcttgtagaccatggcaaaagttataaccaccgtactgaagttccctgatgatcagactcagaaaattttggaaagagaagatgctcggctgatggtaagttctggaagtgggctctagatagaagatgatttcccatctgtttatattctgtctcatttataaggacttttgagttggtaaaataaattttaagatttcaaatctttattatatcacagcctgaaaaatgagagtgaatttacactaagaaatttaaccaagggtaaatgtgaatggatgccctcaagggaaggaagagtctaatttaataccatataagagcttgacacccgtatgtatgctatatgacatttccagaacttgggctgtttatggaaaggatggaaaagacatttgttctggtatatccagtaataattttttaaaccaaattatatcatcatgttagatgatttatatattacagttctttattgcattccagttgatttccaaatacattaattctgggtgaaagaatttaagcattcttgagcttttgataccttatgggggcaatcagacaaacaatgaattatttttaaaaacatagtgtgaagtcagctgtaattgaaaaatgaaagaaacacacactttgtaaattataaaaaattctccatgccaaagttatttttgccctgggccagtaat

SEQ ID NO: 105287 - DNA, 1004 bp, Homo sapiens
gcaaactttacttctactgcattttctcaggatttgctatatagtgtaggctcatcctaagtcgctgctctagcaaatgtggtaggaaacattccccttcattccatatacacatgtagtctttggttgatttgctttgatgaaaaacaaatcgaattggtaaatgtaggtagtgaatcgataaaactcttaaagcagacaaaaaaggtttgtttttgttaagtttaacttaaaaaaaaagagtctttgaaaaacagactgttttcttcctgaatacagtggtattcattctaggtagggatgaaatggtagctgatttattcttcctgaaagaatcttcctttatcccagaggttgacctgcccagaaacaatgttctacttttctactattcctttaagcaaagtctcatccatcattatctcttgcttaatgaataagttcagtcaacagtcatctactcttctagttgttatgggaaatataggaaaatagaagatatggaagacattggttgttgaccttgtggaacttttaattttagggggaaggggtaatatccattcatacatgaataaaaagatatgcttaagtaatatgattcaaataataaaaatggtgcttaggaaatatgaaattttatgatgaacatgaaatgaggaagtccccaaaatacgatatgagatgacatgaattaatcaatttgagtcaacttttgtcaatttaaggagattcttgatacttgataatgtgactcatgattgtttcacgagtataagaaagttgaagcaagagttacctttgtcagagatttccatcattcataaaatgagcaataagaatcactgtctttgaacaagtctcttgaagaaatttcagctaatttcatatccctgtccattgagctgtagctcgctagaacaaaacacaggtatgaaaatgatttttctttttccaatagaaagtgcacatgatgaaatgtgtagaaaacaaaactttaggag

SEQ ID NO: 105288 - DNA, 1310 bp, Homo sapiens
tcttcaaattcatcatcattttcccgaaaactttttagggtaaattgagattatgtaaatcaaattttaatgtgtactttcatggaattatgaaagagatccttttgtaaagcaaataattgccccgtaattcagctggtaaatatgtacttaaaatatgcagtacacctttcattacgttgtttaagtcttcaaatgaaagttgcaagtaaaatctcagctacataatattatatttacctaggatatggggggaggtattacagattccttattccttgcctgtacacccttgatttggggagatttgagaaaaatttaagtacagtctgtaatcctatgaacttcatatacacatacaatctatgtgttatattaagtcttaaaactaacccaataagctttttttcttcctggctttgtagtttacttcacctcgcagtggtatcttctgagtaaaccatcagtctgtgcttagttaacatgtggtgagtgaagaacaatgtcttgtgtcttttgtgcaaaaatcaaatgtgttgcctgatactaaccattttgctggaattcttttgctcttgtttaataaatatatgattatgctatgggttaatataagtattttctgttcattctgttatatggatcgataatagttaaaaattactaccaccagtaagagttatataattttaggaaatttcatttctttaaagagtaattgaaagtttgaaaattgctctttgaaattttgttaaagaatccaaaaaagtatttatgtaacttattttcccttttgtttttaattttccaagaatgatctttgaaattatgattgtgagagagaaatgaaaaatcattttctagataaaaatgaagtggtatattccgtgagaattcaaaatcctgtaaagcctgagtcaaggccagtcagaaataatgaaaactagtaagatcaattttaaaatatagcttcattacttcctgaaatcagacagtttaacacaagacaacacatttgtcctgaggagaccgttaggcagcctactttaattgaatgtgattcttcctgattaacatattacagtgaaatgcaggcatatgaaatgtttcaacgcagttgactgtcttcatcatttaaaccctctcccctcatctctatgtatttttcatgctattaggttgatttagcaccctctgaaaatgtaccatacatctttacctcagcctttgctagaattttcacaaaatcaaaaacagatcacaattagtagggcttcactataattaaaataaatactctcagtgattgt

SEQ ID NO: 105289 - DNA, 1384 bp, Homo sapiens
ttttttcagaatggggtcttgctgtgttgaccaggctggtctcgaactcctggcctcaagtgattctcccatcttggcctctcaaagtgctgggattacagtcatgagctaccacacccagccttatttctgcctctttactgcagtctctagaccatggaatagaattttatttcaaacttgaaaaaacaaatatcccaaaaagtcaacctaaatgttttggatttttttgccccctttctttattctcttttcctttttcttttccagtcatggctccgatcttcatcttgaagaagagtgacattgggtgactgctgcttggaaaactgtccacacttgctactctttgagaatgaagttgtcattcagggcccctcatgtagccaaaagaccaagaaaaatctggcccacagataagttgcagactgcctttaaaatagattttatcagtggagaaatggtgatagttttttcttcagttttctcttgggaagagttttatgttgtttaaaagatattttgataacttaacctgctttatgggcttacataatattcctttcatccattctttttaaagaacggcttacctttcctatttatttttagggtgattttttaaaaagacttgtgcaatacattttgaggtgaaacttagtggattttttctgataaattagagcatttaattgactattttattcaggttgatctgttgaatatttgctaaagaccagttctttaagctaagacatgtaaaaaatcccaaatggcagtacctcattgtttacttagcttttgtacttatatttttcagaggaaaaaacactactgtaaattgtgaatagccaatacataactgtattgtatgcaaatctgtgattgttggcagtgtcatctctgagaaacagataaataaagtttatttactatataacatttgtttattgtacttgttcctcagttgaaatctattttaaaatgtttaagaatgcatattctatttggatgaatttagtgaggaattatttgtcaatataactaaatgctgagcatttgaaaagaattttcacgttcaaatttggtatgaccaagttagaaggagcatggaaataaatactccatgatgtctgctttaggattctgacaacttgggaatgcctcctctctctggaatagaccatacttgaattattttttaacttggtgaaagagaaatttctgcacactgagagatgggtactgttcagagggcttcacacacccttcatattctaggaaatacaatactcaatatctaggtattatctaatctctgcctcaaggtagaatctcagttttccagccagtctggaccttagctcctgatgtatcttacatt

SEQ ID NO: 105290 - DNA, 1034 bp, Homo sapiens
agatgcatgctgaagtgtttctgtgggtagaaacatggttgaatatcagccattcctcccttccctgctgtctccacatcggttcagtcccttgggcctgtcagctctgaagccacccccgtcgcccatctccactgcccctcctggtccagacctgcatcatctctcacctggtgttcatttgcacttttgccctcctgcagtctccaccaagcagccaaatggtctttccaaactgtcacttggatcatgcttctcaactgtgtaagactctccaccacttcccattgcagatctgctgaagtcacagccattcctacgtccccctgtggtccaaccttggccgcctctttgatcttatctccttcccaccatggtcactccagaccggcctttctttctcttgagcctctgagcctttctcacgatgtatcctttacattctgctatcctttgaatcctcccagaaccctcttcccctcatgcttcaggccttcccgacctctggtggaaactatccttcccactcccagattctctattctataaccttgtttctttccttcccaatgctcaggactagctacaattctcatttgttgatatatttatttcctgtctcctagtaggctcccagtggcttgttcctgttcatgcagttttctgatgcccagaaaagtgcctgttatgaaggtgtggctttctggtccctctgctcctctcttctcccacagaaagaaacatctggcactgacaggagtctgctttgtgatcttttggggccaactttcctgctctcaactgctctctatccctttaggcctgtgctcatcgctggaagaacatctactatgaagccgaccacatcctaccccatggcttctgctacatcatcccctccaacctccaggccaaaggcaggacgctgatcccttgctatgaaggtgagcatggattgatttttcctcatccccctacccacctcatgccctaagcccgccttcccacctctatgcaccaccagctgaacattt

SEQ ID NO: 105291 - DNA, 1810 bp, Homo sapiens
cgggtggggctgggaggatgccggccgtagtgagagggctcttgtctgtgctctgttggctttaggcatctccacctccctgttttgtggtttaaactagacctactatggcttttaaggccaccattatttcctcaatgtggagaaactcagtaatgcaagttctctgttccacgttaggggtcacattatggttaaagacaatgggaagattttagagtttgacaggacctttcagataccacctagaacagcctcctgtctttcatgaggtccagagaggtgatggcctgagtttttctttctaatctgttattcacatgccacacaatggagaggcagagtagcttggtggccaatgcacagattctggacacagactgccggagttcaagtcccggctctgctacttcctcttattaacagtgtaatctcagatgggttatttaagttctctgtgcctaaccaacctcaagggtctatgaagaggactgagttaatgcttctaagtccttagaacagtgtctggcatatacttgctaatatatgctaagcatatatatactaatatgccatgtacaacatactgtattctgagcaagtgtttgttaatcatcatagggtgactgacttgtgtaccgggaatagaatccacttaatcttaagtacttgttagttgccagatagacaaaacccaagtgacacagttccagctaccaagaagctccccatctacaggggaaaacagagaggggacagggtgttttaaaagtgggagggccgtgtggagagagaatttcctgccagtgtgtactgctggagcccgtccccaagggcttgagctgcatccaagtgcaaggtggcattatttcattttacaattggaaaaactgaaacccacttaaagtctgcaggctgttgagactatggaagagagggatggtggaaattcgagactggtcatggtggtgggaacagggcaagggaggagggggacggctgcctctaaacccacttcttgtgggatggtggaaagaccgtgggaggggctgtgggttgaggacggctctgctgcacttctgcccctttagcctcaggcctgtcacttggcctctcagtgggagtcgatgctgtgatgcctccactgcatttaccgctttgggttatggtgaggagctcccgagaaaactcaggtgaaagtgctcagcaaggccacccattgttctataactgtggcctcatggtaagtctccatatgggccagctgtgctcctttacaacattggaaggtcggtttggttgcagagactctaaatatgtggggatctctccaaaatgtctcaagcttttgaattcttaaaaaattggtctctggtttggcactaggacatggcttctcaggtgcttcctgtttctggttggatgggaaaagctaccagaatatcctgttggaaccaggaaaaacagaggaaatgggaaataaaaatgaatttaggacataaactcatggagcatatccttcagtcagtttagtttgtgtttgtctgatgtgagaacatcattacctaccatatgttctttggttttatcagaatgtgtgagaaaacgagagctttggtgggacgatgtatagggaaaactacttgtaaattaaagggcaagcactataaaacattaattactattaaccaagctatgatattttaggactccgaaatgttaagtcaatgcatgtgataaaatcaagtacagagatttctttcatcctttgcccttgagaccactgaggcaagaagccggaacttagcag

SEQ ID NO: 105292 - DNA, 1035 bp, Homo sapiens
tagcatgcaaggatgttgtggtcacaataatccattatcttattcattcagctaaggtgcattgacctgttgagatgcagccatgcatcagatcctggggatttgatgggaaacctgacctagcctgtgaccttagattatagccagagagccatatgcaagtgaataataatgcaaccaatgtttggtaagctcctaccgcatgcctggcacagtgtgagcacttcatttgtgttcattctttgttattgttttctttctgtattaaggtagaatttgcatgcaataaaatgcaccaatttgagagtatgactccatgagttttgaccactgcatacgctgtgtgactaccaccccaccacaataaagaatacttctgtcaccccagagagtttccttgtgcctctggctggtcatacccctctcctgatagacaaccactgttctgacttctatcaccatagatccatcttgcccattctagaatttcacattggtgggaatatacagtatggactcttgtttctggcctcttttaatcagtgtgatgcatttgagattcgttcatgttggtgtgttgcttgtttttccccttactgagtagcactccattgactgaatatccttgagtttgttcatccatcctcttgttgacagaacacatgacaactcttagtcttcttaacaatccatgacataagtggggctgttatccccattttatgggtgaggagaccaaggacatgcagatcttattaatataaaagggaaggtgattccagatggtggtaggtgctgtgaggattctaaggcagggttacttggtcaggcagtggtgtcaaagtcagcaggaagggccaagcagagtgaggcctgagacttgttggaggtggcagggggaggtcaggggtgcccttggctgtggtggctctagagaagtgatggggcaaaagccagatggcagtgggtgggtgagagaagaaacaagaaggacagtgactcttgactgcttctccagaagcttggctgcaaagg

SEQ ID NO: 105293 - DNA, 1002 bp, Homo sapiens
tgttggatgctggttttcagaggtgatcaaaactttttttttttcttgtttaagaaacagatagttaagaaagggagattaagttggagttaataagaactctgagaaagaggagaaagaaaaacagcaaaagtttcttctttatctggaaaataacatgctaaatctccgggtcatcttgagaaatcaaagaaatagctaagaaaaaaacagttgcagggtttggcaaaaggggacgccaaccttagatatgaggtcttctgaaaacttttaaaatttgtttattttttgaatcagtagtgtgtatagttaaaatttttaaatggttataaaagttgtcaaagaaaggatgtctttcagctatcctatttttctcccaaaggcaaccacagttccattttcttaacgtgtctttcaaaagcttgtcaataaatatagaaatctgtgtgtgtacctccttttattttatgcaaatagtagtatactgtgtgcacactgtagtaaacttactttttcttttaaaacatccaacagcagaatggaggaacagattttggcaaatcgcacaaaatctagctgtaccagatgaaatacaactcagcaataacaatattatgttattatgatacacacaataacatgaatgacttttgaaagcattaaactgagtaaatgaagccagacacaaaaggctacctactggatgattcatttatatgacgttctggaaaaggccaactaaggagaaagcagattggtggttttcagcggccagggtttgggggaagggctgatgatgattgacttcaaagagggatgagacaactttctggggcgatgaacatattctaagatcgtggttgtagcggttgtatggttgcatttattaaaacttaacagagtgcacacctaaaattagtgaatgttatgtatgtaaattatatctcaatcaaacttattttgttaaaaaaagtttcgtggagattgttccatattggtgca

SEQ ID NO: 105294 - DNA, 1004 bp, Homo sapiens
ccagttttttacttaaacatgcttattagcctccattaagaaaaaggtaaccctgtgtatacctgtattaacacaatgctaactgctgcaacaaaccctcagttttcaattacttgacctactagatgtttgttcattgctcatgtgtcagtcaaataaggctattcctcgttgaaggtagcttcctccacgtggtgattctgggactgcagttgctttccattgctgctgctgcaattccttaggacctccaggatttctgcctcctgggggcaggaggagaaagaagcagtggagaaggcacacccaccccttaaacactccagcctagaaatgacccacatcccttctaccgactttccattggtgggaactagtcacatggccacagccggcctcagaggaggctgggaaatgtgggtccaggctgggcaccaccttgggaatgactccacatatcagtggtaggagatggagaggagggggtgtacttgggaaacggcgaggtcaagtcagcagggtggattgagaatatgtagggggacgaagccaggagtccaaggaccccttgggtttctggtttggagaacagggtggatggtgcctctgaaggcaatggagttaacaggaagatggacgatgctgagagggaaggctcatctgtcaagtgcccagcaggggtgggtgctgtaagaatgttttgtgaatgcaggaatgaggagaaacagtagtgaatgaacttgagtcccttctgccaaccccttgcagctatagtggagaaaaactgtttggtagctgtactccatagcctgaaaccatagcacctgatgaaattggaccaatctgttttcaaatacaaagctagtagttagaataaccagggggaaaaaagcataatcagtagccccatgtctttgcacaggctgccataaaaaaaggtacagttgtttctcagtatgcatgggagattggttccaggattcccaatggataccaaaattcat

SEQ ID NO: 105295 - DNA, 1050 bp, Homo sapiens
tcagtctttggattccctgccctaacacaaaatccatatttatctcaatgcaaaagagatgtggtcatcgaaacactgaatgcaaagggttagcagagtgagcacagatgttctcccatttgccaactggtttctaagaatatttggaggatgagtaaagtaatgtcttccatatgctcaagagaagatgatttagcaccatgcaaggtagagaaggagagcccccacccatcaacagaatgaccttggacaagacactagctgccctaggcctcaattacctcatttaaaatatgaaagtcataaaaccctacctcacgagggtgattgtgaggattatatgaggcaattcatgtagaaggtctttgtaaactgtgaaatgctctacgactgtcagccaggattagtagttaatgcacgtatttgtttattgtttcagcggagggtgcaggacgtcatcagcccgatcgtgtttgaagcagcctacagcctcagtgagcatgtgactggagaggaggagagggaactgccgcctctgacaccagttctccgctggaaaaagggacaaaagattgcccaaaagaatcaggtcagaaccttaaagctcatactcagcacccaaggtggcagctgcacagagcagaaataatggcccaaaagttgagagagccgtgggcctggctgctcaggagaccgcagccaggacacacctcctctctgggtctcccttttctgatctgcaaaatgataaaataaacagtcttaggggttacttgtgactactgtgggacttaaacactttcagacaattctcaggctgttagaagttacaatcccctcgagttcgtgaactggctggccacttggtccctgaacttgcctctgttcctagactgttttcagagcttagattggtggatagtaggtgcttaatgaatgttttattggtgggagaatgagtgaggtgaagaagcaagaatggtagcttgctgaattggcagttgagttacagaatgctcaacccaagagtccctggaaaccagagcactg

SEQ ID NO: 105296 - DNA, 1045 bp, Homo sapiens
ggtggaatacaaaatttgaatgggctggctcaaagctgaaagcaatagtgaaaacaaatggagaactcaccaccatttcctggacatgaaacatctctgcaccaccagatgagagtcgattagggaaagagatgctgacagatgaccctggaagggtgcttgggccagtgttgtagacctgtgggtgtggaacacacacagcaagtctcagtggaaaatagcagacctccatttcctgtcatgcaatatatattctaagattctttgaaatcacatacagaaactctaaggttcggatctggaaggtcacaacttgaagtaaagtgaactactgaatgacgggaaatttcaacaaaatagaaacacttctaacatgcatctaaaaatctcaaactttgaaactaccatattctctttcagcattttgtcttcttcctgctaaaacttttctttttacatgcataggaatttactcatagactattacacttggtgagaactcagacatcataatctagtccagtggttctcaaatttcagcaaaacatcagaaccatctgaggggcttgttaaaacacattttggtgggggggtatggagtgggggtcatgccgagtttctgactcagtaggtctagggtggggctggcagattcatatttataacatggtcccaggagatgctgctgctgctggtccaggaaccaccacttgagacccacagatctggtccaacctctttcctttgccagtttgaggtaactgaggccctcaaggaccaagtgggtcatcccaaaaccaagcgatcgaatatacagaaagggctgtttttactacatgagccagctgatttggtttccaggcaatctgcagctcatcacttgcacaactgtacccctcttctgtctcagcatttggttctataaaactttgcctctcttgttttccctagcatttctccattttctgtcttcagaagtcaatcatttcctgagaaatgaggaaaaagatggaggtcacagagaccagtaagagcaaggagggag

SEQ ID NO: 105297 - DNA, 1108 bp, Homo sapiens
aagttttgtattttttgtagagacggggtttcaccatgttggccaggctggtctcgaactccaggcctcaagcgatctgcctgccttggcctcccaaagtgctgggattacaggtgtgagccaccgtgtcttttccctaaaagtcactattacaaacaaaaattcgcctaactagaagttttgttctattttaaagtagatgaaacctcatctctctcccatagtgtcatagataaaatcacagttgaactcctttggggaagaggaggcaaacagaaaatgttggtgcagcatttatgtcagagtgtgcagtctgttgaggcagtgttgtaatgtgataaggggcttggtggaggggatttctttagggaaaaaaatttttttttctcaaaaggctaactatgacttttgagacttataaagtctcaaaagactttataagaggttaaaagggcaattgaaatgtaggattattttaaagacctacgtatttctagaacttcaactacagacctcttgttaactctgattcccatgtctacaacctaagaatgatacattatgtttagtgaatagtgattcggtatcacactgacagtacggtgcagtaacccaaagacctgttaattgatggtctaaactccagcctcatatttgacttatacgggaggtcttaatgtttccggcttattgccatattccatatgtaatttcctccattcctttcaaggggaaagccactgagtgttacccagctgccactgctgaccggttgcccacttcactgagggcctttgaagacagcggttggcggggacagtgttgaagtcctcttccctttacagaaccgtggctcttgaatgtccttctagagtagctcttggcattgctacctatggtcatttgctgctgccttgaggtccggagccaaaagtggttgttcccaaaagtgttgcataaacgtgaatcgtgacatggtactgaaagctgagcagagcagctggccatgccgccgcattcacagcaccacacaagcctgaaggtctgcatgctttatgcttgcaagatggccagcaccttcactaggcaaagagtagtaggtccctac

SEQ ID NO: 105298 - DNA, 1085 bp, Homo sapiens
tttaaaacaaaaacccaacagcactcctgggaacatcctgttttccatgcggaagcatagcagatccccagacgatccgtgtgctgtatgctacctgttgaaccctagcatggtggctttttaaaaggttatttatgacttttatttttgggtaaggcattatggccaggtgcatgcagttatgtctgggttacgtgtgaaacgtacatctggtgaactgtatacttggctcaaacttctcaaaatttagaggtgctggaaaggattgtcacttggagcctttagtagacaaaaggcagaaagtgagcatcatttcagaaatgctttagtatgcacacttttagctgatattttgatatatagaataataatatacacagtggagaatattcaaagagtggctgaagggagaatacagagccagtagggccaaaatgaaacttctaggatgtcttctgaattttcagcacatggggggaataagtgaacaaatttcccaacatcgtgcaatgctttatagcacaatgatctagatttcagactgtgttaaggttttttctttgttgatgttgttgttttaattctaatgtgcacggtgtgactggcagagtgagtttaaaagctttacgagtgattaattgcttggcaggcacccacgctatctgcatttccagaactttactgatgcatccatgtacatttccactgaggaattttggtgggtggggggaggttgtgctgcctcacaatgtcacgtgtattaaagtctaagcagtcacttctgattcacttgcactgtttgggaaatgtcaggtttacaaaaacatacatgtttggaataaaaaatggctgcaaacaattcagaagttcaatctgtaatttacttgctaataagaactttttaaagtgttgaagctagggtttcaatgtaatacaacatgagcattaaagagaacatcaaggtccatctaattcacatgaacaacccacctgatgtggctgaactgtctgcagtccttggcctccacacaagaggtaccacctcctctctgcatcaccctgactcccctggcccagggctacac

SEQ ID NO: 105299 - DNA, 1052 bp, Homo sapiens
aattttcagaactgaaggtcaagacactctattttgaaagatgttttcaatctagaggccaatacaatgaatggaaaaaattagccacacctaggcacattataatcgacatcccaaatgccagaaataatcataaaagcttttggagggggaaaacttgtcccaaacaaactgatgaaaatctgaatgctatcaggtttttaaacatcaatactgaaagctagaagacagaataaagtcagtaaaatttggagggtaagttattttccgtttagaattttatatacagttgaactttcaatcaagtgtaaagacagaacaaagacatttaaaaatctgcaaggactgaaaattttgcttcctgcggatttttttctaggaaacaaccagaataagtacttcatcaaaatgaggaaataaataaaaaacagagaaacagaacccaggagccagaaaaccaacacaggaaaacagccatgagaagcccagtggtgtaggcccagctacttgggaattcccaaatgatctgatataaccgaccatttggaaaatcacacatgtgcggatgcatgcacactcaacgtatgcgcgcacacccacacagagttaaggcaggatatttggaaaaatttgaatatagatgcatagaatattaagcaaatgaaataaagagggaatgttaactgtaagggagttgtacaagggaaaataaaacaaaacttagctttttaatgaacagttcttacaatatgtaagggaagggaaaatgtggtggtgcaaaagagctaaaatgtaaacagttaaacaggaaattaatagttgaaggataaaatagagaaatcaagaaatgacaatattagtatatttggttaaaaaaagctaaaagctttgaaagtgtttgcctcaaagtagtgggttttaaaattttttttcagcaatttgatttaaaccatgtgattttgtttgttttgataaaaaagtaaaagttaaaagtttgactgtgaatagaaaactcaaaccagtatcatccaagaagcttttgccaccacagg

SEQ ID NO: 105300 - DNA, 1055 bp, Homo sapiens
tgccaagtccatgtgcagttgcttctggctggtaccaggtcaccaggccagcctttactgccgctgccaccaggttactgacttattcaagcagttcatgcagtggctattacagtgtaagcagaaaataaccaagatggcactcccctcctcacaggatccctgctgcacactcttgtggcttcaggacttctccttcaacctgtccaaggctggaaggcaggatagtaaatcgtaacatgaagaattctataggataaagttggctctgtgggctggctgcctgtcagactgccagcagaacagagcagcctttcactgaaactttgaacttaattatgtgacatttgcacctgaagcagagaagcaagccagattgctgagaagagccaagctggttagggttcttttcttggctatttagcaccagttccctttgaggaagggtctgcacttggccccttcttaggcatccaggagaaggaggagtggggcactctatcaggcattgaggaaaggacccgcccagtggatggaagaccctagggtactgatctcacctgagatgagaaagaacttcacagtgtgaagagctgtacaagggagaactggctcaccaggaggtggtgacccattggatgataaatgggggcacctgtcaagggcaagaggtccccttcctactccctggctagagaactagcccaccccgggctcccaaagatcagtatctgtgagtgccagactgagactagaccctgggaatggcatagctcaccagagccttggtgttcagcctgtggctctctgctcagccccctttttatagagaaaacgtatgagtggccaggagtccctttcttcccacatggccaggatatatctccctgttgcatcagacagacctgatccaaatctctgctacttccttctctgatctgggaaagtcattttgctgcccatccttgcctcttaaatgcaatattacagcagcctcctaactggatttcctgcctctaggtctcctcatcatcaccctgtccatctttccaagt

SEQ ID NO: 105301 - DNA, 1137 bp, Homo sapiens
agtgaccctgtactgatgcctgttgctttataggtgaaaaggacagaatattttattgaatgggcagtacacatattcgtctgttcattcatttgttcagcagacacttaactgagcactgacgtcctacacctgggtaagggtgggagcacagtacggacagagacaaacacaagagggacaaagcaaggactcagtcccctccctcagtagctcacagtccagtggtagagaggatacatgttcacacgtacatgtttatagtagaatttagcagggtatgaataatcttgctaatgtaaagtgagctttcttcctggtttatatacaaatgaaaactaagaaagcatttgtatgtgctgtttaatatttatggcacatctttttccctaaagtgttaggcactttcgttgtaattatttagaaaattgtctgctgataaattgtcctaaattatatcccaatatagatgaataaatttagaccttattaggtcgatgtaatctagttggaaatgtagccttacagcaaatgccagaccataatgtgctgatatagttttactattaaacgtttccatttagtacacagtatcactcagtcatcaaatttttatttagaactttcagagggatataaaggaagcatcaggcagctgctgccctcagccacaaactatcagcaatgaaacattcattctttaattccttcaaccttaatttgagtatccaggcactgcggatatgagcatacatgtgttgaataatatataaataaataaagtgtaaaatttattgtgattgtgtttgacagcagatatcggagaaaattgctggatgagccaaggaccccaagggcgtagcaggatttagggaggagaagtatgggttaaagttttcgcaaagaatttccaagtttcgtagaactattaatagttcataaaagataagaacaagtaggggataaaggaagatctgaggggattctaagtgaggggagatggggagcagaggcaaggaggaaataggaaacatacagaaggctgccccaggaggggcatatgctaaataaacccagttacgtgcatgcttgctcactgaataagataacacacctcaggacctgggcctaaggtac

SEQ ID NO: 105302 - DNA, 1156 bp, Homo sapiens
gcttttccaacaatggtgtacaagagggcaccctaagaaattatctttgtgaggaacatgtaaaatgtcctgaggtccatattgatcttccttcctccacaacgagaaaataacaaaagtaaatatttggggccacgtttattttggtaagataagttccagtctggtttctaaaattagggattctgtggaatgcacgtggtttggggcatcctgccggagaactttgtctcagggatatgtagtttcttatgtgttgttgcttgcttggaaatgtgcatctaaaccttccctcacgtctgctcatctgtgcagacccagtgccgatggtaggaaagctctacccagctaattttggtaggctctcgctgtcctgccctcaccagcatgacctctccttagatgctgctctgagcctgctgtctgtccttcatacaccaccagacaggtcttccaagagcacagctctcatcctgtccctgtttctcctcaaagcattcactgaccaccccctccctcaactgctttcaggctagaggcccttccccactctggtctcacctagtgatacatcctctgccaccagccaaactgtcctccttattgcctcctgtaactttccatttctccctcataaacatccttccctgtcccctctgtccatccttccttgctcagttgtagttgcccccatcctctctccccacaacagaagtctgccctgcccagggaagccttgtttgacccctctgaatatttgcctgcaccatccatcactgtctctttccctcaatgtctagtgcaaaggaggtactcaggagacatttctgtgtagccctcccttttggcatcaggtttcccccttctagaagctgttcttttcctgtaaaaggcataccctccaagcattggttcctgggcttgtctttctcctctacccggactcattgagctttctgtagaatgtagcagtggcagcagctacccttctcctcccgctggggcttgttggaggctgtggggcctgcattcacagggccttgccttcacctatcatcttgggtagaataggaacaagcagggctgtcttcctgggcttgcaacgtatgccctgcagaggcctcaaacttgttttaatactctgctgttaccatcc

SEQ ID NO: 105303 - DNA, 1029 bp, Homo sapiens
aaataagttgctggtaacaatgttaattgatgacacctttctggaggaaaatttggcaatatcatcttaaagccttaaaaatatccctatttgttgatgcaggcagttcccctttatggacataattatgaatgtgcaaagatttaaccatgaggtaccatccagcatagattataataccgaaaaattataagcaacccgatgttcaacaacaggcagttggttaaaaaaactatagaataaatatgcaatcaaatagcatacagcccttcaaaatgatatgtcgtaaatattgctgatataaagaaatggatagagtgtctctcttgttctctcacacacatacacatacaagcatttataagactagaaggatggatgccgaaatatgaagaggttatctcctattgctcacactggtggaattatagctaggattttctccttccctctgtacttccctcagttttcataaaatcagcttaaattacttttatgatttaaaaaattattttaaaaccacatgtggatgtatagaagggaattctgggaagatgacagcctgagcagatggctctattaaaattccctcccaggataaacccaggtgggcctgctggtggagcctggaaagtgcattaaggcccccagttttcctgacaccttcagggtagagagcaggcacaggatttattctctctggtactcagtaagaagcagggaaccgccaacagaggaaaatgcttacgtgtccctgagtccttggacaaacactcgaatgtatagtcccatgaggtcaactagccagaaggagctggcggatcgccttggaaagagctcgcactgcccacacaatgtgtgtggtccttggaggggctgccctggtgagctggattgcttccagtgcttgtgccttggaggagccagtagtataggggctttcttagtctctgaggtttgttaacttgggctctgctgggccatgaaaacagcactccttgctgggccttgcagtactccctcatttgc

SEQ ID NO: 105304 - DNA, 1050 bp, Homo sapiens
attctcatttcagtaataactttattacggaatcaaaaggaagcatactgtaataaatacaatgtttttctttttttcactccaatgaatttattttatactgagattataaggaaactatagtcgtaaatattagatgcggttgcaagttcaaatagttctttgatttgaatttcagaagtttccgtatcccccactggcctagcttgatggtctaattaacttccttgtgtaattgctttcggctactctcctagcaggcaacaggaaaatgccacaagtcacccacttatggtggactctcgggaaaaagtgtccattttcaatgccagctgctccagactgatcttatcattcctgcatcgttttctccagagaatctttagcaaatacccaccccaaaagaaaaagggggaagggtgtgagttttcggatccgcaggctgctatgaataaagatgccgtagtcagttggcatgcgtcttcgttgcttctgattttttttccttatctgcataaagctcttccggaaataacttcatttatgaacaaattgggaatgttgtaggaaaactagctttagaggttgaagctggggggcttttgtcagattttccacagggatgatctaaccatcttccttgtcaagtccaaggtcttaaagggagcgtatctggcctgatatcccaggaaggagactttcctggtacttgagccacaacgggatgtcttttcttagcaatgtcagtagtctttggttcttgagtgcaaggtgtcagaactggagaaagcttgggaatcagctggtccagctgcctcattgtctagatggagaaactgaggctccgccagggaaggggttggttaaaggtcatacgatgggaagaattaaaatgaaaattccagtctcctgcctcctggcccagggctcttttcctgatacgcaagtcccttccctcccatgtccttgctttcttgcttattctccaggacatcctgccaggaaacagtcccggggagaggcagcttttttcctagtgtttccacactt

SEQ ID NO: 105305 - DNA, 1159 bp, Homo sapiens
cagttacatggtagaactgcccatgccacaaatatttatttggaaaagtagtcattaaatgaacccactgccttaaatgtcttgaatgttgcagtcaagtgtctgtcatgtgttgatatccacacagaattaggccctaatgagagccttagaccctcaaccatgcccccttcgttggcatcacagggccttatttggaagagcgggcaaagaggatggaaatcataaaatatttcatgggaatcgaacctagggatagtgctccacttctgacgatggagtgaagacacttggcagacttgagccagacacttcacctagtagttcctgaaactgtgagcaccactgcactaagccagtgcggagctgttagggacgggcccagctcctgcaccacggacacagaatgtctggagagggccagcaggccctctgagggttctggaatctgtgcaccttatttgaccacactccaaaattctgtttttattttaacccttgaatctgctttatgtacataatcaaaatatctatatctatatctatatctatatctatatatttttaatcatctacatgtaaatgaagcaatagaattctaacataaggccaagaaatgagacgaatgtttggggtttatgttttttaaggtaaatacgggtattgtttttaattattaccatgtattaaattgtgggctttgaaacctaatgaaacctgttagccacttctctgtgccatatacttcccatgttaccaaaatacccccaactctttagccaaaagagaaccctgacctcctgagtttccatgctcctttctgtaccaggtttaaatgtagtcttctggagaagtatttttgacattgagctctgggacaggacaccttgggtttgtggactgcagcccactatgatgttattacttctctggccaggcctccagtggaagtgcacaggcactcccaatgttgttaatgctctgtcttccatttgttctggaatcctacgtgttggtctgtggttccatgcattagctgtttgtaaataatgcatttgcatactgaaaaaggaatgccacctgccacagttgatggtgaggaagctcctttgacgtggtgcaattttgatgagatgtctctggggacacgaggatgccc

SEQ ID NO: 105306 - DNA, 2270 bp, Homo sapiens
ctgtcagggtcagtgtgggaaaggacacccaggcattgtctcctgccatgcagaggtgaggtaagggaggcgtcatcatccccaatatacaggtgggaaaggcccgaagcttagaacaatgtcactgccaacacagggcctacctgggatttgaccagagtccgcctggctccaggctctgccacccacaggaagaagaaactacactgacagatgtgagacagtgtttccccttcagtctttgaacaggctttgtgttttctaaatgacactggataaaagggaattcattcaagagctccaaggcttccctttccgcccggcttctgttgccctggcctgagcagcgagcagctgggaggggactgaactgcccctaaccagggttgtggctggtggggttgggactagggctgggcatgtggctgggattgggcccatctcccaagtgtggtgggtttcaggggtccgtggggaaagggtcacctgcagatccttgtacaaagcccagcacaaggcccagaatgggcctggagctgagggtgggcccctggcctgcgtggatgaggaaggcctcagaggctggggagagctttccggttgggtacaggatgggtgggctggttcaggaagagcagccacctgtgcccattggtcccttattccccaggtgtggtgcatccaggacttacacaggcagcccgtggaccccaagcgtcatggacagctgtgtgcaggcaactgctaccttgtgctctacacataccagaggctgggccgtgtccagtacatcctgtacctatggcaggtgtgccagcctgagggaggcagcactcaccttaaagcccaagggctgggctctgggagtgaaatgtgagagctgggccaggccctcactcactgcccccacctgcagggccaccaggccactgcggatgagattgaggccctgaacagcaacgctgaggaactagatgtcatgtatggtggcgtcctagtacaggagcatgtgaccatgggcagcgagcccccccacttcctcgccatcttccagggccagctggtgatcttccaggtaggtctcaccttgccactctggccacagcctgcccagttctgcatgggccatggcccccgcacacacttctaagcaccttctctttgggcctggggcctgcttatcatcccctagtttcccagagcttgtccaaggcccaggagctccaaggttggccccctgcctgagtttccctccccagtcccagagccagatgaggaatttgagttgaaagggagccaggggcttgcctggggctgcacactagcaaacctggtccccactttccacctccaaggcctgagcacccatgccccaaccactcagagatggggggaaaggtccatttaaaaagggtctgtccctgtcccagactgatgggattcctgcactccacacttagagggtcctgtactcctcatgtgaaatcaccagtgagggccttgatggcttcaagcaagggtccctgagctctgaggcaatatgtcccacactgggacaggaaggcgcccctgggagcccttgcccagcctgaggccttgctctcctataggagagagctgggcaccatggaaaggggcagtcagcatccaccacaaggcttttccaagtgcaaggcactgacagccacaacaccaggaccatggaggtgccagcccgtgcctcatccctcaactccagtgacatcttcttgctggtcacagccagcgtctgctacctctggtttgggaaggtacccacagcactgaccacttgattcatgcccagatgtagtggtgccaggctgggggtgggtcctctccacagggcatgcagactttgagtccagcctcagataggccgatggggggaatggggaggggaagaagccacagggtcccctctagaacttggggaaagttacaaagtgacaggtggacctgagagtccgcaggtcagagccaggcccaggccgcctcccctccttactgcctggagcacagggcatgtcccttcccaggtctcttgggaaaaggggaggcctatgccagtttgctggagttttctctaatattcagcataaactatgactgaccctctaagcctgggggcctcctatcccatgctctggaccctgcgagggtcccagaccctgcgatccagatcaactggggacacaggcctgtagggtgaggaagatgccttgttcactggtgtcctgctgtcagcttag

SEQ ID NO: 105307 - DNA, 1166 bp, Homo sapiens
cgtcacagctgggtggggcgagagctttctccatgagcagagagggaccctgtacccagagcagagcggagtgctcggggagaaaccacggggctcagaggagggcccagggctcccactcctgagaagtggcttcccaggccctggggtggggcacttgtgccatgggctggggtgcccctctgggtggctcacagccttgctgtccgtgctggccaggctccctgaggaggtccccagcttccagccacgactgtttgagtgctccagccacatgggctgcctggtcctcgcagaagtggggttcttcagccaggaggacctggacaagtatgacatcatgttactggacacctggcaggaggtaaggtggccatccctgcctggtggggctgtgaacgggggtgtgtttctgtttgtgtaactgggtgtgtgtgtatctagccatctgcctctgtacacagggctgtgggtgagtctgaccctgtcactgagcaattgcattgcggtgcatatgagaccatggatgagtgtgcatcaccaggtggcagcagtgagactccgggagattaggagtgtgttggaactcaggggtaactgagaccatgtttgcagttgtgtgtggccctgtgtgccttatgatactatgtgtggctccagcgacagtgcctgcggccgagcatgtgtcggtgctgcatgagtgactgtgattggaatgcccaatcgcatcattcatgtgtgtggcttggtgtgagtgtttgccttcgtgcacctgtgtgtgacactttgtcagtgactgtgaggtcacgtgatgctagaactggccagaccagtggcaactggtgaaaatgtgtctgtgagcaagactatgactggctgtgggcgaatgatggatgggtgtgtttgtgggtctgtgtttctgcgcacagtggtataactggccgggtgtgcgtggctgtgtaaacaagtgctgttgtgtttgcatgcagctctgtgtctgacaacagtggatgacagtgtgtggctatggtttgctgtctggctgtgtggcgatggatgactgtgtgtctgtgtaagctgcaataatgtgtgttctctgcatctctgtggggccgtgtctacagcactgtttgaattggtgatgaagctgtgtgctcccatctact

SEQ ID NO: 105308 - DNA, 1059 bp, Homo sapiens
gcccaaccaggaaccaatcatctaccacggctatactttcacttccaagatcctcttctgcgatgtgctcagggccatccgggactatgccttcaaggtgggagtgcccctggcaggtgaggagtgggatgctaggggtggcccaccactcctaatgtgcccttgggcctccaggcgtccccctaccctgtcatcctatccctggagaaccactgcacactggagcagcagcgcgtgatggcgcggcacctgcatgccatcctgggccccatgctgttgaaccgaccactggatggggtcaccaacagcctgccctcccctgaggtgtgtggtggggatgggggatccctgggggagggtggggagcctagccggggcgctaggtgtgtcttgaccagttgcccctccccacctagcaactgaaggggaagatcctgctgaaggggaagaagctcggggggctcctgccccctggaggggagggtggccctgaggccactgtggtgtcagacgaagacgaggctgctgagatggaggatgaggcagtgaggagccgtgtgcagcacaagcccaaggtttgagggggagctgtggggtggggcagcccgggccttccccatcccctcacccgtgggaggtctgccttgtctcagttctctgtggctgccactcagaccctctgccccgctctctctgtctgtctccctctgtctctctgcgcctgggtttctggctttctcagtgcctaccctaccccaaccactgaatctaacccgggcctccccgtgttccccaggaggacaagctcaggctagcacaggagctctctgacatggtcatttactgcaagagtgtccactttgggggcttctccagtcctggcacccctggacaggccttctacgagatggcgtccttctctgagaaccgtgcccttcgactgctccaagaatcaggtgaggcctggctccccaccactcccctgctctgttacagagagaattggcagggcagggcttgggcctcaccaggaggcctccactgctgaccgaaccacac

SEQ ID NO: 105309 - DNA, 1028 bp, Homo sapiens
gacagggtgtcatctccccgttctctgtacctccagactggagccccctccagggcagggacccatcttctctgctctatcacatctcaaagctgggccaagaatgagtaaaaaaaaaagaagcaggagtagcatctgcttttcagccatctctcttgtttcttgaagaaggggtcctcaaagccccctgaaggaggtgccaagagggaaacaggaccagagaagggtagggatgccagagccctgtctctcatctgccggctttcataggaccagaaagtgtggagcagggccccggggctggctgaggcagccccttccctccggttcccttctttctggctgcagtctccccaggggtctcccagcccagtgcggccctgcgactgcaggtagcaggccctggtcaggctctcaccagtctcgctgggctcgtagcgctcaatgagggagagggccagcgcaggccctgccgcctcctcccgctgctggtgctgcaggaacgtcactaactgatccaccgacagagtctcccctgagcccgcggcctcggcgaaggtgcggtcgatctccacccgctgggtcagcatcttgtagaaggcctcaatctcctcgtcctccagggagtctgtctgggagtggtcacactcctgcagagccaggacagccgagtgggctcagagcaggccttgggccggggtcaagggccccatggacaggcagccccagcccccacttcctgcctcaccctgaagatcttccgggcatagctgtcgtccacctggatgttgagctccttcaggaagttctgcagctccttgaagctcatcttgttgtccttgtttttgtcagcttttcgcaagcaggagtgaatccagctgggcaagaagtaaggaaagaacccaggaaccctggaacctaccaaggtcccagccagagccatggatggctccagctgaagccacctatagccacagctccctgcaggcctgacttactacacatccatgtttcagtggcctcttcag

SEQ ID NO: 105310 - DNA, 1046 bp, Homo sapiens
tccccatttcacctcaacccccagccctagacagccactaatctactttctgcctctatacactttcctgttctgggcatgttacagaaacggaatcatggagtcttttgtgactggcttctttcatttagcgtgatgtttgcaatattcatccatgttgtagcctgtgtcagtacttcattccttccaattgtctagtaatatgctactgtatggatagaccacatgtatctcttcaccagatgatggacatttagattgtttccactttggggcttttatgaagaatgctgatattaacattcgtgtataagttttggtgtgtatatatgttttcatttctcttggagtagaatcgctgggtcatatggtaactatgtttaaccttttgagaaactgccaaactgttttccaaacaggctgcatcaatttacattcccaccagcagtatacgagggtttcagttttccatgtccttgacactacatttgtcttgattatagacaccctgtgggtatgaagtggtatctcattgtgattttgatttgcatttccctaatgattagtgatattgagcatttttccatgtacgtttatatatcttctttggagaaatatctattcaggtcctttgcccattttttggatcatttgtctttattattgagttgtaagagctctttatatattatagatacaagtcttttatgagatttatgcttgcaaataatttctccattctgtgggttgtcttttctctttcttgatgggtttttttaggctagaaaagtgaaacagtgagagtggagaaggaacaaagaaatctggaactgcttgtgatcaattagttgtaaacacccctgcactcagatcagcctcttgatattctttgaagcacaaaagtttttggttttgatgaagtgtaattcatatactttatttcttttgttgtttattttttttggcatcatattcacgaaagctttgcctaatccaaaattctgggattacagcagtgagccactgcgctgggcctgagttctcaa

SEQ ID NO: 105311 - DNA, 1009 bp, Homo sapiens
gatgatgaggatctacaggcgctgctgaagggcagccagctcctgaaggtgaagtccagctcatggaggagagagcgcttctacaagttgcaggaggactgcaagaccatctggcaggagtcccgcaaggtcatgcggaccccggagtcccagctgtgtgagtgccctggggtcacaggggaggggatagagtgtggaatctgctcagggctgggtaaatacaaaggtcagtcatggatcaaaaccacagatggggaaactgaggcctggcctggtggggcataggtcatttatataacctgggctggcagtggggaaactgaggctggctggggttggggagcagggccagttaaattgccatcgggaaattgaagcctagtctggactggagagggcagtcatggaacgaggaccgcagatggagatggcaaagcttttgagggatggggatacttaaccatgaccacagatggggacagccaggctcagaagcagggagggagttggacggtggcccaaggtccaggcagataaggtacttccggggttgagtggccaggtgggagctagggctgcaggaggcagctcctccctgggactggagccacaggaggggtgttagggcagagcaggactgggacacacagacagaggccactgctggggagcccttgtgggtctgagggcattctggaagcttctaaaaagaccaaggaacccaagtctcaggccacaaatggagagagcctcctgcaaggcctcagggagaagaaagctctgctcacttcactcagttctctccctttaagggagagaattccctaaagatcctgtaaagtgagatgtctccctctatgcctttacttggtggggaaattttagaccgatgctgtacagttgaacaatgatggaaatgttctatatctgcactgtccagcatgggagccactagccacttgtggctattgattgagaccttgaaatgtggctagtgtgactgccgaac

SEQ ID NO: 105312 - DNA, 1010 bp, Homo sapiens
tgactcagagctggcacatgcaaccaggttctgccagacatgagggctgggccccgccctgctcatagagaaacccggcggctgctcagagccgtgggtgagccctcactccagtcctctcctctcttcccctggctatcggcccctcctggctctcacaggctgggaggtgctctgctggttcctgctaggggtaagcctgtgtggtatgagtgaacttgtgtggaggggctggagctcagaggaggcaaagaggctttgtaccaagtcacgaagttgctggattccattccctttgccttcactccctctgccctcaactcccagggccgtctgtgggcccagccctggccaggtgcctaaattaccctcctcaaaacccagctctcagttgcctgtgcaagatgccctgagatcccggtgactcagagggctatttggcaggcttagtttgggtacacagagggcccacacatgccccaaagactagttctttaatgggggagtttctggcatctcactctcctgaccatgcccagtcttctatgtctgtgtgaggatggatggggtgatggagcttctgggatcactggagacagggaagagagacctagtgttggcaccagtgcctgcctcaagccacttcacttggtctctccaccactactttctctggaggcctgaggagggggtattatcacccaagaatgccaacgttcaggatggtcaggctccaagcgtgcttcagggctggccctttccagtccctcccccatgaaatgcaaacctagcccagcttgggtaggtgaggtgaatggggtttattctgccccctccctgtctttagagcctctgctccaggatatggggtgaaggggctgtttaaatcttgactttgcagcttcctgctgttaagactttggaaaagtgacttcgcttctctgagctcctcaatcaggagctataatcatccttagaactggcagaagtaatggatggcaagtacaggg

SEQ ID NO: 105313 - DNA, 1142 bp, Homo sapiens
atatggctgttcactgaggctctggaaatggatgagacaacccagaaatgtgcagagtgaggctaggacctggcagagctcaagggagcacagcataaagggaagccctccgagaagaagaaagagggcctctgaagcaggaggggaagtaggagacagggcggcgctgtctaccctcagcctgcctctgcacaccctggaagcccactgtgcagatatgggtgtgcgcacactcagcctcattccagttgcctcagagaccagaggaagttgatggtttccagtgaggtcctgacattcccaagaccttcccctacctaaccaactctgaaaatccaggatccaattgtcactgagaataagtcagaagaggaaattttacgttagaacctggagtgtcttacaattatggcaaccccatgggctcacctgagctgggacacaaaccctgagcttgcacaggaggacggagtctgtgtgtgtgggaaggggaggtgctcacaggaatgcatcagcctccaccagcatctcagcagtggggactaagagggaaagggaagtctggggacatttatggagcacgtgcatgcatgtatgtgaacacaacgtctggtgtggccatgcccatgtgagccacttgtgcagaggtgctgaatgtggtgtctctggtgggagtgcacccccgagtgttcatgcagggtatggcagggtcaggcatgcagtttgcgtctgggtacaagcacctgagggtggcgtgcaggggtgctgtctgtacacatgtgagggtgtgccatcgaggcaagggctgcagactcccccactgaccagcatgttctcctgtgcttggagcaccagctgcttgtccgctgaggctgtctcctcctcacactcctgcttctggccagggccaggagctctgtggtcctggctcgccccatcttgagaaacggagaagggcctggagaccataagccggaagtagtgtgggatctctgtagtgttggtcagcttcaggtggtgggtggtcaccagctcactcagcacctgggcagccacagaggtaggaggcagggaatgcatcttgtctctctcttcaaccccatggctctagggtagggctgggagggctgggggaggggatt

SEQ ID NO: 105314 - DNA, 1033 bp, Homo sapiens
tagccctgcccccaggagtgtttattgtgcagtgctctgtcctggggtgggggtcgaaatagagacagggctcagtactcgtggctgggccttgctggccaagtgccctgcctgtgactcccagaggcccactggtcttcctagggctccctggctatttcctagcacttgccaagtgttcagctatctctggaggagtcctgctagggcccagttcaccttaccttctcctcctcttcctcctccccagggtggagtccatgtccctggctgacagagggaaccctggaaatattacttcgcgcttgatggagaaggagaaggccagagattgcctgattcctatggggtgagtgctcccatagctctgtgtgcttgtgccctctctgcctggggcagggagccaaggaacttttatcatctctgtggctggtggtgccaagccttggcctccttcctttgggcatggtctgctccgcagggactttggggatgagacttgatgttgcccttgacttccatttcctgaaggccccaggtcctctctgtgcccccgagtttccaaacatcgcccaccttgtcactcccacactgaggtgctcagtcataggaaggacaatggtagctccactccaaagccttgggggcctagaaagttgagaaggcagtgggaagcttgtgacgacagaacatgctggtgaggggaattgggccctgtcaggtgcaacaagaaaagtatgtggcatttggccgggtgcgatggctcatgcctgtaatcccagcactttgggaggccgagatgggtggatcacaaggtcaggagatcgagaccatcctggctaacacagtgaaaccctgtctctactgaaaatacaaaaaattagccgggcgcggtggtgagcgcctgtagtcccagctacttgggaggctgaggcaggaaaatggcatgaacccaggaggcagaggttgcagtgagctgagatcgtgccactgcactccagcctgggtgacagagggagactctgtctcaaaa

SEQ ID NO: 105315 - DNA, 1051 bp, Homo sapiens
tgaccgcggagttaacagacagccgtccgcacacgcgcagaaccacatctcagcctccaaggcctcaactccgcccacagctctgcgaacagacgcgagcgaccctccaaaagtcccgtccacctccagcctcagccaaccacaaggagagtcggcctgggaacccgcccctccccgccaccgcctaccaagccctctataggagggcccacaggcaccgcccagccgagctttccactcaatgccccgcctaccttggcctaccgcagccaaccagaaggtgtatctttacgaatccccgcccagaaatgcagaccggaagtctttccaccttttgtagccaaacccgagacctgacccccaaatccctgtctcctgcccgcagccaaacggaaggctgggcagccaggaccgcttactgcttgggggctggagatggaagccgaggctctaattcctctacccacttcctaggaggctctgctatccctccggtcccagtacccgagctgggggacctaaatacttccgagacgcccgagtcctgctccgacgtggttgggctttcccattctttcgagaagacagggaatttgggcttccgggctggccgggagaacagattttacagacatgcggggtgtgacaagctctctaactggagaatgaacatttcacacttttaccagttttacacccaattggaatgattttattagtgcccatttcccgtgctaggctggggtctccaccaaggcagagaggtaccatgtatccggggagcctgcgacacccttgacacttagtagatgatcaataagtacttgtcgaatgagtaaatgaatgaaccagggctccccaggtcaggactgtgtccctaaacctaaagggcaaggccacgtgcccccttgactcccaatagcagggccatgtcttcacctgagaccctggagagtagtgctgggctttccacagacaccaaaggacagggtgccttgtgctccccaacctagtgtcatgacgtccccaaccatttcgagggcagggccac

SEQ ID NO: 105316 - DNA, 1042 bp, Homo sapiens
aattatttcacaaaaatggaatgaagtaatattttgcaaagaaaaaaaaatccctacacaaactataaaaaaaccctgtttattagttaatatcttttatagctataaaaccagatttcccaagatggttcttcaagggcaccttgaagcaaaaatatatgtcccaaaggaggcctcctggagtgttgtgccagggtgtgttaaatagtgtgcttctagtttgaaagattactagtgtaatgagtgaaggaaattgagtcagaatggactgagggagacaaagtggttttattggtttaacccttcttgaagaaatcagagccatggagatcccagaaaggtgtgacacagtcttgagatttcaaaatctggatttgctaactcacaacatttgttttaggcttgcatataatgaattattatgttttctcttctttgtagaaagaaattcaagccatgagtcaatgccatcatcctaatattgtatcttactacacatcttttgtggtaaaagatgagctgtggcttgtcatgaagctgctaagtggaggtgagtagagtacaaggaaatgctataagtaccatggtttgaaaagttagtaaaagtttccttcttttctatcctgatttcgttttcatggacatttgcatttgaggagatactgaaaatatagtatttgctgaagatgctaatctatgagccaagacagttttcacacattgcatttgattcattttgttgtcatgctgcttaaatctctcttaattctttttagagactgtctggctctgtcacccaggctggagtgcagtggtgcaatcatagctcactgcagcctcaaaactcctgggttcaagtgatcctcccatctcagcctcccaagtagctgagactacaggcatgtaccaccatgctcagttacttttatcatttaatttaatataattttttttttttggagatggggtctcactatgttgcccaggttcatgtcttaactcctgtcttcaagcgatccttcctacttggcctcccaaagtg

SEQ ID NO: 105317 - DNA, 1731 bp, Homo sapiens
tatttccagtttattagcactaaactgcaaatgtaagctttttagaaatcaaagtaattaagaaaacttctgagaggaaaaaaaaggtacctgtagtacttaaagggagtaagtgtagaaatgtagaaatctaatgtaaattcactgtcttagatggttgtttaaggatgccctcaactttgtctttttctaagagataaaatgcatggggacttccttgatctaaaggaggatccaggtaaaatgtctgatactaatagtgaccagctttggatgttcaagcaacaatgcagggttttaaaatttctgtaacatcttttggtctaaaatggaatactcagaccaagcaaattttggcctctttgaaaccttctgaggcttaggaagacataagcaataactgtagtagctaaagatttattaaaacttcctagtagagataccagtaactaagttgaatgaattgattttatatttaaagagtatcttttcatactagtaaggtgaggaaattaacttgttgatggggtcattactttgattgagttataattttcagacttatcaagtgtctgaagccagcagctgcttcactactttgtcaatattattttgatattctgtaatgattttattgtacaattaaagttttgcattgctttttaaatgttccatgccacaggctatgaagcctgacaggggattattttttgggaatagatgatctacatttaaactttttgctttgttacaaaatttgtaccaaataccctgtttcccattatttgatttatttacttttattctgaaaaatgtttggattttaacggacagctttcatcaaaataagttgttaaatgccttttaaaatccagcttcttgggccctacctcagttctcttgaatgactgtcttatagggcctgggaatatgcatttttactagcttgccaagtaattccttcacacattaaagtttgagaacagattatccctatatactatttcttacaagttgtgcgtgaggacaaaatactacatacgcggttataactttccctcattattcctactttaggtattaattgggttattcagtgataatctacttcttccttttgcttagcatattttctcttcacctttctcttagctgacctgcattctttataattttgatatttgaggatggaggattataaacaccgtcatcgagttagaggctacaagaggcttagaaaaccaaatggataagaagcgggggagcttacaggaccagtatctctcagttaaggatgaaggtcttagtgacgattagtgtcttagtgacgattcctccacccataagaattatcttgttgggaggagtttgaaactgaagataaattgttatgccaaagaagaagggtttcttctataaactttgttcaaaatgtctgttctggacatagactagagatgtgcattgctttaatcttcccattgatcattggatgatgtgaaatcaatacaaatctaaaagtttgaaaaggagttcctgcttcaaactctttgcagacttagtcactttttatgtgccccaagatatttgatgctgcatttgtttcatctaccagactagaagttcccttaaagttagcaatcatgtcatgtatatcttgccatatttggtggcacccagtcttagatctcacatgtaatgtaatagggcttaattgttaagtgaataagt

SEQ ID NO: 105318 - DNA, 1048 bp, Homo sapiens
tgtatttgtctttgccttagctcttttatttctataatttattaacctgaaaaataattttagtcctaagttagtttgtgtatgtatgtgatccttaccctccaagtatttcgctcctgatttgattggcatttcaattgtatttttatatctttagtcatacagcagtgcatattctaatctgatcttaaaagcctatattggtttgtggtatcttataatagtactgacgagcctggtttacctagggattatttaggggcagttaaatatcctctactacctcactagacatccaaaggagatgctggcataacatactatttgaatatcagccagctactttttgttttagattggaattgaaaataagttattaattttaaacttctgtatttcctcatatttgctgtttttttcatttctgcacagttaagtttatgagaaggttcacatgtgttttgattctaaaatggatctgaattatattgaatgatttagagatttttagaaaattatgtcttctgttttcaggttctgttctggatattattaagcacattgtggcaaaaggggaacacaaaagtggagtcctagatgaatctaccattgctacgatactccgagaagtactggaagggctggaatatctgcataaaaatggacagatccacaggtatgtaaaagacaatactcttgtgttacatcatctcattaaggccattcccactcttttacagaatcgtgatctctgactgttatcatagctctttgtatcactagttttagtacactgtggttagagtcttaattatacagctagtaaacattaaacaagtactgtagtaaaaccagacaatataaaaacaggaaaaattcataatttcgtaccaagaggcaactacttgataacattttggaatatcgctttccattttcttttatatggttaaaaaatatctaaaacaatactgtatatgtaattttgtctgttgctttttaaattttacattatattttcagtatttccctaaattattaaaagctt

SEQ ID NO: 105319 - DNA, 1225 bp, Homo sapiens
ggcttttttagttgtgtttaggtttttaaaacaagaatatttttctatattacgtgttataaatagttaaaactatagagatgcctgagtaatttccatctttttgttacaggcaaagaatgttccctgttttcagttgcatactgatgattttaaaaatttgataattcattggggtatagaaaaaaatatatttcaaaatgtagaattaggtgagggtcacattctttggccacttttatcccgatcaagaatatttgatcacttgtgttttctagatattatagtaagaacctttctagctttctttttaatgtgtgggtttctagtaccagtgacaacaattttactattagtcttaatatcctttaatataaaataggacatttaaatattgctagtattacatgaatatagtaaacaattgcttaaattatgttactccaaagaatagatgttttttgatacataactttttttttttttttaaagagatgtgaaagctggaaacattcttcttggagaagatggctcagtacagattgcaggtaatgattagtatttctttttatttgatttaatggtcagtagaaccacattacttatcttttatgtttccttaatcagcattctctcctgttccctggaccatctctattcaagcatcctctgttggcatgtcataggatgccaccgactctcaagatatcttctcatactcatccttcatttctgctcttagacatttttttctgaccattacttgtttccttccagctatccactccttacttccattagggtcttctgctatgggttctcatagcattctgtactttcctttaaaggaaaagtagttgaggatcttcattgtgtttaagaataagtacgttatatagaggctatacagagcttcttctgtcctgggggaaatggagtatttgtcaattaggaaaaagtgcctgagaagtagaagtgcacttttggcagtttcagagctgaagggataagagttgcagtccagggcctaccaaaagtggctatcctgatgaaacaccccctcctccaggctgagactccagaatgactgtacccagggattgtctagcaagcagatcatctgagaaaacctcagcttggtcccagactgctagaacagtcaggtgtttggcaggaggaagataatcacccaaatcttaaattatttcttcatctttaagaagat

SEQ ID NO: 105320 - DNA, 3095 bp, Homo sapiens
tttgcatggctagcgtaatgtccccaagtttcatccatgttgtagcatgttgaagaattttcttgctttttaaggctgaataatatccattgcgtgtgtgtgttgagaagctaaccatctacagcagattatttacgtgaaatacacgtaataactctgggttttaaacaactgattcagatatgaacttacagaaaataaaatgtttgtatgttggtcggggggtgcctgtattgaaaaatcttgaccacaatagttaaactttactgagtcatcacaagtttatagtatattgaaaattcttgcaggttttaatgctgacactgcagaacgatcctccttctttggaaactggtgttcaagataaagaaatgctgaaaaaatatggaaaatcatttagaaaaatgatttcattgtgccttcaaaaagatccagaaaaaaggtaaaatatgagaaaaagtctacttttctctctaataaaacattgtgagaagtctaagaatcacatactcatatgtacaggaaattattttcaaaagaactaaatataaactttaaaaaagtatacagagaccattatactggattggaaatgaattgatttctgccttctttgtagtatacagtgtaccctaaatagttcagctttttccttgttaatttcttacaaagttgtacattgtgaattctgtattaataaatgccaagttagtggagagatttgtttttaatttgcatttaaaatttataaatgaatgtcttaatgccatttacagtattaataaaggaaagacacatagaaaatttatatttagtgtaataatcatacttatttccatgttagaaagatattttagtaagtggaccaaaaattcaaatagcttccttatcaatgttagacagattgaatgacaagtgagcaaataaataagaacatccgatatgtgtaacttcatgaattaagcagaatcgtagaatgttggggatcattgagtacaaccttttatttttgaggtcacttgatacttagtcataggagtaggacttgaatctcaaagtcctgattcctaacttagggctctgttccttctgaatcttatctgtctgtttcacatatatattccactcagcttcttagcactgagttctttaatttttgtttctctaaagatcattaaaagggaaagactttgatgttcttgatcacatctctagtgtatgtaatagggtttcagaatttattgttggaaatattggaaagggtaagaaaaacaggtagcaaaatttatacctgtgtttttataatttttttttttctgtttctgagtaaacagttaaaaaagacaggaaacacttttcttttatcaaattagttggttaaaggaacaaaattatcctgttacaaatacctagaaatgccagataaaatctatccaacttaaagattctcagatgccagaaataatgaggaagccctaagttaaagaagaaatattgtgaactaatcccatggctgttttcagtgggtcactattcattctggtaacctactgatttggatttataactcccatgtgaaaactggaagtgagatcttgggtccacccagtggggagtttgaactgagattcttcttaaagctaagaacttcagatgtcagtatccttagtaaaaggatagacaagaataaaaattgtcatcaccaagagacaacaaaaacctctcctgaataatcaagcccttcaacctggacattccacaggtttagagtctatactccctatgttatccaggaacccacaggattagaaagttaaaaaagctttaccaaatcagtttttatttttgacggaagtagtcacagagctgcactggaagaacactttcaaactctagctcccattggattcctgaacataatgccccactgtaataaggtcacaatccaaaattaagaaacacacagtgaaacaatgcattatgaactagttagcagacacaagcagaaggattagtgctccagaagatttaggtaatgcagtgaaaatctgaaaagatacaaaattaagtatattgaaaataattaaaattagaagaaatcagacccacaagagaagactgtgactatgacagaagaaccaaatagcaatgccagaaatgaaaaatacagtgattaatgtttaaaactttccatgagtgtgagctggacttgttgactcacttctgatgagtagagtatgaaaaaggaaaaatagcaactttacaatgcacctcctctacccaatgaccaaggttaacatcactattaataatacattgataagactgatatgtgcctcttgatatggtgcaatgagaagggcatatatataacctgtgaggtattcttcctccaaatccgtaacttcggtctataatgagaaaacatcagacaaacccaaatcgaggaatatgcagcaagatacctgaccagcactcttcaaaactgtcaaggaagagagactaagaaactgtcacagattggaggaaattaagaagacgtgaagacggaaagcaagagtatcctatactagatcctgggacagaaaaaggacattagtggaaaaactggagaaatggaatgaagtctgtagtttagttaatagtattgtaccagtgttgatattttagttgatttctttattattatactgtggttatgtaaaaggttcacaatagcagaaggtggtgaatggcatgtaggaactctgtactagctttgcagctcttctgtaagtctaaaattattataaaactttaagaaaactggaagctatagaaaatctattccagtttgtaaaccaaaattaaactttgtttagaacattgctaagttaaaataacacgcacaatggactggttaaacagaacaaccaataaaacaaaaaagagattatttactcatcaagtaccaggcactgtggtaaacacttaacatatattgtttaattctcacagtaatcctttgaggatagcactgttattttctttattttacaaatgaagaaactgaatcacagagaggttaagtaaccttctccaaagtcacacagcta

SEQ ID NO: 105321 - DNA, 2244 bp, Homo sapiens
aacacaacagttgaggccagcgtttagtgaaatgctcagagaaaatgcagtcatgtgtcacttaaaatgatgaggatacattctgtaatatgtgtattaggcagttttgtcattgtttgaacatcgtggagtgtacttacacaaactttgatggtacagcctactgcatgcctaggctatttagtgtagcctgttgctctgactactgtcagatacacagtatattgttggccaaagcattaagaggctcatgactgtgactttaacccagagttctccagctagtcagactatcattcaagaatgagcatgaaattattttgcacacagaaattgagttttccagtcacgttctgtcacttaaagaacccataagttgtactttagaaagaaggaaatgaagtcagaagaaaggaatgaataataagaagcaatgttgagcaatcacattgttgagcatattgagaagcaattgttgagcatatgaaaaaataagagtgataatgtaggatttcagtttgcatagcactttcacatttattcagctttttaatctttataataatcatctgaggtgctggttcttaaacttgaatgcctattggaattacctggggagttttaaacattactaaagccaattaaagattctgctttaattggtttgaggtacagcctggtcattggttttgtttgttcgtttgtttgtttttgagacagtcttgctttgtcgcccaggctggagtacagtggcacaatcttggctcactgcaacctccgcctcatgggttcaagcaattctcctgcctcagcctcccaagtagctgggactacaggcgcacgccaccatgccctgctaatttttgtggtttttttagcagagactgggtgtcaccatattggccaggctggtcttgaactcctgatatcgtgatccacccactttggcctcccaaagttctgggattacaagcatgagccatggtgccctctggtcattgggatttttacattcttcccagatagttcaatgcacagcagtgtttaagaacttaggggcttggccaagtaatactgaaccttagagaggttgtgatttgctcaggatcaggtaggtgtgtggcaaaatcaggtccagtctcttaaatgttaaattctttattctgaatgatactcttttaaaagcttgtaaaattgacagtcgtgtctttacttaaaaggaaataagaccatgaagaaatgagttaaacactgagttttgttaaatttggggaatatacttttagaattttcatttttaaagggagattgtgaaatctgtttttagggatctgtggttacctaaattgaaggctggcaggctaccatgtggcaagaagtggaggtcttgatttggtccatttcctctttgtgtgtttaaatatatttttatgccttgctaaaaatgttagatagatattttctagcttacttattgggaaataatattaaatattaaattaatattattaaatagcaaatatattagactctattaagaaatcatgcttccagaaaaaacatttcactaatgattttttcaaagaatctacaataattatcagaatatttgttttgagttttttattttattcaatgtcctgtatcaagtttattttacttttgctttttagcagtttaaggaaagtagagtatactgagtttttattttgctgttgaaaaaaattttttctcatttttgatgatggaatctgacattacacttgaattaattataaaaacttttcttccctcccttcctggttttagaccaacagcagcagaactattaaggcacaaatttttccagaaagcaaaggtaggaaattccagcttttgattatgtgtgttcataggatgctcctcaattactcagattatgttcagtgcttagaagttggatgattatgtttggaaaaatgatggtagataaaataattgcagaaagcactatgtatacagtctttgataattaagataattgcttcagaatttagtaaatccgtttttaaatattaggttaaactgatcataggaacaatgattattaaattttgccattataaatataatttgtgaaaaataccgaactctggttttaaggtttactactgaatttgtaaacatctcatttcccaaatatatcagatagtaggatgttactgtagttggaaatgtaggaccatgatctcaaagaacatacag

SEQ ID NO: 105322 - DNA, 1014 bp, Homo sapiens
ccacttctctttctaatgagcaggttcggagagtaccaggttccagtgggcgtcttcataagacagaggatggaggctgggagtggagtgatgatgaatttgatgaagaaagtgaggaagggaaagcagcaatttcacaactcagggtaaattttattaaactgtgtactttagctagaactttttgtagttcttgttcagcttaaccagctaaaatataaagaatacaattgtaacaggattttcttgaacagcttattaataataggagcccagttaattctgcatggaaagttggacttagatatctgtttgaatatgataatatttagagtatataaaaatgacccaaatctaccaaatctagagacgaaagctgcaaatgtctgagatgcaaaatacactggataggattaatggccaattagacattgcagaagaaaagttagtgaacttgaaggcccagcaatggaagcttttcccctgaagtctgttatccttctactaaggaggaatggtgtatctcttattcagttggtatatcctagatatctgtcgtgcacacgtgtgtgtgtttcctaaaaacagtgaagacaagagtcttccttttggttcatttcatcactcttgcctaaaagcactgcctcaagttgtcaggactcattcattcctaagactggaagtgtttataaggaaatataaatgtttgagggtattatacctttgactgcttaggactgtttttgtgggatgaatagtgagtatactggtatattgcttcctgcttttaggatctgctttggtgaaagcacttaagactctcttgataaacactgaatatttgttgaccttgtttatctaatgaggtatttgagtctagtccttctgcagagctaagtttgtaaagtccttgccaatggaagttggcaaaaatcgattaagctctaagcttggaaacactgtttagaaggtaaatgcaaatattcgtttacatacaattgtgagtttaaggtt

SEQ ID NO: 105323 - DNA, 1108 bp, Homo sapiens
agaattactgctaacttttattatttaccaaataaacagcttaaattttcatatggcagattgtaattggtcatttcctaataaatgtggtttacaccagatatttgagacctcacctcaagtatcagtttatttccactacctttatttttgctagtggtccatgctttatttttggaccacccgtgtttctttagataccagattcccaaatatccaacaccaagaataagggtagtagactctttacatgcagctttcagatcatttttggctcaagagttttctccattaaagcttgtaaacagaattactctgctttgagaatgtgttggataattagcttaaaagtttaggtttggtctgggatcttatatacataatatgttcacgattagtagaaagaattttactttggagaatgtgacagtcccattatgtatgcttataaagctcacaattttaaaatacggaattttaaaattgataagtacattgatgtatttgttacaggctacctggacaaaaaatacaatactatcatgacagttattttttccagaaaactttcagtagacttgctggtgagttaatatatggatcagaattaaatggagttgatttgcatttaacatcacttgcagtttgggactgactacaagtaacctgagttgtgagttaacaatcatcctttttgtatttcgtttagtctccccgagtgaaagaatcaatatcaaattctgaggtaagtaattgtgattattgaatccttgttaaagtaaatgtgcttttgttttggtttcaattcgaagtgcttttgtttgtgcatatgtatgcttaaatgggaatgcaactttataccaatcgaattttaaaagttggcgtaagggctcagaatgttcttccttgcctctttgattttgtgaattttttatttttatttttggcttgggctgctggaagtgaaaagttatttatttatttatttatttatttatttatttatttatttattttgagacagggtcttactctgtcacccatgctggagtgcagtggtgtgatcacggctcactgcagccttgacctcctggggctcaagtgatcc

SEQ ID NO: 105324 - DNA, 1618 bp, Homo sapiens
attatttgttacttctaatttaacctatgttgactgatacttgatttctcagaaattgaatgagaggctattttacagattatctagtttttatttttagtcttctccttgttcctttgcctaaatatcatctccacatgaactcttgcatactcatattctcatgctcattactttgtttttaaatttgcgataaaattcacataatgtaaaatttaccatcctaatcattttcaagtatatagtccagtggtattaagtatattcacactgtagtacaaccatcactaccatccatcttcagaactattttatcttcccatactaaaactctggctattaaacagtaactgcattctccccagtcgctggcaaccaccattctattttctgtctatgaatttgcctactctaggtacctcatataagtggaattatacagtatttgtcattttgtgaccggcctatttcacttagcataatgttctcaggttcgtcagtgttgtagcatatgtcagaatgtccttactttttaagggtcagtaatattcctctgtgtgtgtgtgtgtgtgtgtgtgtgtgtgcgtgcgcatgtaccacattttattcatctgtcagtggacacttggtttgcttctaccttttagctgtggtcaattatgccattgtcaacataggtgtacaagtatctctttgagaccctgctttcaattctttggggtgtatacctagaagtggaattgctgggtgtatggtacttctatttgtaattttttgagggaccatcatactgttttccatagaggctgcaccattttacgtgctcatcaacgagggttccaatttctgtgcatcctctcattacttttaaaaatatatcctttccatctttactatagataaatgtaagtacatacaatttggaagctaatagtcttttgaaatagtattaataattaacattttcaaaagtagtcttaaaggcctacttttttgtaaaaatctagaaccaatgagtaatttatgacttcttatgtatgaagttaaatgaacacaaaattttattccttgtctccttgattttgcttatgtaatatcacctattcagcctgtactattactctttgaattttttctctttcaactttacattttggctattgcatcgttttttctcccccagtaactgcataattttgaatatgtttaacttgtttttatactcagtatcagtcatttcccccaaactacataattaaaatttatgaactatttcagacatacaaaataacatatataaaatatctttttttagttttaaagcatcacattcacttttaaaatgcatttcagatatgttaaggaattattggttgattgtctttgtaagaaatacaaagtcctcatgcatggaaaaatatagcttctgtaattttgtattacatacttaaatctgtattttggaggtgctgttttgctgggcaaaggaatggaatagattttgttaaagataaatataatgcaaactgaagacagacacaaaagactatatattatatgattccatttatatgaaatatccagaaaagcaaatttatagaaattaggatcagttgtt

SEQ ID NO: 105325 - DNA, 1602 bp, Homo sapiens
ggcacttacttcatttaactttgcatccctcaagctttccatttctgcttggcatatgggaaaagatacagttgtcttaggaaaattgatggaaaaattagattcattttataaacaacttaaatcgaatgcatgtcctcccataagcaagcgctgtacaattttcagagaggattagtttagccataaaaagactggaacctatgtatgggttggatggatttctgaagggcagctggttcagggtctaccttttgtactgccatatggtgcactggcagattttttaaaaatgagaaacctagctttgtgtttttcagtcttgtagaggggaacaggggtctcagaaatataaaatgtaaatgtggctatatgtgaaatttcatctgggcttgagagttttctttctcattgtgttggacttaaactgacattcagcttttgttgctgccttggagtgcatgtcctcctccagcagggaatgtcctggggattagtatgacctcagctggagatgaagaaaattgctgccaagtaaatgattcctctgccagtgaccattagtcacctccccacttaatgtttcaggcaatgactgtatacctttcaatgctttttaggctttgtcttcaggatcaggttcacaagaaaccaagatcccaatcagtctagtactaagattaaggtaagtagacattttttgttttgttttcttttgttttctgaatattctgcatgtgctgtaatagtctgtgcctgagagtaactggataggattgtatgtcctccagcatcaagctctgtttgcttggtggtgtattatttttccccagaaataatagcaacagtgtgaggacctgcatgttagcaggtgttgtgactaactgatgcacatgttctctcagttgtttctgtgctaattggtgatgagtttgtgtatttacagtgtagctagtttgggttaggaggtgtagcctgtaattgaggaacagtttttaggggagcagcactaactggcttatctgaagatcagtcttataattgtgacgaggtaaactctgagatcaactaacccaagaggggagcactttttgattgtggtagatcaaataaaggccttgtttttagaaggttaaaaggaaacttctaaatgtttttgtagtctgtttctgttttgcagcaagtaccctaaattggtggttcttggtgggaacatatagagaggtcctgacagattgctcagcaggaagtgccataggtagcagtctgttcattttaactccctgccccgccccccccgcccctagcactagtagctggattcaaattccagagctttcttgtcagaatcactatggctgttgtattgctctagttaggtctctttctactcataaatgcatttgaaaaaaaattagtattaaagtatcacttgaggcaactcaggccttttaaaactattactaacattttaaaaaagagttccactgaattaccattaactcattccccttgcacatataaattcctagtcatctttctgtaaggtcctaattggagatagaggcagcaagagctatttaagagaatgtggtaaggaga

SEQ ID NO: 105326 - DNA, 1818 bp, Homo sapiens
caattttcctcttagttttatatgttcttggtgtgggaataaggatgggagtgggcatataagaatctactcaaaggcatgaaatttttatattgatcagtaagggacatagattcaaagggttgtaggacaattagatggtcattccgaattggttttgctctgagctctgcagtgtgaacatatctgaatacatcatatgatctatgggaacaaaacagactttcttgaggcacagctttcttaatatatgttggcagaatctctttgcataaatttagaaattcttattttatgcattctgctttctttcataggaattccaaaaaagaactaaatgatattcgatttgaatttactcctgggagaggtgaggcatcaaatggattgaaaacaaaatagcttccaatttgtgattcaatgaaatgtgttgtgaagtttctgtcctttgtgaagttttgcttttaaaggataataaaaattttcctggttttggcgagtatatgagtgagataaaaatgcagttcgttgactactaaacacatttagaaaaccttgtataataatacaaacagtaataaatatatgatagctctttacagcttactataggccaggcattgtcttaagcgttatcttattaaattctcacagcagtctactaaggaaaaattattatccccatagtatcgatgatgaaatcaagacttaaaggcaaagtaacttgttcaaggtcacacagctggaaagaggtatagctggaattcaaaccagatctgtcagaatccaaagttcattctttatacatggttgttctccatgatggtaaagaaacaaggtctgcagtctcctctctcctcagacagaagctgaggtctgtcatgtactgtttctggctgttgaacttcaccttgaacaaggtgtgttttgtttcttgcctttattactcagtgttctaatttggggagtagccagcaagtatctgttctgtgtatcatgcttattcttcttgctgtctcactatcatgagcaactaaccactaaagagaaaagatgcaggtgtacagaggtgtcacctgttttactttttaaacaccaggcaacatcacattttcaggaattaattcaaattgctggttgcctgtgtgaatgtgtggacactgtctccaccgcagtcctcctgttccctctgaggggctcattttcaagcccttggcaaccaataccactgagttggttgaagatgaggttaattggggatattctgtcctcatctttttagtttctggttatacccattgctcagattgtaccacctggaataactagataagaagaaaagcccaccagaataaaaaagtaaatgattttagcaaaaaacttggagtatgattcccaaagagaagagacaaaaattttttgagacaaaaattgttgccttagtttttgagaataaatcattctggttttttagccctagagatgttcagtattcaacatcatgtctcagatatttgctacctggtttatacagattctgccctctagctagatctgtgagaattccacttgagataatctcagtggtaggaaaagtctttgtatggaaggaaggccctgcctgccttcttggttctgtggatttagcatccagcttgggcctagcatggcacactgacacccacatgagctgtgagagttaacagtggcaagcacgcacaaaaaacagagcactgtcttctttgtccttgcagatacagcagagggtgtctctcaggaactcatttctgctggcctggtcgacggaagggatttagt

SEQ ID NO: 105327 - DNA, 1015 bp, Homo sapiens
accacaaccctggaagaggcggcctaaggagattccacacatgcgtatctctgttgcttctattggcctaaacccactactgccaaagaacccagcaacaaacctcccggctaggagctttagaagtctttatgttcttcctgccatcattcctccttttcccacagggaaagaaaagttggatcactagtggccagcatccccagagttccgttagtaaacttacttcatatgtcccctgtcttcctccatctgagaagtggcccatgtgcttcaaggcccaggagggagatctgtcagctcattcttgccttactccaatgatggcccaggtggaaaagtagcagctgtatcgggcttcctcatcctgcctgttcccccacacctgccaggatatggacatcttgggatatctctttaccactgaagtagaattgattgttcagctggagcccagagaatttaatttaatgttttttctttgtacctgatgtgaattctagcaacctttgttaggaaaaagcacagcctcagatggaggcagcctaaactgtgttcttgttttgttcatggtgtttctaagcgttttgctgaagctgctctcaggcacccccttcttcattgctctctccagaaagggttgctagccttaacttcagctggtgcaaaacatctgactgtagccgaacttcagccatcagatccttcaaagtggaactttggattgtttttacagacaacatcgagtaatggcttgtaaatgtgaattttgccagaggtggtttttgaacaggaaaatcataattcatatcattggagaagtatttattttcaaatatcaaattgaagaaaaactcaatcctcccatgaaaatcagttcgcctggcctccaagtcgtgaggaaatgggtatgcaaggctgagatttctacagcaataaaggagacacacactgggccagagaggcctgccttctgcctgctctcctgcactgaccctttggagggggtctctgt

SEQ ID NO: 105328 - DNA, 2072 bp, Homo sapiens
ttttaccttattttctcttggaacatatctgaaaaccttccccacaaataacttgtcacaccttttgtttcattctgagtctttagttttagtcatgggctttcttcacctgctctaggtgcaaaggcatgttgggaaagagatggatgttggggaggaagagaggagatggatttcagttgggagttaggaggagagtaggtgagatgatcagacaccggagttcaacgtcccagcagtcttggtaaaaggagggagcctgctgagccaggagggagaaaagaagattgaccagcttgctagaaaaatacttagcttttctttttctttttttgtggaggggggacggagaggaacaaggatggggaggtaggaatgaggtatagaaaagagatagcatcttctttggcacaagactagtggcttaccgcttaccttagagttttgttttttttttttcaaacccatcaaaatctacttatttatgaatccaaggggtggcagcatcactctgttctagcattctttgtggagatggtctggtgcctagctgggagtgagcagcagcccatcccctgttcactttctctagcccatcattacctgtgaactgcagtggggcagtcatggcaaatagaattgggctggggtttctccttcttttcagttcattgtttgccctgctaggaattagaagacagacaccatgtcccaggacagtgttacttcttctgcatgatgtgtggtagactccctttgctggcttgtgcagtgatactgagaaaatacatgaacagaaactgcccaggtggaacagcacgtaacctagtgagtgactgtactcctttctaggaatgctgattcagagtgcacctctttgactaggtcccaggatccccttgtccctggagtagggactaactatagcacaaagtaatatgtgccaatgctatttgtgaaatgtttggtctttctaaacgactaaaggatttgttgggtttttgcttaagttttgaaccaaatcctagagccagctgataatatttaataatctggaggagagaataatgatgtaccaataagtggagattcctccttatgatgtatgctaggttatggaagatgtaaaatattcaactttttcctcctttttttggactttgtattttactgcatgttttcttcatttttaatcaataaagagtaaattgtccttagtggtgtatggacgctttattttagtggccgttggcggagagctgtgggttgtgggtcaaggaatcaccaccaactttaattgttcatgcgaatagaagccaaagtacatataaactgtaaagtgtgtctgttgatctacaaattatctagaaccattaaagccattatatagttggggaaactgcaaccctaaaagggagggatgagatcagcccaaggaattggataggatgggatatggaactccttttattatcttttgatcttttttaaatctttggttttgcttatgctgttgggcaaggaaggatgccagattcaagcccttgggagtctctttcgaaagttcagaacagggctgaacttatctcttcttggctttgatattgcaatggtgaagttacatgtaagattctaggctcctttgtattcctgttatcctcccactgcaggaggaatcttccctcatcatctgcccttcccaacagcagtggcttttgatccatgataacactgcttgtgggtcctggtatttcagagctcagggctgtggagccttggagttgacaatactgtttggcctacagctagttgagtttgctttcaagataagcaagttataaaagtggaatcaaactattgtggggataggaaggaggtgcttgttactcataagtgaccatggtatatctggagggaagggaaggggtcaagggcaaattgagcttccacttgcccattctttctgacaagatcaggttgtatcactaggcttggttccttagctttatttgtttggcagcaatactcagtgcatccattcagggattccccctttgggtcaggtcatctac

SEQ ID NO: 105329 - DNA, 1031 bp, Homo sapiens
ggagatgatgagggcagaggacaaggcttatgtctccatctcagttcttccccataaggggaataccagactaggcagtggtgactggtagcagttgttttcttggcaattcaataaagacaatgctaagaataagaacactcaaggaagctaagtgaaggaaaaaagagctggggacagtggtgatcctggtgggagaggttggggtggggcaaagagcaaagcatgctccctgagcagcatgtcaggccttgcttctgccctccactgtctgccctgccttgacctgtactgcaggctgactgattaacaggcttccagcagctgtgccagtcaggtggccagggctgccctgcacaaccttgcttccttgcattcccttcagcaatgttcctctgctcatgccttaaaatagttcaaaattgagaacatgaaaatgctttcttatgcatacacaagcagacatgaatatgtgtatgcacctggtgtgtgtgtgggctgtggtggaggcatactttgtcttgtgttcattgtcactgacattgctcagggaggctggggtacgtgcatttgttttcatctttagagtgtgttaatggtttccttcttgattaaagtagagctcaaaatgcagctctgtcattgctctgtattcttggtttgtctttgatgttgaaaagacagtgcacttgtgcttttggtggggctcctggcctgcatgctgcttcctaggattggcaggtattgcatatcaccacataccagacacccacaggagagaaaaatcatcaggatcaagaggccagattgggctgctggcaaagtttatctgcaggctaagtgcttgttgctctcctgcttatccatgctgcctagtgtgggctgtccctagaagggaattctgtgtccctctgagtgctgcaactactctcagggttttactgtagtggttttacctcgcctattggttgacccatctacctgtctcatttgagttgagtgtgaattgtttaggatattgcaattagagg

SEQ ID NO: 105330 - DNA, 1039 bp, Homo sapiens
tggtggtttgctgcacctatcaacccatcatctaggttttaagcctcacatgcattagatatttgtcctaatgctctccctccccttgtcccccaccccctgacaggccctggtatgtgatgttcccctccctgtgtccatgtgttctcattgttcaactcccacttatgagtgagaacatgcggtgtttggttttctgttcctgtgttagtttgctgaggatgattgtttccaacttcatccatgtggactattttttcatcatattctacccttcccaagtcacacctagggggctgaggagtgacaggtggagcagggcaaggctggattaaacattaatgcagctatcaccactgcccagaggagcaagttcccagagccaagctacagagctaccctagtgtccccaggctgaggaggtagtgactggcatacatggctcagtttgtccaggtcctggctgaaataggtgactttggtcgcttccagatacagctattgatcctgctgtgtgttctcaacttcctgtctcccttctacttttttgcccatgtcttcatggtcctagatgagccccaccactgtgcagtggcttgggtgaagaaccacactttcaacctgagtgctgctgaacagctggtactgagcgtgcccctggacactgcaggtcacccagagccctgcctcatgttccggccaccccccgccaatgccagcctgcaggacatcctcagccaccgcttcaatgagacgcagccttgtgatatgggctgggaatatcctgagaacaggctcccatccctgaagaatgaggtaggcttgtccttttgctggtctctccaccggttgtgggtctgtcaggtcttgtgcctgactcttcgccctcagtcactggctctgtatctgccccatgcccatatggtcaaccatgggcacatatgtttttcattttgtcaatctcattttcctctttgtcctctgcctattgacccatctgtctgtcatcttctctgtccagtctgtctgcccatctgtc

SEQ ID NO: 105331 - DNA, 1009 bp, Homo sapiens
gccttgcctggtctcaggcctctgcagacatggatccccagagatgcctccaaaccttgcttcccattccttcctctctggcactttctcccgcctccttgtcaggtgcacgaaccaactcatctgtgaacatcttcctctagagggtcttggctttggctatttggggaacaaagattccttgagacatgtgggtgttcctacttagcctcagtttcttcattttactaaatctttgagtgttaccccagatgagtcctctgttaccacgattacggtgaggcagccctgccttcaaggaggtctctaggttgaactgctcctagggtgtggggcctcatctggtgacgttagtaccccctggaccagtgtagaagctgaggaaaattctacacttccttttttaaaatgcctttcaggtaaaggttgttgctgttgatgcagagttgaatgtcttctatgaggaaagtgtgcattttgacagagatcttccagaatttgggtatgtacttgatgtgcatgtgtgtgtgatgggggtgttggttttggggtcctcccgcaaacttttgtattcgcagaccgcactgttgaggctttgccaaatacaggagtggtggtctcggcagacctttcaagcatctttttttcctatacctagagtgccatctcccccatttcttcctaattccattcatccattcatgaagtaagcatcagttgagacctactttgtgccaggtgctaggacctgatggcgaaacaaaaagagaaagctctcccagagcttcccactgagtagtggagactggtatcaaacaaagaatctcacaaaagagtgtttcattataaactctgagaaggcctctgaaggaaaggaactcacttctccaagtgcttattataaaggaatgtgactcagacttgggaggggaagtcccagagcgtctctagggaagtggtgcttaagctagagatcagagtgagtgaagttagccaagcgatggaaggg

SEQ ID NO: 105332 - DNA, 1053 bp, Homo sapiens
gcagtgcagacgatgttgagattcacattcggtctcgtctctttgttgttataggataagttctcaaaggtgggattcctagatccaaggcttctgacacacacactgctgattgaacctcagtggcagtgtttgagtgcacctgttcctcactcccatttcacctttattcacatgttgattcactcagcatttagtgagtgcctattatgtgccaggccttccttcagtgctggggcccttcagcaatcaaggcagataaagattgctgttgtgagccatgtgtggtagtgtgcacctgtagtcttagctacttgggaggctgaggtgggaggattgcgtgatcccggagttctaggctgccgtgagctatgatcatgccactgcactccagcctgggtgacagagtgagaccccacctatatatctcttaaaaaaaaaaaagattgctgttgtgggctttgtgtctaaggcagggcacagagagtgaacataacctcacccccttcttttccattactgcctttgtctttctttgctgtatatccttggtgtcttgtcttggcctccttgattctctgcactctcggaagtgcctgacagtggagggatgtttggaccccttcagggaagagacttcacagctcaaatcagcggccctgctaacagagacttcaccccgtgacccctatgaccttctcctcttagggcctcctgagcgctcagctcccctgctcctgcctccaccctagggtgtgggtgggggttggaggtgggggctctgcgcctgcctggagagccctgtggtttgctttgtggttcccatgtggccgccagctaaccagaagctcccctcccattctcagcgtcgctggcaggcatgagactggaggaaggtgacattgcggtaaggcgacttcccacacccataggctctttctgtttccacactcacacccacactctgataagtagcagaggtgctgctgagacccagatcccagggtcccagggtctgggtcccagcaggatctctgctacttatcagagtgt

SEQ ID NO: 105333 - DNA, 1096 bp, Homo sapiens
taaactgctttttctgcccttctaggtctacgaggcccttctcccccagtatgccaaactcgagcagagaatcttgtctcagacccgggggcctccggagtgaacaggcatccctgttgcccctgcctgcccagatttactgaccccatttgtcgacatggccccagacaggagggatccacttctctgttctgaacagctcttcctgcccctactgactccttggagtgtccaggaccatcttaaagccgccctcagcacatctgcatgaagatagataggcactcctgtccctgtgcccgtgtgccccagggcaggaaagcatctctcttttcctgtcttttatcccaggaggcaggacaacactgagactgggatatgtccaataaaaactatgacttttccccttgcagaggcagaattaaagctaatctagggactcaaatcagcagaatgggggagacaaagcccggtctcaccccctaacctcatcctatctctttctccaaccctgactgcccactcctccacaaaccgtgacccatagccgcccccaccccataccttgatctaccatccatcctcttccccaatccaaaccccacagtctcttctctcccacaccctgccctccttgtttcagctgtctgaggtgcctcgcagggcctctcttacttgccccatgctcaccctttccatgctgtccccattctctcctttcaccatctctcctctccccctccttcatctctcctccctccccaaactcacttggcataattcacaacctcccacccaaacaatgggcctggtggacgtgcttcctgtgccctccctttagctatgcccacagatcactgagagggaccatctcccaagtggtgcagtttagaacttctctccctttttctccctcattccctctctcttcttgcagtccacttgctgaagaagttgtgtcatttctctggaagaatttccaaaattctggatttcttttttattttggagtatttcatcagctgaaaagtgattctcactttgagttttcttcctatatttgtatagtgagttcctttttccttcctctttatcc

SEQ ID NO: 105334 - DNA, 1933 bp, Homo sapiens
atattttactggcctggcacagtggctcatgccagtaatcccagcactttgggaggctgaggtgggaggatcacgaggtcaagagatcgagaccatcctggccaacgtggtgaaatgcgtctctactaaaaatacaaaaattagctgggtgtggtggcacacgcctgtagtcccagctgcgccagaggctgaggcaggggaatggcatgaacccgggaggtagaggttgcagtgagccgagatcatgtcactgcactgcagcctggtgacagagtgaggctccgtctcaaaaaaaaagtatatttcactgaatttgatatatacaaagtaatttcagcctgagatcagtattaaaacgagacattttgcattccatttttgtactgtcatcaaaatccagtgtgtgccttacagaacatcctcaactctaactttccacatttccagtgctctgcagaacatttggttagtggctaccatattagacaatggaatctcagaagggaaggtagaatttatggtgtaataaatgtcacatggtgcttgtcacaagatcagtcagtggttagttggttctttaataattcttcaagtcttttgtggtctgtgcttggccgagtgtccttgggaaacaagccatttggctcttgcatttcagtggacatcctggacactcaatgctgtatcctacaagaactcctgacacctgtctctgtactctgtacttggggttcagatcaaagggcttatgggggtggggtaaacagtattctaagtgaagtgaccagagctcttggagagggacctgcctcctgtctatcccatcaggaagtgcaggccctgattactctgataggctgacccaaagaagtttcttggccacttccttgggggagggcggagggagtgagctcatgaagtgaagtgactttcatccctcaggcctagtgtagcggtagctgccaaggacatgggctacagagccatgggccgtgggtgcccctcccagagaagagtgttttctgctacctgtccttgtatctgctgggcactcgaggctctgccctgtctgggtgggctgccttttgggaggaatgggtatcctccctagctcttaggggccctttcaaggcagatgatgtgagaaacctgcccatctttccaggccctatagctgggtaaaaacataagatctaaaccctatggcctcccatcacttgggtgggcctctactgtgtactactctgtgggtctttctgggcatcaagaatctccagaagcacctggacctctgctggcacttcacctaaggaactcctgttataaggagccaatgaagagcccacattctatacagtggtcctccatgtcatagacccctctgagaatctgatgaaagctgtggacccttcctccaggaaaatgtaaatcggtatatgtgtgcatgtgtgtgtacattgtatgcacccactctgttttgtacagatactgggaacctactgccccctgattagactccttgaagtcctggctgccctgcacatatccactgtagtagtcttaaggggcagcttgttctgcgggggaggggtgctttttccaccttggtacctcacttactttgccttttgtgatcctgccggatgttcagattctagccctggtctctctttccagaaagctgtcctcttgagtgccagcctatgcattcagcccctctgcttgggagctcagggtagtgcaaatgagaaccaaggagtatcggttcaggagtttagatccactcacggatactgacctgtcaccatggattgggatctggagggttgaggactgggtctggataatatttttgctagtgactgtagatagactctagatagtcctgaggcagggtcctggttgcatgggcctcactgtagaacagggtttc

SEQ ID NO: 105335 - DNA, 1231 bp, Homo sapiens
tcaagtttgtggaactgtttctagtacaaatgatactccaatcagctttcccacattatacatatgatgtgcgctgtttgtgtcttagtctgctcaggttgccataatggaataccatagattgggtggcttaaacaactgaaatttcttttcttacaattctggggactggaagttaaagatgaaggtgctgtcaggattcgtttccagtgattcttctctcttgggttggcatatggtagccttcttgctatgtactttttgctgtgtgtatccactccaggtgtctcttcttataaagataccagtcctgttggactggaggcccacctttatcacctcatttagccttaattacctccttaaagtccttatctgtaaatatattaatggcaaaacctgcaattacttttgcaccaacccaatagtcacattggaggttagggcctcaacctatgaattttggtgggactcagttcagtctatgactgtctgaaacaataaagtttggttgaaagtgaattctgttttcctcttgagtgacattttggaatggaagttaattttttcagggctttgccctggtgtctctgttgttcttgcttaatactgcccatggacaatcttgtctacactggtgggcttaatttccgtgtatgtgtgcaggttcccttgcctttgggcatgttacgatcctgaaaatatgtctaaaagctgggtgaaaagtagatatggagatgtacttttctgataatcaggaccaaatatctttctaaaggtaactggagaaactagaaaaaataaaacttctctggttgaaggcattgtatatctaagaagatactgaagaactaccaggccagtatctgcatgagaacaaaggcctagggtgatgattttggtatttgagtctgtttttagtcataggggcaactgagaggctgcatttgatagctttgtggggctaggaagacaggaattggagttctaagcaaagggtgggcagagtcaatcacttatttgggattgagatcccaaagatatagaagttagggggaccaaaatgtagacaaaccctaaagttagattgaaatattctgggctgctgggtttggtggtgcacacctgtaatcccagctacttaggagactgaggcggggaggatcagttgagcccaggagttcaagaccagcctggacaatataggaagaccccatctccaaaacagaaa

SEQ ID NO: 105336 - DNA, 1762 bp, Homo sapiens
gtgcagcggtgcaatctcagctcactgcaaccactgcccctctaggcttaagtgatcttcccacctcagcctttgaagtagctaggaccacaggtgcaaaccaccacaactggctaattttttgtatttttggaagagatggggtctcaccatgttgcccaggcttgtctcgaactcctgagttcaagcagtctgcccgtgtcagcctcccaaagtgctgggattatgggcatgagccaccatgcgggcctgatgtaagaattcttaataaataagtaaggatggacctgaatacttactaaaagctctgaggccatgggtggagttggcttaatctagggtgatctgattgggctgttttgggaattagttggattcccctgagaaatatcttctgttttctctctggagggggcaggcttggatatcaacatcctggaagtcaagggggttgagaactaggggttcctgtatttggtatattgttctgtattcctcctgtttcagtgtgatacctgtgtcctcagatttgcctgctcctctttgtcgaagaggctctctgttcattttctttagaaaataaacataatctccgctgggttggagaggggcaaccatgatgagtggtggtgggatctgaggatctgactgtaccttactaaccaactcttctgtctttagactcatttttaccccattctttcaaagacatctggtgccacaaattcctgagttttgaagggttctgtgggggaagtcacattgcttttctactttatccagagccaacttaggagtctgtgtgatcagttaccatgtgtgtaagtgctttccagccttgaaatgtcatttctgtagttctctcctgttctctttgttcttacaggtttatgcattaaactactttattgcagttttagtgggactacaagagggagcaaaaaggaaatgtttgtgtataatccttgacctttacctggaagctctccttccagtgttttccaggaatgatggggcctggaaaaaggcatgtatttcagagctgtgggaggatggtgccagggccttgtttacaaagtccaagttggaagtgacttgaggtcacctggcttggttccttgtttctaggcgggacttctgaaggcagatggagctcctcctgtcaccttggaaggtgctcctgtatttacatttctggcatttgtagtgaacaaaacagtggaaaatcctcatgcaaaatacatagaaatgctggaaaaagtataataaacacccttttaaaatgcatatacattgctgcatgtataagaagtaagggaaaaacaagaaggagctggaaactagagctgtatgccttcactgactgaaactgctgattccttggggactttgcctgtctttataatttagagatgtgggtttaagtagcagtgtggacaataggagagaagatgtggaattgagactgaggcctttgcatggcttcagacttctgttgtgttataccttcagtaaaaatgtgggccagaagaaacatgtctttgttgacaaagagactaaataatgaaattgtctgagactgggtagggttggggttggggtagtttccccgagaatttataaccataggcctatgctcatgtgagcttggcatttataccatcctgttctctggtaaactaagttgagaaattaaagtggttccaaatagttaatgtcctagggagattggcagaaggcagaaatataagttacctttgaa

SEQ ID NO: 105337 - DNA, 6465 bp, Homo sapiens
aatgctgtaaattcttctcagaaaacttgcatcccaggccagtgtgcctgtccacaacccctctgagaatatatgggctggcctttgatagtgtggggactgggacagggtctgcccagccattagggtaggtgttgctttgccaaccctgggggaagccttccatctgaagtgcactgagggattctcacacccatgtcggcgcctgcagctgcctgcttgtgctgcttcacctctgcaccccaggtagggtgggatggcctggtctggggcctgactctagggcacagactctagtatcttgggaaccaaggtgggagttggatcatgatgttaagctttatctctgcccacttgtttccacagggactttaaaagtaagaatgtattgctgaagagcgacctcacagccgtgctggctgactttggcttggctgttcgatttgagccagggaaacctccaggggacacccacggacaggtaacaggcctcacagggcaggaagagagggacagacccagggtagatactttgccctttttgtgctcagctggggaggtgcagggatgagggtgactgcatgcgttcagagctgtctgagaacttagagcaatgctcttgtttgaccagtggagaaaccaagaccaggaaggcagtgtagtttagcttccgtaggacagtcagctgggaaatgtagagattccccactggggttttgaccactagtccttgcaatcttagtctttctctcacttttttagttttaattcctaagacaaaacaaagaaatgtactaaggatccaaacaaagaacctggaaaaagtaactaaaaattaaacttaggaaatcattcctaaaacaatcactgttattattttttaagtgttctccttccctctttgtttttggtcttaatctcagtcagatacatatcatctgtagttccttgtattaatttggtaacaattccattttagattactattatctccaggatatagtatttaaaaattattagccaagtataattgatgctgtgacctcttgtaactgttgtgaatgtggtgaatcgaggtttgctatcattgataacctgtctgaattgctctgtcttgcccgccatctggtgcacagaggctgtaactcccatgtcccagctgtgtgtgtatggccagtcactgtaaatcctgccctcctctgtcctcacataggtaggcacgagacggtacatggctcctgaggtgctcgagggagccatcaacttccagagagatgccttcctgcgcattgacatgtatgccatggggttggtgctgtgggagcttgtgtctcgctgcaaggctgcagacggtaagtaggatggcagccctgggcatcctagattgagtgatagggagcagtgggaccttagagtgatcctgccaggctctctctttctcctaggacccgtggatgagtacatgctgccctttgaggaagagattggccagcacccttcgttggaggagctgcaggaggtggtggtgcacaagaagatgaggcccaccattaaagatcactggttgaaacacccggtaaggggcctggttcaggcaactttgcaggggggtggagaagggaaaacccttcatgtgtagcaggtaagctgaaatcaagggggaatgggcaaatagaaagtctgcgacgttccctggactctagggatgtgttccaggggttatggggagtgaggtaggatgatgtccttctcctgatccccactttgactgaactgctacattttgggcacttgtatggtttgggcttccaataagattttgtttgaatatcagcacttcaaggcaagtagtggtgtctatcctagtaggggccttggtgtctccttctccctcctgtgtatgttgaggttcaatgaacctttcctagggctgtggagtgaggccagtaagctcagaaagatgactgccatgaaggcaggcatgctgattcctgaagttttccccaggcctctgctggtggacctgctgctgtggttggggctggtgggctctgcctgatccttgggaatatcaagtttactgtcccccaaagcttttcctcactgaagggtcctaacaaaggtgtctttcctgtctgccctatgctgcttagggcctggcccagctttgtgtgaccatcgaggagtgctgggaccatgatgcagaggctcgcttgtccgcgggctgtgtggaggagcgggtgtccctgattcggaggtcggtcaacggcactacctcggactgtctcgtttccctggtgacctctgtcaccaatgtggacctgccccctaaagagtcaagcatctaagcccaggacatgagtgtctgtccagactcagtggatctgaagaaaaaaggaaaaaaagttgtgttttgttttggaaatcccataaaaccaacaaacacataaaatgcagctgctattttaccttgactttttattattattattataattattataattattattattaatattattttttggattggatcagtttttaccagcatattgctctactgtatcacaaacagcggacacgtcagcaggcgttgaggtgctgagctgtggatgcagaaccagcgccatgctgaagagcctcagccacctcctgtcctttgggattcgtttttcccgctttctctttgtttgtcgtctcagaatctgtgacacaaagaaacccatctcctgtcttaggaaacctaatgctgcaaactctacctagaggaacctttgaagactgttacataagaacataccttcctcagaagaggagtttcctctgccctctgcccttctcccctgcctccctccctcccctccttttattttgttttagtgagcttaagaaacagcagatgtgtctttcacggatctaacgggtgttgtcctgatcgagaaaaaaactgggatgagaatggtttggactggagttggaaggggaggacggtactgggggtagggtttggaacagagctacactggactcgggcacattcggagcagcatcctttagtatggaggctacttctcaggtaaccaggaattgaggggaaggaccttgtggaggccgagcattaacagcaagagcggggtttggagaaagtctgagattgggtgcagccctgacttacctgctggccctgaccagtttcttttcactaacttggccttgggcataggatgaaacattttttctgccctaattttaaaactaggtgagggtagaatcatcacaggttaggaatacattcttcataagacacgatgctgtaaatacccttaatggacgaaaagttgaaatacttttgtttcctcttggagcagttcagggaaatgcccacaggggattgtcctgcacagatagggcaagaggatttcctgggtggagtctgccaaggcctgcctcgctggggaccccagagtcctgcacctctggttccgccccaggtggtgacattactgtccccgttctgtggctcgtggacaagactttctccagaccccttaaagtggtacatattctaaaaaactgtttttctattatgccataaccttgctctagtcagtgaatgttcctaatgctgctgtttcaacatttgaattctttttaatttatgaaacatgctaaattttttttttcaaacaaaacacacacatccacatatacacatgcttcgctatgtggcttccaaggtttaaattttgaaaagtaaaagaattaaaacttcacgaccacagatcacctcaaaccagaaatacctcagaattttctacttatgtaaggtttattatatattttgttagttgtgttgtcttgtagtaagtatattttaatgtaagttggcttttgtgacaaggaagtttaaaagaaatagagaaaaagaaaaaagtttgcatcttctagggagtgctaccatttttgtttgataacgcccccttgtaaataattgtcatcaactgtaggttggctgtctgggccaagtctgggcatttatcagtcttgtttgtgaaggcttttccttctggtttctttagatcattttatttaaaaacagtgcatctcttcatcgtgagggtaggcaaggcgggggccgtggggagaggttgacctgggtgagaactgaagaggccgcctcctcttgggttgtttggagcttcacatgtaattcacatgtaacatgtaacttgatcggtcagtgttcagaatgacaagtaaccccgcttaaacttggtagaaggatggcccttagacctgaatggggtgattttacttgggatttaacttcttcagcaaattaacagcaacgttggaagagatctgtggcgcctctgtgaagcacaccgtgactcaggccagtcttttagtgcagcgtgtctgggagtgaagggttttgcccttgctggtcttggagtccacagtgtgaggggcactgcacatgcctgggcatctacctagtgtgctatgttcagtgtctggggcttactgccccggggtcctttcctctgggtgttggggcacagggtgctatgggaggcccatttgcttccctctcggagctcagtttttgcttcatgggtcaaaatgtgggctggccaagtggttacaggaacagggtttcggtaagctatgttgtctttttttttttttttttttttttttttaatggtttgattttgtgctgtggtattttttttcccttagaataatttttaatggcaaaacaggccttacagcagttgcttttctttaccatttatttctttaagaagctttaaaatatttattgaaaagtgccatatctaatttctttagctttcgcctcaggcagtgcaggcatctttacttttcatcctcagaagaaacaaacgactaacaaatgtagcaaatttactgcaggaatagttaggtcatgatactacctgaacactaaaccccagcctctttgtttggttttagttcctctgggtggtttttcttttgtgtgctggcttgattcttgtgagaagttttgacctggccaagggagggttgagccatggttctggtgtgggactttgcggtcaagacacagtacagacaggtcaggcctgcgtgccttttctctgggtggcctccccgttaggcccaccgtacgctcagccactatagtgtccctgtggggccttgccatcagattgtgtgtcaggagatggtacctttttggtgtggctggggaggagtgtggtccatgccagttctttgggcttcaggccactcttcccctcatgctgtggtgtaaagtgcacccatcaggtggtatatctggttctgatggcaagaagaaggtgggggatctccttatagggcatgggtctaggagcacagatgggccttttgccccgggtaaatgcttgtctgtttgctgtcatgtgttctttgaggagtgagccatctcgagccctgctttgaatttactgggtcatagagcctctgcctgtgctcttttccataatgacttcatgtgacatgcacttttggtgggctcagataattggtttctttttgtttttgacctcaggctctgtggcagactggggaaaatggggcctggcatcattttccctgtcaatgggaggggctgttccatgcagggtgggaggggaccaagttagcagagagtagccaaggatccttgcttcttcctttctagtgtgctgtcatccaagcaggctcctggctgtagggatgggccttggggaagaatcttctttgaaagcatctatgataactgagaagtcatccctagttggagaaatccagtaatgagcagaaggaggaagcaagtgaggacagaggccattgtattacagtgtcacgcagagggccctcaatgatggggcattggggaaggctgtagacatagtcatcagaacatcctggcctggcataagctgggttttctcctgggaccattggtcctcagcaggagttctttgcatgagttgctcaggggcaagggctgcaagtgggctgtgcttaggagaaagtgacacctggcagtgagggaagatggtgagcattattagcctttgttgtccagcatggccttcttgtcctgtctgctctggagaggagcctgtgggaccagtcctgcctggggagggcatacccacacgtgccagctgattctgactctgaatacatcatgtccggacttgggggtgtttctgcagaaaaaggaggttgtttttcagccttgaacatcttcaggaggatagagactcttgctcacatattcttagcaaagggaagggtctctcatctccaggccacagagatagttcttccattgccctaagaggctaggctaaccctcttgacataacttagacagcaaagcacttcatcctgtagttgggctctgtcacctttctcttc

SEQ ID NO: 105338 - DNA, 6068 bp, Homo sapiens
tcgtttcctccatcctgctatgctttgtgtgctcgggctgtgtgtggggtttttccctggtggaaggaagcccagctgtgtattgaatgtccttcatgtgttgtgtgtggctcagaaagcctgtcacttggcccctgtgctctgagccgtgagggtggggaggtggctgttccattaaagtgggagtattggatggccctcttgaaactagaattttgccttttttagtatgcagtataaagtttccagcatctattggtaacacaaagatttgctggtttttaaaataatacagtaagcataagtatgtaagtttttagaattggtactagaagttggacagctagttattctcgagaactttatttcactagaaaaatatactaattggaaagcagtttccaggagttaactcagtttaattttcagtctcagttattttagcctgttgagtttttgatggcacacctttggagagatggccacgcctgattcccatttcaggggcatcagaccatacctttttaagaagctccgtgaatctagtcatctacccttcatcctgggcgaacagccaaaaagagaaggggacaaggtgtctttttctccttctcactggggtgacatgaattcttttagttaatggctgtttgcaaattctaaactaatgaaatacttagcagctaacatgttcaatctagtaatgatgagtttaaatctcaattgacagtaatgttttagataaacaggcccagtaattcagttgatgaactgtatatcttctcagtctagatttgtaaatgtttaatgaattcagggttataagcatagttctttaagtaagattccagatagttgatttgcaaccagcagtctacctatgaatgtatcccaaacctttagaagattggaaaagatttttgaaataatgatttagttttgtaggaaaaacacccccttgaaaattaattcggttgacccagtaacattttttaaaacaattggtggctccaaaaggcctgccaacaaagaaaagtccaaattatctagtgggacattttgaatgttttatgtttattttgggtccactgtaaactttggttcaaaaaagaatttgaatttaaagaatttaccattatttaaattattaccaagtttttacattttcatgatggtattttccaggtatgaatgaaacatgactttttgattgtggtacttcctgtatcccctgtagtgccaaaaccagtgatactttatttgctcctatggcagctcatagaggtaaccgaagtgatttttcctcagtaattgaaacacatattctctaaatgccaatgtgtggtgatgggccctgcactgccttcatttctctagggcagtgtctttggattgtctagggcctaggtaattctgagaactactgtaaaccaaccacagggcactaaagcaatgtacacaccactctttgtgtgtatggaaggggttatataaacctgggctatgctggacatctacagaagagtattacattcacttgcaaagtttacatttttgagctcacagttatgaaaaatatgacccacaagtttttcaggcaggtgaggatgggtcttcttgcaaatgcatgagttctgtcttgagtcctgggaacttctctgttggttgagtgtgggctcattccctgactctcctaatcatgtttgcgtcagaatgttagcattgtaaataaaagaataggttgtataatagatacacaacacttgaaactttactttaaaaaaatcgatagttctacatatatatttagttatatcacttgacagatttcttctacacagtgtggagattgttttataccacagattatttttataaagttagtgaatttgaatgattttgtaatcagagctaatgagctttacctttcaagagaaacgtacactggagcatgagtggtgtggaacttttacttagtgtttatatggattcttgtgatacactggcagactggagtcaatttgcgggtcttttttggccaaaactccacttgtggttgtgtaggacagtgatattcagctcagcttcttgtggattgggaggagagagggcctgcaatgtgttttacattggtgcttcctcctgagatttctgttgaacaaagggttctgaggtcaaaaattagtttgtaagcctttgccataggacatagtcatgtgagagtgtttgggggaacagaaattgtataggggtgcctattggggtgggatgggactcgaataagattcaggtacaaaaactttgaaatgagaatctggtggtttgagtaatccaccagactgaattatctaagatcacattatccaggttggggggcagaattacccagttaagtaattgttcagaaaagtggggagggtggcatgtggatgcagtgatccaattaaatggagagctgccaggcacattttgtcctctctggtcagtgagaatggttgggttggctcgctgcttcaatctgtggaatcagccaggagcccagtgaggaagctcagaaccccagtaacagcagagcatctttcagatagctccagagttttcctgcttttctgaggaagctcagcatcactgccacaatacggaaagtggtcttcattttagcctatttatttttaggcagagagtggatggttatttgtgtgggacttttggtggcgatatataatgaataattaagttaatttctggtatgcataatggccagtcctgaggcccagctgaagacctgtcccccagaccctgcccgctggcttcaggctgctgcttctagacagaggtgcactggacgggatagttttatcaagagaatccctaatgtgtcattttaaaccagctgtgctttttattcattctggttgagcgtataggtttacactttaccctttttatacttggaataaatttagttccagcagatctagtagcactccagaaaccaaccccatctgttccccataaaaagaacattttctctgctctccagccacgtgtcttggaatgtaattctgttgtgcctttgtttttatcactctcttcgccccaaaagcaactgctgtaagcttttttctacttgtcttttctagtccccaacctctacctttttcctttttcccagccctaatttctggatgcacttctgtgatccaggtattttaagaaccagttacctcagacctcatgttgaacagtgtcgccatctgggtcctcttgatactgcagacttttaacgtacacatgcaggaaccctgctgagcgtgggcacttgttttaaagcaaaactcttcccaaggactgaagaaagggcttctggcaagctcgtcatggcattgtggtgggatgggtctagagtgtcatctgaatggtgcttcctgtgttcctctttgaattctgccattttcagtattcttgtgtgtctgaataggcaaagcgatttaattggctggtcttgcacgcaaattagttccaaagataagctctttgtaacacatttccagtcgctaatgctcaaatgtagaacattcctttaaatggcaggataaaaaacccactatccaccatagtgcattttgggaagatgtctgtagcatatgttgctgtgaaattaggccttgtgggatatggctgtttgtcattttgatgtattttaaataaatatatatattttttaaagagccttttttaccagttcaaaaagtttaattaaccagcagtcaccgcatctgaatttttgtctctggggcatagatggcagaccaagattaaaagtggtaactcagctatacgagcatgggctaccttcctgggctctcctgcagtcctgtagacctgctgttccgcagaccatgggacacaaggtcagtgtgttcccagtgagggtcccaagtcagtcatcttaagtgtttgttctctgccccattcagtggactgttgacttcagtccctgcaagtgctttagcccgagtggggttttctcagagcactgccacgagttaagtgtgtgtttagccaaataatttctccgtaagggaaaaatgcagtcacccaaattttaccaacaatgacagagatgagagtagaaaagattaggcaacatctgagttttaacttgaaaagtgtccaagtcatcatgaaaggccgactgggagcaagtgattattagagattcttcaggagacctcatctgaaaatgttaagactgccagtgagggaaggaattgttaaaatgccagcggcttttttttcctctttttttctgtaattctgtaaaaatgcagagaaagttgagtggtacttcagaattgagggagagggttaccgcagagtagaaatatatttctagatttcagttccacaccacaaatccacaacaatgccatttttcaactgtacaaaaatctgcttatgaactggacatgatcttaatggtagtgtcaaaggccaagtttttcacctgttaatatttttccacatttgtccttgaatctgaataactttatacagtactgtaaatttaacttacatcgagtttgttgtcaattcttatgaaaagagctttctgcatgtaacacatacggttaaagaacacagcaaaggacaaaatttgcaggaacagttttggaaccaacagaaaatgtcaccttttatttgccatcttatatatatctatcagttttaccagctacttctaaatttgtacattatttgtaagggaaagaaggaaaaccctaagacttgtctaacttagtggagaatgtgtgtgttgggcttaggatggatagctaagtcttattgagctgtgttacctaacttgtatataaaaattgtaattaaaagtttgggttcacctgtttctcacagtttaaaatgatgagtaattgcaaactctggaaatgtgactagtatatgatttaaggctgtagaagcaaggaagctctttcaagtgctaaaactaaagacttctagtttttggctcaaataagtactgtttgtataccaggatatgtgagatgtaaatgtagtaggtcacttttcacccttgtagctataaaataaaaattttgtagaacagaaatagcttgtactactgaattaacaaaagttatactaaagtatcatgtttaaaaaaaatatatatatatatacagagttaagcttgttgctgttaccctgtctggatttgaaaagtgtgctgatttatatatatatattacacacacacacacacacacacacacacacacacacacacacacacacacacacacacacacacacacacacatacacctaaaatggcctaaagcagacatccatgtaattacagttgcaaaatgaaaacattttggaaagaacattgtatcatagttcattcatttgcagtggatctttgttcctttttactgtggtaattttagaaatgagtgtcaagtttgaaattagatctgctaagttggggttttgctgcttgaactctgcactgggtcctcaaataaaccgatgtgaatgtagttttttccccctgtgtgaagaagcagttacaccccaacaataggaggaaaaatctagaactatttcaagttttatctttttgtatatgaaaataaaataataataaaacaatcttgtctttcttaattacgtggcaggggattggagtttcctttcatgaggattagacatgaaatgaaatggcgttcggctgcttagagggctgactcaagtcagttcctgtttggtatgtgtaacattaacagatgttaatggctgaatgcctagtctgccatggtcctgtggggctggagctaagcacaggtctccatttctgccattcagaagtccagggtctagttggggacattatgaatggggaccattctcctgaacgaactgttctgggattttgagtaagtttctgcaggttagcatattttccaaatgtccaagacactccccattccctcatcctctgccaccagtcctgtactttgcagacaaccctgagcaatatt

SEQ ID NO: 105339 - DNA, 1048 bp, Homo sapiens
tgagacccaggcatcaatatcaatatttttaaagctccctagattattccaatgtgcacccaagattgagagcgactgcttgaagagaaggtacttgtagcattggcagttagtatagatcagtgaggaaattacagtgaggtagagccttgtatatttgggtgaaaaatgtgaagtgaatgaacacatagtggccagatattcagaagaacaaggacgttttctctgccacttttgaactagtatgtttgtactgtactaaaataacttttgtgaaaattgatctctattgagaaactctttgccagaggcttaaaaccagaatttgcccttaagctttgtgttggaaatatttagttcttagaattcacgttataggtttggattttataattgataagcctacctgactacttactttatagtcctcattttgaataattattataagagctttctgtcctggaataattatggctttcatttattgaaacaagtagtcaataattgcctagcactaatgtttaaataagaaagtgtttttctgtgtctttttaataaaatatcttttaaaggggaaagcatttcagtgcaagttactatgtttctttctttacagaaagccatggctgaaaccttttacctttctaacattgtgcctcaggattttgataataattctggatattggaacaggtgagggatgagagttttaaaaacatgattctatggaagataaatgaagtgacaggagaatgtactgatgtgcctattagctgtttctgtctttgtttttcaaaagctaagcctctgaaggtaagtatgttgggccagttttctttgctgtgttttgggagtacagccttctacagaagatcagacttcaaaacgtagcctgcctttttgatcatgtttgccactgttcaaaagtcaagttttgaaagaaatgactcaaaataataatcttaataattgaggcagcatcttttttgagtgtgttcagtgaacactattattttctcttgtattccaatatttcttagctttt

SEQ ID NO: 105340 - DNA, 1033 bp, Homo sapiens
ccctaccctcaccctaaattttcaagtaccattgacagcctagaaagagggtgcttgttttactgtgacttagtaggctgctaccctttggcctggaacaggtaccccagtgtgagaagtaccgtcttccagggtttgtgctgccacaaaagcatctgctgaggctctatagataacacagggggcgaccacattcttgttgactttaccacactttgtgactccctcacttttcatgttccttccccccctcaggttcggatttcctgtttatcaaactcccatggtttctttctttcacttgatcggcatgactttttaagggcgtggtctcttgatctgtccctctagttttatttttggagtttctttttttgtcttaccaggggaatgtaaccaaatatatctatctaattctagcaggtacatattttttcctcttgatgctgcttaatattttattggaggcacatttacagtatgtatgaccttacaaatggcaggcttaatatgggtattgtttgttttgggtctcttctgggtctgggtggcacaggtggtggtggcaaattgtcatttctgtctcttggatggaaggaaacaagctcaggccagtatataagaaaactagcttcaggttgcgaatgagtgccagcttatgtattgtattttctagttaactcccagttgacttccaatttttgctacagtcttgagtagagttcagtgcttcttgggaatttaatagcagcaagggtttcctttgcaaaatatttttatacctaaatcttacatgaaaagggttgtttgctgactcactgattaactagacttggtttatgttaagcctttgagtcctttgttacagacatcatttgtgcccaagttgctttctcctcctgaaaccccattgctgacctgtaactagtctaatcttgcttgattatacgtttcccccgcccccatccctctgtaaaaccatcttttgtaccaaatgccgttgtatcttttgaatgatgtccactacaaaata

SEQ ID NO: 105341 - DNA, 1003 bp, Homo sapiens
ttcccccaaaagatgaaagatctacaatgtttttgtcagtattatatttgactcaggaactaattattaagggagctttgacacctgcagatggagggctgatcttgtgtcaagttaacaggaagactgcccacagatgacactgcatttgtatccctgtggatgtagagtattgggaaggcatttgtttagtttcatgcctccaaaccatgcattgtctgtgatgtatctgcccagccttctcagaactcaatgttgtacatttttccctctaggacctgaattggtcttggaggcagcttttagaaatcctctgtgtagttcctgtccacatgcactatatatttgtttcttttttctcctctcatgaatctgctcgtttctctacttctgtctacgtagaagcactcagcaactagtttctgctcattaaatgtgttctatatactaggctcagtgctttacatgtgttgtctcacaatgactctctgaggtaaatacactatccccattttacctgtgagaaaattgaggcttagagagcttagtgtcttacctgagtttcacttttccaaagtagtcatccacaaagtatgaggcagacagatctaagagaagaaagacagctgaggtagattcaaatcttttctgacatggatggtggctttttactcagaaatatatacctatttccatgggtatttgtgggcctgaggcatgcttggcaagaagagtctggtttctcgtctgctatgcaagccaaagggactttaatgttctttgaattgaaccctccttagctctgtggaaagagacagtcaggaatatttgggaattagacggcaatactttgtggggtttattagagcccatgcttgcctccagagatacagttcttttagtgaccagatactgccaaattgatgtgttcttgctttccaggtgagctttttgttcttaagattaagaaacctatgaaggatctgcagccaggcatggtggc

SEQ ID NO: 105342 - DNA, 1052 bp, Homo sapiens
tggagaaaatatattaatctaagcactgacataattactaaggttgaagtttaaatttgcccttgagccttcagactgtgggaactaaaagggaagcacaatgaacagtgtgctaaggatgctcagggcaggaacaatctctccctgaagatccatcatggaaggcctcatggaagatggagctctggggatgggccttgaagcccaggaagcatttcagcaggacagccagtggctttagcctccaggactttttcctctgcactctctgtggcagtgttgcaggggctttgggctcactagagggtagagtgggagggtgggtggtctgggatgagaggcagcaacaggcatttgccagcctccccaagggccctgctgagcactttccatttgcctctcctttcagaacaagtaccagggcttcatattcgacattgtgaccaagcaggcctttgacgtcaccatcatgtttctgatctgcttgaatatggtgaccatgatggtggagacagatgaccaaagtcctgagaaaatcaacatcttggccaagatcaacctgctctttgtggccatcttcacaggcgagtgtattgtcaagctggctgccctgcgccactactacttcaccaacagctggaatatcttcgacttcgtggttgtcatcctctccatcgtgggtgggtatacaagtcagctggacggagaagccctccccagccaggcctctcctccagcccctgggtctctgctgaatgccatgtacaaccctagcttctttcataatttttttcagtgcatttctcaccccccttctcccctcacacatacacgcacacacacctctccagagagaacttatctggaaggccccacttgggccaaggagaccaatctggcagaggacccagcacttgctcctggccccaccctccagaggaactgggaacacagttctctaactgcttagagagcttcaaggatgagtctgggaatgggagtgggtgctgtggaggctaattctgcctgcacttaggttgaaggagaaggaa

SEQ ID NO: 105343 - DNA, 1049 bp, Homo sapiens
tgaaaaaaaaaaaaaagacatggaaactttgctggaccagggaaagtaagagcctgtattgctggggaggtgagaaccccatagatgagcaactaacagagaatgctttagactgcagagtgagagaaagggcactttgatccaaggctatgtgcctccattccatgctgcctcctcctgtggggttagaccatggggaggcactgtggctgtcatttttaaacctctgggcctcccaccccacccgatgctgcctcgcctctgttccagaatgggcctggagccatgacttgcagcctgcctgctgttttaccattggcagctagagccaaatctctgtaggcttcagagaaagatggtttgacaatatgttaactagttttgtttttaaacagccacaaacaagggcagccagagccatttcgtctgggctgtggagggaaagctcagcttggcataagtgaggaggagttttggcaagcatctggtgaatctaatcagggtagacagccaagctctgttgttaaaaaaccacgtcaatgatatattgagaaaaagagaaatctgagtgtgttatttaaagttgtaaacttgtttaacagaaagcaaactatatcctttccaaattgctgagggaaaattttttttaaaaaaagaaaaaacagagatctcacagcaaaaggtagaaggaaaaagaagcaacaagaaaacaaaatcagaaaacaaaataatataatagaggcaagatcaaacacatgttttaataataaatgtaactggataaaattcatcttttaaaaggaaaggactcaggatggatcaaaaaaaaaaaccttcagccatgtgctttcaaatgacaaacctaaaacaatgcgactcagaaatattaaaagccaccaggcatggtggctcgcgcctgtaatttcagcactttgggaggctaaggcaggagggtggcttgagcccaggagttcaagaccagcctaagcaacatagtaagaccccacctctacaaaaagatttttaaaaattagctgggcatggtggca

SEQ ID NO: 105344 - DNA, 1055 bp, Homo sapiens
gctggagtcagcctcatcctgtcccaagtagagctctggggcatgaattgcaccacagcattgccccaactcaaggctaggggctggccttctgtattcttgtatcagtggctgctgggcaccggccaccccttgggacggcagtcccccagctgaagatgattttctggaggagggccagctaagcagctagcattcaagtggctgggaatgggtgcagtggtcttatgtagtggaattgggcagggtacccacagtggcccctgtaacacccctttacacccacacccacaagtgacacacacagacactcacaagggcacacctgcatgcacatgcctctctgtagcctccctataatcaagttattgaggtcagggcagcagacttgcaaggacaggaagtggagggctccatcaccttctcagtctccgggctctgtccagcacaccagaacccacgggaactgcgcaaaatgtgtgggtggggttgctggcctgttctctgcggtctgaccttgctgcctgtgtgttgcccgggatcctggttctgactctgttctggatgtgacatgcctgtttccactgtgtgtgccacaccaccacgatgtgtccatgtcccactgtgtgtccaggttgctaccccatgtccgttttgctcccagctagatgcagtccccatccccagtggcttcccagagctctttcacagcccccacaccccagccttagactccagcagaccagaatcacagacccgggaaccccgaggtccagccttggcccagccctgacaggcaaaagtggctctgtgcaggtcccagggtgcgtcatgaagatgctgcctcccttcagggagccctaagctcctgcagactctgggctcgaggccaaaggctgctactcagcccacactcacaccctttcccaccctgtcccacacccctgtccatagaccccagaggacagttgctccgagggcagcacagcagacatgaccaacaccgctgagctcctggagcagatccctgacctcggccaggatgtcaaggaccc

SEQ ID NO: 105345 - DNA, 1242 bp, Homo sapiens
gaggaagagcttccaaacagagaggaccagcatgtgtgatggtctggaggcacaatgcaccagaacctggagcagagatgagtggccagaaagacaaacagggtacttgagaccatgttaaggaatttacatccaatcatgagtctagtagtcagcaactggaggtttttgagcagagctgagatagatttttaaataattactctagctgctttgtgaaaaatggactaaagactgggaaaggagtccagtcaggaagcagttatagtagtttagcaacttactcatgttggactaggctatcattgataccatccttctcttcagccctttagtctttaaggagtaaaatttaaatttgtattgggttgaaaaagtacatattggaaaacatgggattttctgtttcagattggccactagtagactatattttattactgcatggcttgtactttataaaaagcatatgttgacacatttgtcaggtttcctatgttattcgagatgaagtggagaagtacaaccgaaatggagtcaatgctctgcagctggatccagcactaaatagacttttcacagccggtcgagactctatcataagaatatggagtgtcaatcagcacaaggtaatgcagggattaaaatctgtacccagcaaattctggacaaatggcttttactgtctaatatgacacttttcacagtttcagatttaatctctctgaatgctgagttatttggtacactctataaagacatcgcaaccagaattctgtaagcctctgagaaaaaccatccctaggaaagtttcagaagtgtttcagctaagacaaggactccctaaactaggtttgccttacagagttctttgccacaaaggaacaaagtgatttggctagtagggggattactttcaacaattaatttttttgctttaaatatgttccccaacaacctcttggtaaccttactaaaaaaagattgaatattcttttacatttctaattaatcttgaaaaaatattttattttcctcacttaaaagtaattaggatcctcacaaaccccacacggcctaactaggtaatacaaggttaggctgagcatggtggcccacacctgcaatcccaacaatttcggaggccaaagtgaaaggattccttgagtccaggagttcgagaccagcctgggcaatgtgacaataccctgtctctgcaaaaaaaaaaacttaaaaattagc

SEQ ID NO: 105346 - DNA, 1059 bp, Homo sapiens
aatatgtttgtaaaattgggttcatactatatagacagtttcatatacatcttttttacttcagtgatactgagagtatgaacatgatttttgctatagtctgaattccttcctgaaaggttgtacctatttatcttcacataagtaatatatgagagttccattgtactgttttctttttacaatcaagtattaccttgttttttgtcttggtgtatgaaacagtgtttttggtttgatttgtgtttgaaaaatactgaaattgaacattttttcatatttatggcacatgaatagctttaaacatatcatttaagcggatagcttttcaatggcactgcagtttatcagatattgagcatttgtatatattcaaatccagaaaatatgtaaattttgataataatactgtttagatttatctccattataggtagatttcttttccgtagaggacttataaagataagattttctaaattgaataaacttgcagtttttgctgactagttactaaacagctgatgatcttgttaacatttagctccgtttatcctcaatagcttcttctttaagtggaaacaaagattccatttatagcctggccatgaatcaactgggaacaatcattgtatcagggtccactgaaaaggtaaggaggagcttatttctttatttaaaaaaaaaaattatttttcacataccttgtctcctattttttaagcaggtattttacgattagcttctttatatttatttatttagagactgggtctcactctgtcacccaggttggggtgcagtggcatcatgatcctggctcactgcagccttgactgctgaggctgtagcgatccttccacctcaatctcctgagtagctgggaccccaggcacacaccatcacgtgcatcaggccactccttgtcccatctggctaatttttgtatatttttaatagagacagggtttcgccatgttgtccctccaactccttagtgcaagcaattcacctgccttggcctcccagagtgctgagattacaggcatgagagccact

SEQ ID NO: 105347 - DNA, 1036 bp, Homo sapiens
gccgcaataaacatacaggataggatttcactttagtccttaatttgcttatctgcaaagtgagaatcataatatatagtttatatagttggtgagagtgtgtgtatatgtatatatatgtgttaataataagtattttcttaactgtaagccagggcatttcctagagctctcaagttcctttgtggcctcattttcacatgactgtaagaattacccagtgcagtcagctcctcactgttttgcagtgtagctgcaaggctgcacttgagatggttgcccgtgtctcttcagttagctttgccaggattgggcgggatcatatcatctccatggtttccagaagggggctatgggcctggcagaccttctaaagctctacctgtctgctccatctcttgtttcctatctatgcaattatgaatgtgcttctataaaagatgatttaagtatcacgtgtacagttagaaatgcacttcatctgaagtcagctacagtcattgtaagcagaggaaatattgtggttctactttaaaaactgcctgttagtctcagagtgcaaacttgataggtatcactcttcatctagtttctcttccacccattttccttattggcaactatggactaaatgtaaaattaccaccaacaaccaagcatatttacgttagtgaattgatcaacaaaaaactataataactgcttatttgggaaaaagagatgagaaaaaaagaaactcttactgattaatgaattgaccaacaaaaaactataattacttatttggaaaaatgaggtgaggaaaaaagaaacttctacttacagattcttgaattcttgtaatatggaagaggtggttatcagttactgggccaaagtttatattgcatcctgctaaattgccctgtgagcttgtaatatagggtacctggtggctttgtaaatcaggaattggcagtaagatacatatcttataggccaatgaatcccatgaatatctacctgttgcctgattcttttgttgtagaataagatt

SEQ ID NO: 105348 - DNA, 1054 bp, Homo sapiens
ttccacaaagcaatatttttgtgctttgttttcagatggagcttgatagatcagctgatcctcctcctgcaatttgggttgcaacaactaagtctacagtaaataaatgggtaagtgagctattaacctggcaaaggtttataaacatgtattttgttatcacagacctgtagacgccagttgcaaatgctcagtgtggccctaactctagcatgcttttgggcaggggcaaaaacctgaaagccctgtgaatgtaggtagaatcctaaagatcatactaaaattaagataatagtcaaaatgactattctgacttctttgtctggagccaagatacatgttccatgtccttagaatagacactgttgcctggtaaaaccagtaagtcttagtacatcttctgacctcatgaagctacatttgaagataggtagcccaagtaccaacaaggcagggaaactcaccaggattcaaatttggttaaacataagagaaagcagaaaattgtgctttcaaattagttttctttttcctcatagcatgaagaacagggatagagatagaggataaacagaagtcatccaaagtgcaccgttaattcttaaatcttaatttaaaaagacttaagttttcttgcttaccagactatctgtaggtaacaaaagagaaggtgtttgcatttattcctgttgacatgcaggtcaagtgttctttctgtatacttattttttaaatgttgtatatcttgtgttaatttcatcatgccaacttatgaccaatacaattttacctggaagagcactcctgctttcatgcatagttttctctcccaaagacaatattcccttcttaaaatttgtttctttctaaacgatgatagataattgtactgtgaccaaatatttttcggttgatgtagtggttgttgaggttttcttgtttgttttttgactttatttttcttgccactttaaacaggctggcaaagcttgtagagcataacatgatcaaataacaaattttgtaattttagactttgaaaggaattcataat

SEQ ID NO: 105349 - DNA, 1418 bp, Homo sapiens
cagcttgtgggttacagtttgatgtcataggaaatgtcagagtttccaagggacatatgtagactgagaagaaactaagtcatcagtctttcagggatgttgggaaaagaggaagccacaatagtatatgattttaaaaagttgcgggggagtaagaaaatgaagagccagtggcagctccagaactaattgagtgtttcaagaagaagcttgcggttagtggcattaacctgctgtgagttgatttaagatgtgactaacatcatggatttaaataaagagggtggcctctgggtagagtcttaagggcaaaagccaggtagagtgagttgagtagtgatttgaaggtgaagaaacagaaaatttgactggataatctttgaagaaatttgattggaggggtaggcaggaagcggcggaaactagagaagatgtaggagtcagagggccaaaggaagcttttgattttgtttggttttgtttggatatttgggtatttttcagatgtaagaaatttgagcatatttcattgctcctgggaagaagccagtagagacattcatgggtagatgacaatacaaggtcatcccaagaagcaagaggtgagggggaccggagcacagtcagaagggacaccgttttccttgcaccagggagaatgatagagaaagttaaggggattctgtcaaggcttctctttgttttgagaaaaaggaatcagagtcatgtgctgaggataatggggaaggtggcaaggtcagaggtagaagagagatttagttgagatggactgcaagacagtgaccccagggctcaagtctccagtaaatgagggagagtggcaggttgctagatggcagtgaaggaaaggtgtaccgtttactgttgctaaatgacataggcctcagagaaataagtttttacatgggagatggtagagtaatggtctccatggagcatcaaggaacaatgggatgtgggaaaataagcagtccccctttgagaagatggccgacaactgggaccctcgaaagagccacgttgctgttaagatgaggtggtatattatatcaatatcagcacaattaaatacagtttcttcccaaatactattttgtgcttttttaatttaaattttttatagcagcagattgttattttaaaaaaggaccacattctttttgaaatgtattttagactgtttcacttagacacatgtgaaaatatgtaaaattttgaatagcaaagtcagaatcaagtgaattcaccacttaatattgatcattatactttcttttgatgtataggcatgtaaagttgaagatctgggcaaagtggattttgaagatgaaattaagaaaagatttaaaatggtgtatgtgccaaattggttctcagtagacttaaaaacaggggta

SEQ ID NO: 105350 - DNA, 1693 bp, Homo sapiens
aagaaagaaagaataagacatgcttgtcttattcttgagtgcaggattatctatctttctgatagtttcctgagtggttaccagaaatattctgacttccactgtgtgtgaaagtctctgccatgcactgtggcactagctggggacctttactgggtgctttgcttgcacccaggtttcctgtcatcacccaaggactccaagaagcagctgtagtgtatgcctggccttggaatctgggggcctgattttagggcctgctttcccttttagctgagtgagtcattcttccaggctgtacttttatttcctcagctgtcaagtgggggttatcctacatgaaaaccatgagggttcctcccgctaatatttgttgacagtgattttgacatctgtgcttgttgggttacttactacttgatggtttatgtttaggctgctctgccgagattccgggggtgagactgagtctatgcttcttaatgaaacagtgccacaatgggtaattgacatcactgtggatgtaagtatcctccactcccactttgctcttttatttttttgtaactcatgaaattaagaactgctttagacattataattttaaaccttaataaaagctagactcccaagtggaatccccatctgcttccttgcagttccaaagttgcagaaatagtactgataattatttatctatctagctttgttggtttttaattataaaaataatatatgcttattcaacaaaataataaatgaatgaagctctcatcttccccaagcattcattcttgcccattcactccctatccttcctcccagaggtaacaactattaataaattaatgcatagccttcagtacttttttctttgcatacaagcatatattatttgtgtacatagatgtgtctacagttcattttatattgcacaaaatctcttatactgttctgcaacttttttttcacctaaaaaaatgtatcctggacatcttttcatgtctgtacatcttttcatgtctgtacatgtgaatcattcctttttaatgactgtgtaagattctactgtataaatgtaccataatttatttaatcagtcccctattaatggacatttaggttgtttccaatgttttctattacaaatagtgctgcagtgaacatccttgtacatatatctttgtgtgctttttaggataaattcctagaagtggaattgctggatccaaggttatgcacattttaaattttgatagatactgccaaattgccctccacaaaggctgtagtagtctacattctcaccaacagtgtatgagtgcccatttccccacacctgcaccaacactggatacttctaatctttgctaaaaaataggcaaatagtatctcattatttttatgtggattaaaaacaaattaatagtgaggttaagcatcttttcatattggccatttgtttttcttctgtgaattacctgtttgtattctttacccatttttctattgggtcatttttcttactgatttgtggggtggtggtttatattgaatattaaccctttaactattatctgtgtctcaattaaattttcactttgttccttttgccaggtgaaaagttttactttttatataatcaaattgatccttgatggctcttagtttcatgtcttgtttaggtatttcc

SEQ ID NO: 105351 - DNA, 1105 bp, Homo sapiens
tatgccattgcttttttacagagatagactctctgctagtgacatgctccaagtccgaaaagttatggaacatgtttatgaaaaaattatcaacttggataatgagtctcaaaccactagctcttctaataatgaaaaaccaggagaacaggaaaaagaagaagatattgctgtgttggcagaggagaaaattgaacttttgtgccaggaccaggtaagtggacttgaggactacagccccaatttttccagtgctggtgctcataaagagttacatgcctttgggtggggggcttctacttttagaggggctctaaggagccctgggcctctcctacctaaagcccaccctaaagctcctctttactgctggggagattttcagagaagggatacatagacaaatgtggatgtgctggtagcttttttttctgacaagaaaaaagacacatggtcttcttgatttgcaaaaagcatgtgccatgtttatgatttagagtgaaggtgtgcggagaaatggcagaactgttttttaaatcaagatgcactcaaaacgtatcctcagaggaatggctgaaagatggcctggtgtttctggcatagtcacaaaagatgtacatctcactaagctcaatttcattcccgcatgcatggaagccgtgacagcaagaattggataccaggcataggggaggagtgagcaagctggatcacctgatgagagtccctgagttaatgataaggttttagatattagagactttgaaatttttaaatttaattttggctattcaggttttggatccaaatatggaccttcgaacagtgaaacacttcatatggaagagcggtggagacctcaccctccattaccgtcagaagtccacgtgaaggctgggctaatgctcctggatattcatttacgaccttcctctatggccccaagagtagtcctaggaagcccactgatccccaacgggagcaagacttctaacggctgattggtatggaccgagattatctttcaattgaagtgactaatcgagatgtaatatagaaaccagtctccatgtgtagattaagctgtccccagggaagcagagtg

SEQ ID NO: 105352 - DNA, 1530 bp, Homo sapiens
agcgatgctgcacctcccatgatgtcctggctttgtggcaaccccagggaggtgcagcagtttcactccttcctccactgtgtccagttttatttacacaaagcgagctgagaccacaggttcttgctctggatgagcagcatgacaccatcaaaatttaagaccatgatgaaatttcagtttcattcaaatgttacctaaaatttatggtgtcagaataaagggagatcatagtgagttaatttgatattcatatcctggaagtatacatatttgtttttccaaagttttatatgcaggtttttgttgtacctgtatccagatcttcttttcactgttctaacaatctaacactttcatagaatcatttggatcttgtatagagtgtaacttattggggataaacacttcaacttttggcagaaaatactttggattctccccaaggtcatttgtattcagagtaaatcagtggtccacccccataaaactgtaagacaagcctcctgtatgaagccagaagcacaagtgccttcagagggcagttgattccagtccagttgcctccctagcttgtgtgtggcctgcctccaccatagcagggactagggagggaggcagggaacgttttttcttttctacatcttcacaggttcggctgggggcagctgataggcctaaggccataccttactatttaagatactctgatcgcacaactgcagagacagggttccctcactgctagtcagcttcttttggaaactggacaggccattgccacctgcactttgaagaagtgagcaaagacgtggccacatttctaataagttgaaatggtctttctcccttcctcagagagcaaccagcttctttttttttaaaagtcctttctatctgttggatacaacagtgtgcttttggtgcacattttttagcaatagttgtgaattaatggcaaagaaaaaaaaaattatttaccagccctcagttgtgtttgcccgaggggcctttgagcaaagaaatgggttttgctgggtcattttgccctgtgtgctaagccttgggtggctgcattcccctcctgtcatagatctgacccccagcatgattgtatttctttcccctccagtcaaaccgtaatacagtttccagaaaattcgacagtctgcaatgccaaaagggtaaaaatctgtatttcacagttgtatagaataaaggctttagttaaaatatttcaaagtgtagtacacatttattttcatttgttattttctttcatagcagattacagagaaagaaagaaacctctggtttcatgttctccctggaaatattagcattgatacccattttatcctccaacttatgggggaagggaaagtaaaagtgagggagggaagagccagaacctttgggtgagggcaactttgggtcagactgccaggctacagagttaagggaagctggccccagaacagtcctgtggcgattctgttctacttcctgcattccagcagacttgacact

SEQ ID NO: 105353 - DNA, 1123 bp, Homo sapiens
tcctcagcctgatcttctgtgttgcaggtgaggctacatggtctgggtcagagtttgaggtctccttcctggacagcccaggtgcccaagcccaggcggaccacctgcctcagctgactcttcctgacagtctcacctctgcagcctcaccagaagatgggctgtccgccgagctgcttgaagctcaggctgaggaggaaccagcaagcacagagggcctagatactgggacggaggctgaggggctggacagccaggcccagatctctaccacagaataacaccctgggctgtgacaaggcccatgatgacatttcatgaggcccagatgtgggcaggcagcccgggctgcactatgcggtcaggattccttgctgctttggtgggacatgaggcctcagtgggtggtgagagggggccatgggccttgtgggaggatatcttttggccgtgtaccctcaggtccagtgcttggtcctgctctggtcactggggcttcccaggaggcagcagggtctggtcataatccagtgtgaagatgaggtgaggaaggaaggggttgctgtccagtgttggcctggtcgctttgattcttcctgcacagctcagcccaccccatctgtactggaagggaccctggagccctgggaccaccccctttcaagtcccaaacactgagtcctctgtcatgtgtccttgtccctaggctacaatgctacacttggctcaggctgatcaccatgctagtcacaggagggagagagaggcagtgtacttgcccccatctcctggagggaggtgcgttggaaattctaggcccttcagcagagacccatttgtgcccagaccacaatatttcttcttcctcagggactacatgccacagacctgtatccccagtggcaactcctgttagctcccaaacttaaacagtgatctcttctaaatatacaaggcatctacccagccccaatagtgaataaaagtcacaaatttaagttcaacaccctaagcaatttctcaaagccagtctacctgactaggtctatccacgcacggttcccaaccccaagggggaattaggggattagattaagagtaggtaaagacccttttgttcttt

SEQ ID NO: 105354 - DNA, 1051 bp, Homo sapiens
atcctcgaggagagcgtttgcagctggggagggtcccagcctttagatgccgctacatggaggtctgggcgagcaggcttccggagagtggagacggagtggggttcctagaacggagtgtgctgtgagggtgaggagagggtcccgcagccggatggagatttgtgcctgcggtgagggaagggctataatgtaggtgagaggggctgggggtctctgaccccggagcgctgcggggaagaggcgtccctgcaccccccctttccctagtgaaaggcagctggatgcagagatgagtggagacaggcaagcttgtcggtttgtgtgttttgaaggtagggtctgttgccagctaaccacatgagagggctaaaagtttcttaacgtgaaaaccaggctggcttggagaacccagagttgacaggatttgtgcttgggaatgggctttcttatggtgagacaccaaacagcaagcgtggacagtggaatgcatccagccaggagcgtcttccaacaggtttgattaaaggcaaaggaactcaggatattggcaagaggaggggtggggcgatgatgggagcttcgaagacgggaggggcctgcctgatggagagggacaaattggagagggaccagggatcagaggttgtcagtcacaaaaacaaagttttgagctcctactctggcaggcagaattctaaggctctagagataaagcagtgaacagaacaaacatggtccctgttctggagctgacatttggatgatggtagggaaagaagggaaatgaaaaaatacatggtaggtggtaattaccagtgataaaaataaagcaggttaaggggatacagaatggtgagtgggtgctatttttgatagagtggtcaggaagggcctcttctcaagtcacattcgaacagatgcttctgaaggaagtaaagagtggacaatacagatatttaggggaatagtagtattccaggcagaaggaccagcttgtgcagaggccccgaggtaggttgtgcttgtgtgtttgaggaaatgccaggtg

SEQ ID NO: 105355 - DNA, 1238 bp, Homo sapiens
cctctgcaccagccagacctgtctgacctgtccctggcagctcagctgggcagcaggccagaggagtaggccacaccctgctctggggagccccagtctgggggcctgagaaaggttgacttcccccttaggaatgatagtgatttgtacaagagctggaaggaggaaccgccagaggagaactgatttgggtctccttgctctaattctctgccttggtctgtactgggctcactcatctctttggcttaactggtaagagcacagagccagaatgctgggcttgaatctcagattttctgctacctagtgaggtgatttgtgcaaattactccctctgtgcctgggtgtcctcaatactacatgcaaacagtaacactactcacctcataaacttgtttatttcatatttacaaagcccttaaagagtgcctggaacatgcaagtcctgtgtatgtttgcaacttgcattgattttcatgtttctgccattctttctctgaatgtttaatcctttttttgcctgtcctgtcacccttcaggtatctgtctcttgcctctggacatgcatggtcatgaccacatggccatatcagtgccattagaggactcatagtttggagtctggcctatggtgcggcagtatgtccctgtaaccagcttaactaggaataggcttctcaggttagagtaccctggtacattgagttgtcctgtctcttcttcactggtgcctagacacccttctgtagcgattacttcagcaagcacaatccaaaacctgggttcttcaagggttcccagggtcactctgattggcctggtggtctgggtggcagccctcagctccagtactctggcaggaagtcccaacaggcttccaccacatggactcagcccatggctggactgaggcctgcctactcccatctagggccacagggttcttagtttttgtttctctgtttttagataaatgaagacaatctaggttttacagcaaaaacatgattaatgtacaatccctttacaggatcattctccatatagatagacctgtcaacaaacctgtcccaacaaaactgggttgtaaagcagatcacagaaaggggactgggttttcccgtaggaaaaatggtagtaacctggagaaagcattccagatccccagctcatatcaacaaaccatgtatgtgatcagcagtgtgttataaaaacaaggctcagcaccatccgag

SEQ ID NO: 105356 - DNA, 2879 bp, Homo sapiens
aagcccatgtccatgtctgtgcttcttacatccctctttcctgtggatgcagctttcggcagctggggtaccccaggcagaggcagggctgccacctgtggtggatgccattgatgacgcctctgtggaggaggacttggcagtcgctgtggcaggtggccggttggaagaagtgagcttcctacagccctacccagcccggcgacgtcgagctctgctgagggcttcaggtgtgcgaaggatcgatcgggaggagaagcgggagctgcaggcactgcgccaatcccgggaggattgtggctgtcactgcgataggatctgcgaccctgagacctgcagctgcagcctggcaggcatcaagtgccaggtgtggtggctggactgggatggggatcctgagcgtggggacttctttgcactccacagaaccctcacttgtacctctacttttctctgcagatggaccacacagcattcccctgtggctgctgcagggagggctgtgagaaccccatgggccgtgtggaatttaatcaggcaagagttcagacccatttcatccacacactcacccgcctgcagttggaacaggaggctgagagctttagggagctggaggcccctgcccagggcagcccacccagccctggtgaggaggccctggtccctactttcccactggccaagccccccatgaacaatgagctgggagacaacagctgcagcagcgacatgactgattcttctacagcatcttcatcagcatcgggcactagtgaggctcctgactgccccacccacccaggcctgcctggccctggcttccagcctggcgttgatgatgacagcctggcacgcatcttgagtttcagtgactctgacttcggtggggaggaggaggaagaggaggaagggagcgtggggaacctggacaacctcagctgcttccatccagctgacatctttggtactagtgaccctggtggcctggccagctggacccacagctattctggctgtagcttcacatcaggcgtcctggatgagaatgccaacctggatgccagctgcttcctaaatggtggccttgaagggtcaagggaaggcagccttcctggcacctcagtgccacccagcatggacgctggccggagtagctcagtggatctcagcttgtcttcttgtgactcctttgagttactccaggctctgccagattatagtctggggcctcactacacatcacagaaggtgtctgacagcctggacaacatcgaggcacctcacttccccctgcctggcctgtctccacctggggatgccagcagttgcttcctggagtccctcatgggcttctccgagccagccgccgaagccctagatccctttattgacagccagtttgaggacactgtcccagcatctctaatggagcctgtgccggtgtgaggaccaggatgtcttttcccagccccaagagacctgttgctgctttcttgtaattatggggctccccagagtctgcgtaacagtctcccactggctggctcacccacaggtgccatgtgcacactcctggttttcaaacaattctctggatttatttatttgttttaacttttctgtgctgaagagaggactggggggagggggcttcccctttcagctgcccggccccccacacccacagcttgctcttctatctccacaacgtgagcctggaagaggagaaaatgtggctcctctggagcttggcagaccacttttcggtctttgcgtgatgttccttagcccaaagacggtgagacagggctgaaatcaggtggcttctgccaccctgagccctagacccatgggtggctaaatccactggactgtgaagactataatttatttccataatttatttggagattgaggaggctttggttgcacttctttggctggtgggtaatgccaggggtggggtgggcacaggccctcaagagccccttttgccttgtagtcctacaccttgccctgcctgggctttggtgcagactaggtgtggatttgagctctgtgatctatgtctgctgcctggctcctagatggctctgtgggcaggtgctggccaaggacatcatctaggcagggggagagcctgggctgaacagctgtgaccaaaactcccttctgccccaccctgccccctccacttcctgccctctgttccatcttcccccttcccaaaggccacagcctttattccaggcccagggatgtaggagggggaaggaggaaacaggaagcccagagagggcaaagggcctacctcggggcgcgaaccatgccccagactattatctcagggctttctgggcactgcacttcagcgtggcccacctgcccatgccctgaggccagttggcgaggggtggctcctgagggtttttataccctttgtttgctaatgtttaattttgcatcataatttctacattgtccctgagtgtcagaactataatttattccatttctctctgtgtctgtgccaagaaacgcaggctctgggcctgccccttgcccaggaggccttgccagcctgtgtgcttgtgggaacaccttgtacctgagcttacaggtaccaataaagaggctttatttttagcaatgtggtatgtatttgtggggtgggaagcaggggcaaaggggatgggggacaagccctgcagaggggagtatggacacaggctgtgttgaggggtaggagtaggcacacccagcatattgggcctctttccaggcaagccagtcaagttggaggcaggaagccagctgagaggctggccaggcagatagagcagtttttcctttggagtaacctgttcctctacagt

SEQ ID NO: 105357 - DNA, 1180 bp, Homo sapiens
cctaagactggcttgggttgaggcctggggcactggtaggactgctgaggtggacagaggagttgctgtgacgttttcaagccccgcccccacttctcaaaaacagcctttggttacttggtgcccaggggtgaggtggcctttcctggatttgcacagtgtgacctgagcgtgtggataactgtggccagttgagtggggggttgtcagtgcctgtgtgtggtggcaggagggctgcctgattgtcagggctcagatcccagaagaagcctggctctcagattcagggcctgtctctggggttcctcggcggtgtggtatttctgtctgagccagctcctgggaactgcttttccttcctccaggaccctagggagggggctgtgctcaccctgggaacactgccatggtcaggatcttgattcctgggtagctgctgagggcccctccccccacctctgactcactgtctgacacttttcttagattctcactatgtttcattccctcttggcctctccttgtctctggctcagtctttttgtttcatctcctgcctctgcctcttagcctctggattccgaggtggaacagaggaacatgagaaccaggggcacttcccccgcctctccagaggagtatcagggaggaggtaatttctcatttcattcccgctctgcagatttggaggggattgttcatcactagaacctgcagcatgaccgtagcttccctgtgtctctgtttccctgtctgtaggcttggaggtcataacctcctcaccttaagttctctttctgtggcgatcccttaggcagagccgcagtgcgtatctgagcctgctttcctgacatctctctccatctgtttcctcttgggggaccagggagcctcctgggattgcctacattggcacctgcctgcagcctgagcttccctctcctgccaccagagccaccctttttgagcaccattcttgcttgtaccctctggcacagctgggggatagacatgtgactctcctcctgcccctcttaaattaactgtgacaggagcaggagaaggtcacactgaccagtcgccctcagcagcctcatgtgggtaagattgcctgtgcagttgggtctatacccgatatgcagggctggtctgcttacctctggtattatcaggtgccttc

SEQ ID NO: 105358 - DNA, 1043 bp, Homo sapiens
ggcaagtgtgtggagaactgttgaccaagtttccattttggacatgttgaatttgagatgcctgtgggccatttgagggaagacaaggagacattagcagagtctggggagaggccagcctgggctggagatgtgggcattaccagcatgtgtgtgaagcctggatatgggtgaggttactctgaaaggagataagaggagcagtcctatgtgaagggcaggccaaagaagagaaggagagagaaaccagaaactgtgaggagaggcactcagctatatggcatgtaccagagaggccaagtaagataagggcagggacaggaacggggtcctggggtgcagcaggtgcttggtgagccctcagaggctgtgttagtggaggagatttagctggatagcaaactgggggggcctgcggagggactggcacagagcaagtggagatggtgtagcgtcaggctggaaagatggatgctttggagcctgttgcctggcagaagaggagatgccagtgggagcgagagacccagtgtgtgaagaaggggggctcattaatgccacaaagtcttggggagagactagaaacacagaactcatgagaatattggttggcagaagagcaggacacctcttggggagagggagttgatgtagatacagacttgctaaaatacgcacaccttacttggttttacctgttgtcttatcagaccaccctttggtacttcagaagttattgcatcgtggttgtaaactccagtttttaatgaccttagttccccccaccccctgcctccaacagtcttatgaggaattccagttataactggcttctttggtggaatttgagatacactctcttctctgttaagcaaatactgcagattacaaatatttcagttccaggtaagtagttatgtgatgtgtaatggaaactttatatatattcatcttaatgttttagggccacaatgtgtcatttatttaaaaaataatagtgcaaatgccacttaataagggaagaggtctttggggatgaattt

SEQ ID NO: 105359 - DNA, 1036 bp, Homo sapiens
gtgggatggtacctccacaccagcatttctttgctcaaaggctttttctggccttagggactcacgccaaggaattagtgcccagcccaaacccaaatcagaaatccatacactgatttctctattatcccagtaatgtacttcagagtaattttgtgttttgttttcaagagtataggccagttatataactcactgtaggtttatttgcagtttctttgtgattagatttagttctacatttttagcaaggagaccacagaagtgatgttgatttcctaacccacagcactgtgcatttccaaacccacagagtcctcaaccactgaaagatgagagttggtgtttaaaatcccatgtccctccccactcagttggagggataactctgaggtgtgttctacaccgattcccagagttccccagtgggattaagttgcccacagcagaaactggttttataacatcgtttattgactgccttctctcctatctcatgtcccccacttccctattggtgttccttccacaccttaaacaaagcacttgcatgcgaatcatcttggggtcttttgggaaaacccagctaagataatacttaaagtgtttggtctttgattttcttttctccctgaccttctctgcagtccattgtgagatgtgtccctggcgttggaatctactttggcactctctactctttgaagcagtatttcttgcgaggccatcccccaaccgccctggagtcagtcatgctgggggtgggctctcgctctgttgcaggggtctgtatgtcacctatcactgtaatcaagacgcgctatgaggtgagttcaaccactttagggcctcaggatagttcggcttagccactgggctcctggggagtgaccaccgatgtcaactcctgatttgtaatctaacatagagtctgatgtggtcagacaagccatatgtgaactagatcccatggtaatgccccataacctgcagtctgcttgttcagtgctgaaatgcagcgcctccatgcgagtca

SEQ ID NO: 105360 - DNA, 2469 bp, Homo sapiens
gatatatagtagaaaaacaagcctgtcttttttaatgtatgcaggaaatctctggagaagtaagagaggttaaggaaagctgggtatgtgcctgctttacatggagtagtagtgattaagttggccagtgcccagaagtgcttactgggtgccaggattgttgctgtggaatatcgagtaccactaacttttaaattcttcaaagagggctgtgctgaagtttgctgctgccactggagccactccaattgctggccgcttcactcctggaaccttcactaaccagatccaggcagccttccgggagccacggcttcttgtggttactgaccccagggctgaccaccagcctctcacggaggcatcttatgttaacctacctaccattgcgctgtgtaacacagattctcctctgcgctatgtggacattgccatcccatgcaacaacaaggtaatgattttaggatctagagtttgtgaatgcgtgctctagaaaaaacattcctgtgcacattgttagagcttggagttgaggctactgactggccgatgaactcgcaagtgtaggtagtgtgctacatgaggggcaagttttcgctaacaccacaagggtctctggcccaatgagtggagtttgatagtaattcttgctacaagtataacattactgcatgacagctttgtggagaaatgaaaacatttggaaaatagtgtgttcttctgcctttgtccatgtttcttgctcaggcctcaggcacttggcctttgttttcacaccaacttgatgggttctactataagatgctaaaaaggtgggttgtgtgtggttcagattggttgatttgtaaccctagttgtgcataagaattgcccagatattttttttaaatgccagtgtccaggcatttttttttcaatccctatgattccagtgtgcagacaaggttgaaaatccctatttataatgctccctgttacaattgcttttcaactaagagatgtctgtacttttggtacctagatgatgtaagagccaggaaggtgcttgctgtttgggtttgaccaagtgtcactttttaataatctgccactcttggcagggagctcactcagtgggtttgatgtggtggatgctggctcgggaagttctgcgcatgcgtggcaccatttcccgtgaacacccatgggaggtcatgcctgatctgtacttctacagagatcctgaagaggtaagcttctccaaaggcttgtggttacataagcaaattggacgacttggactgtgcttctaggaagcaaaacttgtcagtccctgtaagtctttcctcttttttttttgtaacccagattgaaaaagaagagcaggctgctgctgagaaggcagtgaccaaggaggaatttcagggtgaatggactgctcccgctcctgagttcactgctactcagcctgaggttgcagactggtctgaaggtgtacaggtgccctctgtgcctattcagcaattccctactggtatgtatcaggatagaggtgaatcaagctgatattttgcaacttctcagttttattctaactttaatgatctctgtgacttttatactagctttaagaggttttcattccagtgtgctacagcatctgatagactgctgttgggagtggggtaaggaaaaatactacattgaggacagagctgatggctttttttggtattctcttaacagaagactggagcgctcagcctgccacggaagactggtctgcagctcccactgctcaggccactgaatgggtaggagcaaccactgactggtcttaagctgttcttgcataggctcttaagcagcatggaaaaatggttgatggaaaataaacatcagtttctaaaagttgtcttcatttagtttgctttttactccagatcagaatacctgggattgcatatcaaagcataataataaatacatgtctcgacatgagttgtacttctaaagcccactgtagatagtgtatattgcttttcacttcagaatttccctgagcttccttcctgtgtggagaacatgtgtgctgtgaaaatagatgtaagtggttacacatacttagttggtaacctcaggaatacttttccgaggccctgatgatcttgcttttattaccatttgcgtaggtaagttctatagagcttaggtttttatttttgagagtcttcctgtcacttaggttaactattcctggaagccctggagaggcgatggtccttccccacattgagagacattaattgcccctcttgtcagcttgcctacaggttctgggagaggagaggtatgtatgtatttaaaaatgtgatgttctccatatttgtctttgccggggagggggttggggagacagtctttccctgttgcccaggctggagtacagtggcgtgatctcagttcactgcaacctctgcctcctgggtt

SEQ ID NO: 105361 - DNA, 1880 bp, Homo sapiens
gctgggtagctaaaacctggatagaatccagtggtcttcttgcttgaagaacgagaagtaatttgaagcaatttaattaaaatcacctataggcccctctggcacccattggtaatcatctcaaacaaggaaacaaatacatttcttgtccctgttcacacgtgtacaaagatgataatgtgaacccgatcttgttcaaggataaaggacatctttgtgaaatgactgagcacaaggtatagcatgtggcaatgaatgtttccttcctttctcctcttccttctcaagaaacagtaataatactctcagaattcagatttcattctcaaattcctctgttggtctcttatctggacttaatattgtctaataaaacctaaaagaaggttgtctgtctgtgaataatggtctcataaatattaccaagcagagagccttcaaacatgatgaaatctcaaggtccaagtcattgctagaaaaaaaaaaaaaaaaaagcatggaggaatttagtagaacaaaatagctttgggggaatatttaatactcaaagggaaaaggaacttgtaactgcttgaagaaatagacagcaaaggcttctccttttatgcagacacaggactgggactggcaggcttaagacatttagccttgggacatccatggatgatttaaaaatgggcccagccctaggctgggcgggatggctcatacctataatcccagcactttgggaggctgaggcaggaagatagcttgaggccatgagttcaagaccagcttgggtgatataatgagacttcatctcttcaaaaaaatttttttaacttagctcagtgtggtggtgcgtgcctatagtctcagcaactctggagtttggggcaggaggatcacttgagcccaggagatggaggtttcagtgagccaagatcatgtcactgcgcaccagtctgggtaacagtgagatgctgtctcagaaaaataaaaaccaaaaagggtggtccctggtcctccatgacctgtggccatcaccacaaccaggccttcatcataattctatttttcttgcttgtttttatgtctttgtatgcaacttgtgggggtttaaaaagctgccttgtgccacctcagttgtggctaaatcttagtggttaaggacacagcccagtggtgtctgtcaaagcctttggaagaaaagttctcggttaaagtgaacacgactgagtaatctaagtctgatgtagagaaaccctacacaggagttggattttgagggtcaggacatctcaggaccttcacaggctcatataatctttgttccaagtcattgaggtcagccgttcatcctcggtggtccagccataaacacatagcctgtggggtaagaacttggctgtggagctgcaaggcctttttagcactcatccttaatcagtactgggaagagcccatgtgaggtaaagcaggggcagaaagtcctaggctaaattctctccaaggagctcactttctgtaggagggaggtggggtggtgagaaatataaggtggtgagaaggttgattttattctttttagggcctgagtcctgagctttttttctcagaagaacaagctctggagcactgcagagggggatttattgtaaaattgatttccctttagttaatatctgaatgcaaagacaagcatgggaagagcatttctcaagaccttaccttgattgttcctccagcatcattttcaggcttcagaagttcctgtgtcataaggatcaactggagagaaagttggttctgtgagtcagccctggagtggcttgaacctgagaaggggaggagatgggaagacggactttcccagctctcatcagaccatgctgtat

SEQ ID NO: 105362 - DNA, 1017 bp, Homo sapiens
tatctttgtttcgctctttgtttaaactttctttggcttttgtttggtctttctttagccttttgtttaaactttgtgtggcctttttgtagtctttgtgtagcttttgtttttaagtggatcttcgctgaggactcatcaaaaacaccttgtgtaatgaaaaacccagatctataacctctccctatatattctgcatgcattgaagtaggctcaaaccctcagggacctggtatagacgcagaatctgtttcacacaacaactgctatttgaaggtaagaggattccattggtttttattttacttcattttatactttcatctttaaatgacaagtgtacttttttgtatgggccatttcattatatcccagggaaaactttctgtaagaatagtcaagattgagaggacatacaaggatggagaaaacaagaacagaggacaccatgtttattctgatgtgggcagggggcctcctggaatgttcctgctaatgtttggaaatcgtctgagcccagagagaggctctgagcccttactcagatttcctcagattcaaagccccatgttcctggagctagatggatggtagtacatgctgctgctgctgctgcttttttttttttaatttatttcttcttttattatttgtcatgatttaaaaatgagtttttcttcttatctaggaacaatttttttcctcatacagttggatttatgtgtgggggatcttaatggaacaacaaagcccaaatcttttcggaattctgccccctgtagaccaacaaccttaaatggaaaggcgctaatgctttgtctgatacagaatatcttagaaacaacagggagttttcagttctatggatgacagagaaaggaaaaaatattatgtgtcagggaggcgagtaatgaacttggcctacagtactagcaggaaaacggggaaaggactttttaattctttgtgaataaatcagggaggcagagagcaggctgctgccaggtgtgcggatat

SEQ ID NO: 105363 - DNA, 1097 bp, Homo sapiens
agaccagctgggcccgcctgtccccttggcctgtagaaaattgtgggaatattcatccacatacaattccagggtaaatttgagtgtccataaactaaaaccatgtattgtataattttagatacaagaaactgaagggtatcatgttatttacataacattcagaaaactactgcacttcttgaatgtttatctggccccactacaataagtgaaggttttactcctgaaataattgctaaataaattatctgtgtgctaaagataacaaccgtaggtcacaccctttcctttcccttagaatagctggaagcaggtagagtttgttcatcagaaaggacttttgcacaactttatgagatagttgcaggtgggcagtgtggttcttggaccacattagtttgtccttgttgcctaaaacaaagcaaaacaatgagggcatttaacatggctttgttttgtgtccccacatgggccttcaaaataattaaggactctcttatgttttcattttttcatagtcttggcaggtccccacaacagtattagattttgacatcttgctgctttctgtggaaaagcacccagattccaaataaatatgtgtatgaaattttccattacctggcactggtttgtcaccaacaatctactgttcaacatttattgtactaatttgtaaacataatagttgtcacggagacaaatggataaacaaggacagacagataatgacatccttagagacagcatgtagtagttacagccaaccttggggtcctacatttttgtgtttttgctgctgtggactgatgaacacagaagccattgttttttactgtgtaaatctacactcagaagaaagggtcgtcagccgctggcctgagaggattagcaaggttttagagactaaggtctctacgggagctggtgaatgtggaatgaaattactctttgggaaacatggatgatttttatcacagctaaggagttggggctgagcagtttttggaaggctgtggttaggcatatgtgaaaacctgggccggtaatggaatctttggacccccagttattattccaaaatagctcttgta

SEQ ID NO: 105364 - DNA, 1119 bp, Homo sapiens
gccagagcccttacccttctcactgtgccagactgactgcaagtgtatttatagggctcattcagtcaacatcatcagccaggccctgagtgaggccctggggggatgagtgtaagattctctgaccctgacttatgcacactccatccagcaaggaagatggacaagtaagtgatgatcagcaaagatgtccaaattatagcagtggaagtatcaagggagctcacagaaagggcgaccatctgctcagcaagaagtgtgaaggctcttaagtcagagggctatgccaggaccccttatcactgccaataatgatgactctttagactctgcttccacaaaataccccacatcaatcaccctgacaaacccaaaacaggaaaataacaggtcactagtacacaaaagtcatgtcctatataaaatgctctagtcatcgtattgtagcacagctttgaaaggttaaattataaagactgcccacatagctgaatagaggaaacagataattcagggccatgtagggtttgagaagaaagtgccatagtctttggtccacacatggacaactaccacatgactgttcttcaagatgttaactccctccaagactgagattgtccccaaatgtgaactgaaattgaatccaccttgtaaatccaatccctagagctttggtaaccatctctcataaccattaagatgacattaggcaattttgaacaattaccaccatagtaattctaatagtatttaggacctctgtgattttttacatccaaagaatgctcgtgccaattttctattttgatgatacagtacatcagtcaataggccatgaggaaagttgagccatatcttgaaataaggatataaagaaagcacaggaataaactaacaacctaacctaagcatcttgtgttattaggcttgggccttcaggctgtaatcccttgtaataagccagagagccaatttggcaagaatttaatcttgttaaaatatttctctaaaaattaaatgttttgaacaaaatagcagttcgaaacatatacaaaaaataggcatacagattgaaaagaaaaatatcaaaccgtctctattcaaagacaacataat

SEQ ID NO: 105365 - DNA, 1203 bp, Homo sapiens
atttttggccagagactaccagaattaagaaattaaagagaaggattttgcagaataacctcaaaggtagtctcaaaatccacaattatactaactgaacacagagaaagagagagagtatacatcacctacctatgtcatgtgtttttctttttctctttgtaaaccagattgaaaaggaagatcaggccaaccccaaagaagaagtgaccaaggaggagtttaaactgaatgaacaacctcggctcctggactcattgcttcacaacccatctacccctggatgaagttatctggcttcaaatattatgcaggggcaaacacctgctgatgtggcaactgctgatgctcatggtccccatggcatgggggcctcagggcagcctgcctggaggtgagcagggctatctctgtgtgttgtactccagtcagggggttccagcagcacccgcaggctctagagctcaatgcacagttctttttgtttcacctgcagtcctttcttctccaggatatgcacaggcctccagggtctttcatggctcagggtcagggtggctcaagtgccaacccacatgttgtcctccaaatattcccttctatccctggcatgctgttgctgagctcaacttttaatttttgactttctcctttgtaattaatctctatctgggtttctctctttctctgtgccatttggtttccttaattagttccctgtgccagcccatagtcagagccataattggctctggggaagatccaagttattttctgagtaagatattaggcttccatatgatccagagatgcaaagaaatccctagagagtgtaggagttgtctaaatccatgtgtcagatgtagccaacgaattatgtcagaagcagagagaaaaggcctgaaaagcagctctctcccactcctcaggcccttgtctccaaccttacatgaggctttttgaacatctcctcctggcccagctggggtgagagcaagtcctcgaaggcactgcctttgagccttgctcagcccatctgaactatcccaactctagaattgactgctttcgaattgtgtgaccttgggaatgttatctggcttcaaccacaatgccctacccccagctcctctcccaaatgatcctagatacagggctgcttccccccgaccctaccccacctcgggacacaggctcatggcc

SEQ ID NO: 105366 - DNA, 1142 bp, Homo sapiens
tgtggctgagctctgaggttggccagtgttgttaatactggttgatagtccaaaaaattataccatagagtttatatttgcattaagtcatatgcacagcccattgtccttagtacatttaataacattttccccatcatcacaatatacattatatgaacaaaataaagcataatctttatctgagaaagtagataaagaaccattatttccttatatgaagcccttttgttcagtcacctttaagccattctgtgtgcttagaccagtgcttcatgttaggatacaacaatgaatatgatcaattcttgctctgtgaaaatgacctgtgggaaggggccgggggtatggagcctttttggatgatgaaagcaagcccagaacctgggacagacctccagccaagggcggggctgaagggatccgagaagatttgttagaggaggaatttttgggccaagccttggggtccgtgggaaccagctcagttatggagcaagagtctaggagggaggaggaatgagattgcaggcatgaaagaatcaaacaatttgttgcaactggggcatgggatgtgaatgatgcatgggaggcagtgtgaggcaggtgggaagggcgagggctttgtgtgccatggtaaacagcttagaacttatcccagagcccctgaagaatttaagcagaagagcttgaacaatcgttttactcatcattcccttttagaaatgctctttgttctgtttcctgtctaggacatagtgtgatggacaccttggctgtggccctacgggtggctgaagaggccattgaggaagcaatttccaaagcagaggcatatggggacagcctggtagggcccctcctgctcctctctgtggggggaggtgtgggttggggtccttgctgccaggagaaagtgcaggttgtcaggaaatcaatgtcccagcagctctgactagagcaaggccctccctctgcttttgtggtcaggactctcctggcaaagtgactgccaagtcaccccaaatccacccacagcacacagccattctcttccctcctcaggacaagcaaaatgaggccagttacctgcgggaccacaaggaggagctaactgaggaactggccacgacaatcctgca

SEQ ID NO: 105367 - DNA, 1014 bp, Homo sapiens
agtcccactgccacaatagaaggctcaactgttgtgtttttgtttgtttggtgtttgttttgctttgttttatggtgagcatttatcttaatatttctggaccaagattggaggttgagagaatactgggaggagggtcaacaattattgtgactacttagaaaaggtagagagtgaatggatctccagatgcactcgtgagccttatatttaataaaaaaaatttcgccattcatttactggcaacaaacagacttcgattgccttttagtgttgtgggttttcatctttttctgtatcttcccacacagttttggtggaaattttgtgtgaaagatgtttgccagataccattttgaaatggaaacctgctgattttttgttgattgagacttcaggatcacaggaggctgttattttaatttcctccaatgtttcatttttggttatactcattagtgaaacttgttttcttggggtaaactttctcctgcctagcattctaggttctaattattctttaaaaatatggtaagagtcttgccatagtgagaaactaccagttctttataactaaccatctgtaaatattcatttatttaataggtgtatgccttgctccagaaataatttaaagtggcttacataaatatgaacaggagaaaataaaataaaaacataacgatgaaaaggaggacaaagggaaaaccagagtaggaaagataagatgaagccaggagtaatgatagttcacaaaattgatggaatgaatcttaggcaagagataccaaaaatttgtctctgagttactagaggacaataaaaggagagtgacatgagcagctcctgaagtcatggaagctctagtagaacaataaatccattccttaaaggatgctgctttcggagctgaaatccaagagaaactcatcctgtggatccttgtggagaggatggagaccacagcagcccctgctctaaactactcccatggattcacactctgggggttgc

SEQ ID NO: 105368 - DNA, 1597 bp, Homo sapiens
gtcactggccagtggttcagtcttctctgcttgcgtagcaatttgttaaattacgcctcttgatatatatgtaatctactttttttttggcaaggcacagttacggttaaatgattaaggtgggcgtattcgaatgtttatgttttcatcagaatgtaatcgagatgacgcacatttttatagcggctacaatattaaggttttctaaatctttttctcattagaggaccatattgaacgataacattatttatctataacagcgtttttctacaatggacatagctgttcaaatgtttctctttttgtgagagtatcttgggggttttattaatactccacccccatctccattcctaccggcaaaaacagcaaaggcactagaaccttcattgatgactgtctggattggtagtataatgtatttctggaaagtacttcttaaaaaatatttttctactttggattttttttttttttttatccattcgcagacccctttgctgatgcaactaagggtgacgacttactcccggcagggactgaggattacattcatataagaatccagcaacggaacggcagaaagacactgactactgttcagggcattgcagatgattatgacaaaaagaaacttgtgaaagctttcaaaaaggtaaagggattaggaagaaaggattagagttactgatgcacacctctgaactggattatgattcacacctttatatcggcgtggatgaaaataactagaccaagaaagttgttctcatttttgtaattaacatgtaaatatttagttattctcccagtgtggtctctcattttaaaagaagattcgcgttgcttttaaataaatttaaatgtgaaatatttagttcttgatgttacacataaaatcatttcctggtttacaaattaatttggaaggattgtggattataggagacaaaatctgtttctctaaatatgatctagcttactgaaatggctaattctgttcatacggtgaaataaaacctcatagtagttgactaaattttgttgtatatttatgcacttttccagaaatttgcctgtaatggtactgtgattgaacatcctgaatacggagaggttattcagcttcaaggtgaccaaagaaaaaacatctgccagtttctcttggaggtgagtgattgggtgctttatgtgtaaccttgagattgcttttaaaattgtatttaaaggcaacatgatttgttttctactaagtaaaaaatcatacgaatgaaggaaattaggtgaaataaagacatggtagttatttggaaagcaaagacctttatctggtttattttgtcattagagtattctgatcatttctttatatacacacacaggctatttcttggcatgtaaagtattcaaatacgtgttgaattgttggctatcagcagtgcatgccacagacaacagtgttgcagtaagctgttgatagtgattctttttaattactcttccatgttttcttaatgaatttttatatttctcagagttattttgctaaattagattttattttacaggttggcattgtaaaggaggaacagct

SEQ ID NO: 105369 - DNA, 1072 bp, Homo sapiens
actgaatatttagggtgtgtgtatgcaaattccagactgtgtttctcaacaagcgacaatttaggagtcttgattgttttctagcttaatcattcattccctggaggctgtaaacagaagtctctgtttacatttaaattaaattccttctaacagcaccgtggtagatagtagctgaggtgctttatatatccccagggcaagaccatgaaaacattgttgtctctcccaggtaaagaaaaatggcaattgatttatatgaattgtaataataaatgtttggctagattaatttctggatcacatttgagtgatgacaaaatcaaacctgtcagctggtgctttaatgatgactgcaacttaaacctttataatgcatgtaaactgctaggagccttccagttgtttaagtggccacaagggggtgataaaggactgcatacttacagaaatccgtcccccttcaatttcttctgtaatagcatcattcactgggtaccctatatttcgtttcgacatacttcatctaccaagtgggctgttactggttcccattcagtgtgtctggccactcatttactattcttcctgatgctagtattgggctaagcttttctgcgttttttaacaagtcaatggcagtgatgcactaagagtggatgtttatgggggtgggccttttctttttcttttttctttttttttttaactttaattttgagacacagtcttgctctgtcgcccaggctgggtacagtgatgtgatctcggctcactacaacctccgcctccctggtttaactgattcgcttgccccagcttcctgagtgtgccaccacacctggctaatttttgtatttttaatagagatggtgtttcaccatggtggccaggctggtctggaactcctgacctcagatgatccacctgcttcagcttcccaaaatgctgggattacaggtgtgagccaccgcgcccaggttggccttttcttacttcaaggaattataccttctaccaaatccttgtctggtgatgtcttccccacaaaatttaggctgacatggataac

SEQ ID NO: 105370 - DNA, 1042 bp, Homo sapiens
ccaaatcccatttcaggctgccagcttcttggaagctttctgtaaaaaaggagaatttatcttcatttgtatttcatgatgtccctatggaattgttacctttcttcagatgtagttgtagggaaacagactacttaatgccctttctaaaaccagcataaattggattttattgtatgtatacacaataagtgctttcttacattgataattttcagaggaacagaataatcaagaatgaagttaagaagcttcaaaaggcagctctcctgaaagcttctcccaaaaaagcacctggtactaagggtactgctgctgctgctgctgctgctgctgctgctaaagttccagcaaaaaagatcaccgccgcgagtaaaaaggctccagcccagaaggttcctgcccagaaagccacaggccagaaagcagcgcctgctccaaaagctcagaagggtcaaaaagctccagcccagaaagcacctgctccaaaggcatctggcaagaaagcataagtggcaatcataaaaagtaataaaggttctttttgacctgttgacaaatgtatttaagcctttggatttaaagcctgttgaggctggagttaggaggcagattgatagtaggattataataaacattaaataatcagttcctttttttttttttttttttttgagatggagtctcgttctgttgctcaggccggactgcagtggcgctatctcggctcactgtaagttccacctcccgggttcatgccattctcctgcctcagcctcctgagcagctgggactacaggtgcccgccaccgcgcctggctaattttttgtatttttagtagagacggggtttcaccgtgttagccaggatggtctcgctctcctgacctcgtgatccgcccgcctcggcctcccaaagtgctaggattgcaggcatgagccgccgcgcctggcctaaataatcagttctttaatctcactctctgcccatacttggataggtagtgcaaaatcattgcagtcataattgatcatgtcatga

SEQ ID NO: 105371 - DNA, 1114 bp, Homo sapiens
ctttttgttgtctgccactgaggttttctggttgttttttcatgcaatataattgtggctatagctaactaatgtgctatgtgttttttattattattttttaaacagggagttgactaaagagaaaagagcatttctgtgtgcaggctggttggaggctgctcaggcagacacaggcagagagggtggggccaggaaggagaagatagcacctcctgtctgtgcaactgtggccttcccacagttctgtcgtcttcaaatttttgtttgcatgcacatcgcaaaaaagaatctcaaaaaacaatataactgtcacatatttttaagttcataggtagaagttttcacgataagtttaagtgattgcaagggatataattttcattttactgcaaatattgacatttaaacatacaactatcaatcttaaaatattaaagagaatctggagctcataaagatttcatgctcatcaccatcccatttaaaacatatgaataggctcttctttactgttgagaaattttacattttccctttttctccttgaatttatatttcttttgtacttcctccatgaacctttaacataatttaatatacttttaaaatttgaagatattttattgatcatcctatcatacattaaaatatattacatatgtattcataatacattaaaaaatatattttattcttgtgaccttaaggctccccatgctttaaaaaattgcttctggattgaattatcatacaactgatcaaaattgcattaaaatgttaccaattttgatcattttttaaacataaagttaaatgtaattggaagtgcatctcctaatgagatgaacgattttctaacttttcatatgtatttaatgaaagagaaaggcatattctgctaaaaatgaatcagtccagaagctaggataatattattcctgttaataggaagtagaaaatgttaaatattttatatggtaaattaaaatgagcaatagctatcattggattatttcatatcatttcataagatggattttcaattaccttattgaataacatatactacatacaaataagtcacctaaaattggtatctgtgcattttatt

SEQ ID NO: 105372 - DNA, 1039 bp, Homo sapiens
atccaaaggtcatattgcatgacacagtcatgtttcctcaggaaaaaagagggacttcagaacctacattggaaatatcatatgtttttagttctttggaaacatttcatcacaggcaaatagaatgatttagaggagtttgttcattttgactgtgcatgaaaagtaagcctgttctttcttcattgccaacaggagataatacgtgaaacacataatggaatgtcaaaacaaattaatttcctggtccggcttgtaaatacagtactttgtgtaagcaacagcaaaaaaccatgaaaagtgagatcttcgtgatactaatttcactcacccattcaacaggtaattactgcaggtcttccatgtgtcagcattgtcctgagtgctggggacatagcagtgaacaaatctccaagatgccttcaaaccttgaaatattcatcccgttattttctgaatttggcatacatattggaaaaatgtttccatttttaaatctctgcctgctgttctgataaatattgttctcccaggttcccaaaaagagaattaatttggcgaaacaaatcagtagttgtttcactcattgttatggtaatagagaaattaggtttttaattaaggctgaggaaggatggaagagtagtaggcaaataagcacctacatggtttgatgcagacatgacaagtctccttttttgccatagtgtctaaaattctgtccattagagcatcctgtaggttaaggcaatttatccaggaggcctcagttatgtgcattttctgccttggaaaatgtatgcactatcttggtgtgaataaggttttaacatcagccacttttaggaaggtatacggcaggtatcgctgttttacaaaagaatgaactgaagcttagagaggttaagcaccacgctccaggtcccacagcataagatggaatcaggattcaaatccaggcagttagattccaggtactctgtgcttttaaactgaattaactttcaacacttaaagaaggggtctggattgtccagtg

SEQ ID NO: 105373 - DNA, 1847 bp, Homo sapiens
ttgggcgctcctttccttatccttccggggctgctcccgcttcctctcggagccaaacttcgtagcaggcgcgcggtccgggcggcgggctgggcgcagccgggaggcctggggttgggagcggggagctcaggtgggggacggtgagggtgggccgcgcccggggcgcggagggcggcggccgggcccgggttccggtcgcgctgcctctctggggccctgggggcatcgcttgcggggagggggcgccgcgggggcgcgtacaggagcccggatggcaggcggggtgggggtgggggtgggggtctgtggtttccgtccggggctctggccttggccgagtttgggggagggacccggtgcctcgggatgcgccgggccctgggtggggggcggggtggggacggggggctccgccttctcagctcttgcggcgagttggggttcgggcgctgaggcagagacgccaccctaagtcccatcagtcctggggatcggaccagtggactttctcttaagatttcctctttcattcttaagaatagaagtgttattattttttttaatgccctggctatgtgagtttgaatcgaagcaactttaaaccttagagcaactaaactctaagtgcagcgggtgcgatgcgtcagtagggtgagcacataaaaaatccatgtcttgcacctgtattttagcgtactatgcaggtgagtgaaagcagtggataatgtactgggagtcttatggatttatggtagtgggtatgagaccctggtgaaataagggggtggaggaaggcgaaggtgatggcttactgtttcttaccaagtgaactgcaggattcagcctctgactcagaccgcttcgagaattttgttcgtagaaataatttaaatttattcaaatagtttgatggcagctaaaattgaattatagagcacgttttcttttcagcggagtgaatttttccttcgctccaaagctggccaaatggaattcaagcattgcaacttctttcagtgttttgtctggagagaggactttgaaccgagacttttcgaagttaagttcctatagcctgcttctgaatctgccaagcttgaaagctttggcagttgggtgtatgtagttgttgccttcgttctcttcccttttggagggagcgttgtctcctactttgtatcttccagacatctgtggtcttccccccacccctcgagtttgtgagtggtgaatgaagaaagactaggctgctggtatgcagaggtcggcaaaaggaaatcgaggagtggttttagtgaaatgagagctttgtatcatgaataatggtggcttaggctagacatcaacttgaagagacggcagcatttcctttcataaagtctaggctaatgtttttcagatcgctaagttgtagtttgtctggaatttaggaagccatttcagtatttgtcacttggtgaacgaacattcaataccttcagatgtcttcgtgttgacttgtattcatcctaagaaatagtaaatatagtctcaagtgttatttatgttatactgctggtttattctctgcttaaattattgacataaatttctactttggaggcttttcgtttgaactaaggctgtgcggaatttattttacttttatatttaaatctttgaaaaatctctgattaaaaaaaaagtacccttaaaggtttgaggatgtcctttcacaccagacaaaatttggttaatttgcgcccaatattcattactttgacctaacctttgttctgaaggccgtgtacaaggacaaggccctgagattattgcaacagtaacttgaaaaactttcagaagtc

SEQ ID NO: 105374 - DNA, 1869 bp, Homo sapiens
gtcatgttgatttgtgacattgtttttgaaaatatgtgttaacttagttttcttgtagccctctttttattggaactgtggtatctattgttgaaactgcttgactgagaacatttttataccataaaagtaaatagtaaacatagcccaggagcggcttctggtttgtccatcgtatgtagccattgcctccttgtactctcattgagaagatactgatttgcagattcagttgtccttctctaacagactatttatgtaatattgcagttgtgattgtgataggtaagtggaccagtcggttaaaataaatactcaggtttcacaaaaggaaaataatatgatttgtgttgatctaaatgagtataggagttaactcctatagtttttcatcacttaaactcaggggaaagttctttatttcctctgtttacttaagaatgctgcttttgtgtttcatgcaagactgagcttgactcagtttgaaacctaggctcatctgttgaggcctgaaccctgctgtccttgaagtatgcatataatttgcttccttcctaaggaaaaataagctcttgaaagataaagtcaatcacattaggaacccatttttagggtttagccacttttttttttttttttttttaactcatgggcatctcttctgttaagagacattccccactctccaagtttccctcaagcctgaagcagcagagtgagtagtgttggagcatgttttcattgcatgcttgggtcatgttgagtgccctccagtggatatagtataatgcttgtgatttttttttttttaattccaaacaagtttatgtgggatatatttaggaatagttctgatgagggagaatcaactaagaaacctttgatttctaaaataattaatatcattactgctaattaaaatacaggcttgagaaaatgtcttctcagccaatatttgcagtagaaaagtcgggaggttttttaaggtcactttgagtaggcagttctgcttaaatatatcataatgataaaccagaatctcagtatagtactttaggaggtaaaagatcataatattcagttatattgatgaattacagcaactgaaattctcagaaaaaaattaatgaaaatgtgaattgtcaatttgtctaaaatcattcacagagtaaaacataagtgctcaacttgattatattaggaaatagatagaaataaaggtaattgagccagtgtatgtgacctaaaatataatgcccttagtgaccatagggttggtctcatttgtacatagtggtgggccatgatgaactgtgttttgccctttgaatttttccttaaaaagctttctctaggctcctatgttcatggtttttctgttagtaatattattttctgaaaatccatgtttcaaatcagaatctaattagcaacaggaatgaagcttattctaaattagtttttggaagttaaacggtcagcatatggaaatttttcagggtttagatttttaaaaatttgtttttcagaatatgttgctggaatgaaaacgttagcgtagggacggaaaatgacacttaccagtgattgctttactttgcctgtggaattcagtgtaattttgtggaaacattggtatatgattttttactacttaagaaatgtattgctatagttagggtttttttttttttaaaggcaagaatgcctcaagtgctttatgtgaatgattatttcaggatggattaaatattcctccatcaaggaccatacttgtaaatcagtgatttccaagttggtgcttagtatttacagcatttactgtctataagcttctgttctgatttttcaagagttttctgagaaatg

SEQ ID NO: 105375 - DNA, 1671 bp, Homo sapiens
tcatctgatttctttcccctaagtgggaaatccagatcaatgtacatctcttgatttgcaagtgttggtgaacaaaattcatattttaagatgctgtattcagcacaaattaaatacacttatttgctgaatactgccagtttgtccctctgcagtagtaccatttgaagtacagtgttttcataatgattctgtgaaatgactggttctgtgaatgtacataatttagcagataacattgttaaattattaggtttgtatttatttaggcacttgggaaatgccttgtgtcaattgattatagattaggagcttaaaagcaagatttatattatcaacttatttgtgaagactgggaaacccacatttttaaagttaggaattaagatggccaggttcaaggaaaagggggagaagtaactttcttattactcaaccatcttaaatagagttctttaagtgtatttttaagaggtctcaaaacttaatctgaagggacgtcaaatgctggacaaattctgtgtatacaactcaagtcagcccccaattttactggtctttaaatcatgtcctttttaccagaagtttgcatttctaagctaaactattactgttagactagatccaaaacttaaaaacagtttaggtaattaaaaattaattgaatataaacgttttacttaaattaatggcaaatggctttttggccaatttaagtttatgtaggcagttaaatcgattttggttaaatcttttgctgctaacaaggtatttccagattttgaaaagtggggtggcctggtgcctgtagtaccagcactttgggaggctggggagggtggatcacctgaggtcaggagttcgagactagcctggccgacgtggtgaatacaaaaattagccaggcatggtggcaggtgcctgtgatcccagctgcttggaagtctgaagcatgagaattgcttgaacctgggaagcggaggttgcagtgagctgagatcacgccactgcactccagctggggcaacagagcgagactccatctcaagaaagaaaagtggggtgtttagtcttcaaactccgtgtttaagtgactggagtgaaaatgtaaatcataggccggtgttggtttaaaaagcatcatctgaaaataatgctgtagtctgcaattatttttattacgatacgatggtgtaaaatacaagcagatcagtgaaccattcatgaaacattaatcctaaaggcgtctcaccccaagtctatcccacaatctccatgagacttcgtggaaccactgtaaagtttcttgtgtaatatcccagaagtttcctacctctggtatcttttgaacttgttgaaaaggcttttccaccccctctttatgatggtttgaagagtgtgaacatctgaatgatgctggggtgaaactgcttcataacacttccattttctcccctatttatttccatatttttattttttcactaatatccccacggttttacttctgttttagtaattcacatgttgctggactaattctttttaactgacttgtaacagatatgttaaaccgtttaaaacttggggggtatttttaacctactttaagttagttcaagttaatcagtctacatggcatataaaccttatgattaataaatcttaaat

SEQ ID NO: 105376 - DNA, 2356 bp, Homo sapiens
tctttgaagttttgcatatactagatgaatgccacatgtataagggaggaacaagggattcttggaaatatttttcaatccaagtaactttggaggcttccaagtggagttcattcccctgtgtaggaaagtgctggggtagacccttaaattcctttctgagccattgaaagaatgtcctcaaacttcgcttatactttatagttcatttagatacaaaagttacaaactgaatgctatttaggaaacgtaatacactgacataccgctctttaaatagattataaatttagtatatcaattttctggcattttgctgaattttattgtttagttttcaagcccaactatcttgttactttgtatatcgtagttgtcccccgttgatcactgtttcctgcttaattgtgctgtcgtttttcctgggtcctgattcagagtgtcagcattctgttccccatagaataagaagaggctagaaagtttacagatgagatatctaggaatgccagaagatcaggggtcaccgttgaggcagagtaattaattatggttaaaatggtgttgctgataagtgggtgctgggaaataattaaaatttgattttttagaagaatacttctcatgcttgaagagcgccctcattatatgctaaagggcctcaggtttttccttattgccattatgctgcagattctattacatttgtctgaaaagatctaagacagaagggctgtttaataccttcccttttctcctgaacttcccctctcctctcccccatcaggagctaagtaggaaccccttcaccttgttaccatcagatttcatcaatggtctgtctttacaatgaaggaagtagtactgcattctgggcagaggccagtcctgaggcatgccttttcaaggacattgttactttagttacactggctcttctgttttaactcttatcccccagactctaatcctgttgctttttttggtccccatctcccacctttcatcatctgaaatccattcattgtaacttctggaactcagtcgttagaaaatcctttatattctcaatcttgtgaatgttcctttctttcttattccagctgtaacctagccttctccccaagaatgctacttcccttgcagctctctcaagtggtgaatttttcccttcttgcacaccttataacactgaactaggaggtgtgtggactaaatgtctgcttttgttccttattgtcacttcttgacctttattttccaaaacttcaagctttgactttcatgtgatcaaattataccacccactgcctgtctttatttcaagcacctgcaaaccttcctgggtcattcacatccttctttgttcacttcattagctcttggctcattgtcactgtctcttatttctgtcataattcttggtgacatcagtatctatgtagagcaatactagtgaagatgtggtctggtaactgttacctgtatgaattaagataaggagttatgccagaatataagtcacctgtgtcactaagtttactgtttagcttactttttttgtagcaagattttgatgaaggacgcaatatgttgatttacagtctggtacaaattttgatgtagaagatgcttccaatatcctggtctcttagttccttgatttcttctccagtgatcttattttctaccctaactcaactacatattcccattgtcatatcctagaatattttgtcttttatctgtaactctgctctcttcccccaatctcatttcaagcatcccactttctaattcctctagtaaatacgtcagttccaacagcccatcaatcccattgggacctacagtttatctatccaagcttttccctgttcctcaccctcacttctatacagctgaagtttcatactgaattataatcactttctcgtatacacgtttaacaatcttgtccctccctggcttcatgcccagtgatctcttgtatctatgaccatgtcctttatcttctcctctgtcactggatgaactgtagccttccaagataaggccactcagttcatttgtacagcagattccatcccctcttgctctcaagaatattactgtggtatctctcttttcttgtctctactggctctttccatgagcaaacatggtattatcccattacaaaaaaaattttttctccgtctctccttccactcaccacctcagtctctgcttctctttcccgcaaaataaccttgaaaaattgctttatgtactcccgttttcttttgaacccctgccagtgaccaccacgttataaatttgtagttgtcatctcacttaatctgttagtagtatt

SEQ ID NO: 105377 - DNA, 1655 bp, Homo sapiens
tctatttctgggatgtttattctctgttccttacatgctggcccttttgcatccttcttcaggtctcagcttacatgttaccttcaagaagcctttgaccactctaagtgggcccttccttccacttctgctgtgtaatcccactcccttctcccacttgttaattagttacatacttttttgtaattgtttatttggttgctgtctccctctcaagaatgcagggaccatgtctgcattctgcagtaatcactactgcacacccagaatctattacagatcctggcatgtagctgatgcataaatatttgttgaatgaaagtctgtacattgtatttatgctattggtattgctatgacctgaaactaaaaggagttgtggaaaagatttcttatggaacagaaatatcccttttgattaatatcacaatctcgtaaattgagaaaacaaaaaaatatatactactggagcattcatgtatagttggagattatgactcatttattggtgtgtttttggactcagaacaaagatgagggaatattccttaaagctctgtattgaaataacgaaaagcagtcacattttaataatagaagcttcctagcttactctttctgtaatcttcttttcctaaatgtaagagagcctcataattatgaggcttattactagagtaaggctgtcaaaggcagcaaaatgtctttctgtttggaagaataacataaacttgacatgtatggtgggggacagaaggtttcaaaagtttaagaatctgtgttgtcttaacaaatagatgcttctcaaggagcttacgctagtggttactctgtccagtcagggttttttcttctttaacttgggttcatttcctgatggcacacatgaagtttggatcatatggtttgactttagctatggtccttagctatggggagcagcatcagcgacctgtgacatgtaaattaaaaatacaatgccagggcccttccccagcccctctgatagagaacctcttggccatctgtatttttagatgttccaggttagtctgattaacacccttggttaagaaccattgggaggatctgattgccagtttaaggggaccttcaagcctgtaggtctttatagttaaaaaaaaaaaaagattttaaaaatcatgcatatgttgtggctgaattctggtttagcacatactgcttttaatggcctgaaatgtttttcccaaataaattgtcttgttatagctttcatgtgtgatttggtccagcttcttgttttgaagatacttacgggggggaacactttgtgatttctcttagtaacatattaacccacttaaaaaccctttctattacaggtcttcacatttaggcttaatgtgcttaattcaaatgtaaaaatacacctgcctttgttctcagtgaaagtatgtaataaataaatgaggggttggcaaactactgcccaccatctgtttttttatggcctatgaactaagaatcgttttggatagctaaaaaaaaaaatcaaaaggataattattttgtgacgtgaaaattatatgaaattcaaatttcagtttctgtgaatgaagttttaatggaacacagccatccatgcttatgtaagtgtgcatattctctggctg

SEQ ID NO: 105378 - DNA, 1063 bp, Homo sapiens
aagggtacatgactgagccacaagcagacctggatttgaattttaactgaacggtttattagctattcttacattaatactgctaatcagttttcttgtgatatgaggaatgatgtcttctttatgaggttgctaggaagattcaatgagataacatactaggctcagaactgaagttgctaggaatttaattatgctaccttgttaaagtatgtcaaaggcagaattcagtgtttagctgataccacaaggcagtatcctaaaattatgctgtaaaagatataaagatgctgtaagtgactcagaaacctagtgactttgtaatgcagttgattcttagaatactgtcactttaacagaataggagctaggaatgaagaaatagttattaaattactaaaatagaaaatttattgacacatgtaaagtgacatttgcttaaatattgaaaaatttgtagtactatttccttgctttagaaaacattggttaccactttttttatttatagcagtttgtttttgccttgaggcaagatggttgactgagtagttgccacatttcttttgtacaaagtccatttcataggccatctagcttttatgcttagaaacatttccttaacgttatatttcagtatttggctaacctatatagggttaaattatataggctaacttctcggacagatatttctaataatttatgtatttggttctgcaaatgtatgcaaaaatatatgtacaaaggtatgcagatgccttgcatacttgatatatgttaaattttttttaatgtagacctttttcgttctctttaatgactatatggtattccaccatcccccgctcacctggacaactacagtaacctcctaaatggtgtttctactttgctattgccccttattgtcttttttcccctttatagctgctggagtgaattttagaaagcctaagtcatacatcacattgcttcatgggcatcccagtacactttggattttattttacatccttactgatctgattctcatctctgtctcttcatggttctctgcctt

SEQ ID NO: 105379 - DNA, 1062 bp, Homo sapiens
tttccatcctattccctttgctgcccccaggcctcctgtattgatagcccgctattaagaagctagtgtatattctttgcatacttttacttcataaactatatgaagcattgttctgttttttaacttaattggtataaaattatattttggaaattcagtatattctgtgaaaattatttagaaaatgtgcctctgagataaagcctattcaggatgtatcttaaaggagatagctgtgctttaacattatcagtctttttggctgcttatgttaatataagttggagaaaaacagtctgctttttgtgataatatgttcttggagatggagtgaaagattgtttaaaaacattgtcttttttttcccctgaagtaccagtatttattttaggattatgttactgatcaaagatgctgtgtggagttactcattggtgagactaacaataaatcacacatgcaaaggatgttaccataatctaattattttaaacagtaaaattatattctaagacatccagttggcctatatgtgctatatcaatgactatcaaggggctttttatgtatactgtatacatgtacttcacaaaaatataaaaggatgacatcaaaaatctggcaagccaaaagcctacattacatgtagcaaataaataagcatatgaacttattggaatttaaaaccctgtaggatgggcgggtgatggtatgtatgttagatgtgtggacatatctattaaaagttgtgtcagataacagctggtgctgacaagcccttggtaagatggcagcatgttcaatatgttctgtgaaaattatctcagtttatgatctgtcagtattgtggagctatgcatgaaaggacttaaaattcttacccttaaactcagtaacagtgtttctagaacttctggtgatatgggaaattaagagaattatttatatgcaaaggtgtttattgcagcattgttggaataatagacaaaatggggaagaacaagctcagaatggaggaggtagcttatagtatagacatacgatacaatccagatgata

SEQ ID NO: 105380 - DNA, 3074 bp, Homo sapiens
tccctgtgtgatgcagtttttttcaatattgcacaataaaggcaaaatacggacaaattagatgataagatttatataaatttttaaaatattgatcaaaatatgtatccatattggtaatatttgtatttataataaatcattgctgtaaatttgaacttagaaaaattttactaataaaggtgcttttgtgttgcaaactttcatttgaaaagtaatttttctttgtaccaaaaaatctaaaattcgctattctagtcaccaaaatttgctttatgaaaaataatttttgatggcactatatcagaaaacaacttgttaaagaaaatgtggagtttttaaaatcccactgtacctctgttatccaaaggggatctgtgaatttttctgtgaaaggttaaaaaaggagagacctttaggaattcagagagcagctgatttttgaatagtgttttcccctccctggcttttattattacaactctgtgctttttcatcaccatcctgaatatctataattaatatttatactattaataaaaagacatttttggtaaggaggagttttcactgaagttcagcagtgatggagctgtggttgaggtgtctggaggagaccatgaggtctgcgtttcactaacctggtaaaagaggatatgggttttttttgtgggtgtaatagtgacatttaacaggtatcccagtgacttaggagtattaatcaagctaaatttaaatcctaatgacttttgattaactttttttagggtatttgaagtataccatacaactgttttgaaaatccagcgtggacaatggctactcaaggtttgtgtcattaaatctttagttactgaattggggctctgcttcgttgccattaagccagtctggctgagatccccctgctttcctctctccctgcttacttgtcaggctaccttttgctccattttctgctcactcctcctaatggcttggtgaaatagcaaacaagccaccagcaggaatctagtctggatgactgcttctggagcctggatgcagtaccattcttccactgattcagtgagtaactgttaggtggttccctaagggattaggtatttcatcactgagctaaccctggctatcattctgcttttcttggctgtctttcagatttgactttatttctaaaaatatttcaatgggtcatatcacagattctttttttttaaattaaagtaacatttccaatctactaatgctaatactgtttcgtatttatagctgatttgatggagttggacatggccatggaaccagacagaaaagcggctgttagtcactggcagcaacagtcttacctggactctggaatccattctggtgccactaccacagctccttctctgagtggtaaaggcaatcctgaggaagaggatgtggatacctcccaagtcctgtatgagtgggaacagggattttctcagtccttcactcaagaacaagtagctggtaagagtattatttttcattgccttactgaaagtcagaatgcagttttgagaactaaaaagttagtgtataatagtttaaataaaatgttgtggtgaagaaaagagagtaatagcaatgtcacttttaccatttaggatagcaaatacttaggtaaatgctgaactgtggatagtgagtgttgaattaaccttttccagatattgatggacagtatgcaatgactcgagctcagagggtacgagctgctatgttccctgagacattagatgagggcatgcagatcccatctacacagtttgatgctgctcatcccactaatgtccagcgtttggctgaaccatcacagatgctgaaacatgcagttgtaaacttgattaactatcaagatgatgcagaacttgccacacgtgcaatccctgaactgacaaaactgctaaatgacgaggaccaggtaagcaatgacatagctagctttttagtctgctttgaagtaaatgctcaaggggagtagtttcagaatgtctacccaataccagtacttgaaaactaacgatgtttctgaattcctgtattacaggtggtggttaataaggctgcagttatggtccatcagctttctaaaaaggaagcttccagacacgctatcatgcgttctcctcagatggtgtctgctattgtacgtaccatgcagaatacaaatgatgtagaaacagctcgttgtaccgctgggaccttgcataacctttcccatcatcgtgagggcttactggccatctttaagtctggaggcattcctgccctggtgaaaatgcttgggtaagaaaacatgtcagaatgcttgaagctaaaaagtagaagagtatactcacaatatttctgatgaggcttttttcttcttcccagttcaccagtggattctgtgttgttttatgccattacaactctccacaaccttttattacatcaagaaggagctaaaatggcagtgcgtttagctggtgggctgcagaaaatggttgccttgctcaacaaaacaaatgttaaattcttggctattacgacagactgccttcaaattttagcttatggcaaccaagaaagcaaggtaagagaattattctttatgtggttttcatggagcattggacacctccagtgtcatgtcattccatgcagtgttcctaacctttttggcaccagggaccagtttcgtggaaaacagtttttccatgaatgggttgtgggaatggtttctggatgacaccattccacctcagataatcaggcattagattctcatagggagcgtgcagcctagatccctcgcatgtgcagtccacactagggtttctactcctatgagactctcatggtgcagttgatctgacaggaggtagagctcaagccaggtaatgctcgctcacctgccacttacctcctgctgtgcagcccagttcatttctgttcttttaaatttttgagtttccatatgtaaagcactatgcgaagtagtagggatatggtaggcaagcttctcttcacacttttgttcttaggtgggatgtagatgt

SEQ ID NO: 105381 - DNA, 1085 bp, Homo sapiens
cattcttgatttggcttgcagcttggatgttgttggtgtctagaaatgcttctgacttttgtacattgatttttatatcctgaaactttgctgaagtttattggatcaaggagcttttgggcagagattatggggttttctaggtatagaatcatattgtttgcaaacagacttcctatttggatgcattttctttctcttgcctgattatgagcagtgttttgccctgatattctgtattctcagtgaatagatgtcgtctaagtatgagaaacaatttttttctattctgagtatttttaagaaggcaacttatatgtggtactttgtatattgtgtatgttggcaattggggaaaagaatagatggtttgtactagggcctcttgggttctgtgtgtgtgtgtgtgtgtgtgtgtgtgtgtcatgaaaacagttactttttagctaccaagcattttttctcctttcagtaacccacctaacaacatttactcagaatttcaaagcaagcttcaaatcagtattgaaagaaggaaaaatataaaggcatttaatggaagaaaatgttgggaataaagtatagggctggcaacacttacttttctcacttattgagagtaattttacttgggaatttatgagagagaaagacattatgattgctccaggtaactactggcagaggaaccatagtcttggggatagacaaatgtggctgagttcatatagaatgaggggatgggatgtaaattctgtcagctgttccagcagtaacctgtaatgtaggctaaaaatacagattttgagatttatttaatcagaatccctggagtgttaatttttatatcaagatctcatagtgttttatttgaagtgacagggaggtctgtagatagctggacatgtatgggactggaagcttaggaatctttaagttcttccaggttattcttatgttcatttgtttattctgaaaatagcatctaatgtattttaagaaatggaataggcacatagtatacattgggtaacacaacagatagggtccccgtgcttaattcttagtcttgtgaaggtgacaaa

SEQ ID NO: 105382 - DNA, 1719 bp, Homo sapiens
cagtggagataacaaaggctttttcggcttaggaaaggaacagtagctatttgagagtttgtcactagtgaggtgaactggcaaagtgaaggaaactgagcaacattctagaaaatgagaggaaatcaaatacttaggtgaaaggaagtaaactctggaaatacagaaggacacctcctaaggctagaacagatatttaggattgataggcacttctagctaatgactagggccttatatcctttttaattttctaggtggaatgcaagctttaggacttcacctgacagatccaagtcaacgtcttgttcagaactgtctttggactctcaggaatctttcagatgctgcaactaaacaggtaaattctgagtaaactggtgccatgggaatagagtcaagatgagtatgtgcttgtactgaccatctgtttttatctccataggaagggatggaaggtctccttgggactcttgttcagcttctgggttcagatgatataaatgtggtcacctgtgcagctggaattctttctaacctcacttgcaataattataagaacaagatgatggtctgccaagtgggtggtatagaggctcttgtgcgtactgtccttcgggctggtgacagggaagacatcactgagcctgccatctgtgctcttcgtcatctgaccagccgacaccaagaagcagagatggcccagaatgcagttcgccttcactatggactaccagttgtggttaagctcttacacccaccatcccactggcctctgataaaggtaaattgtcaaagtagaatttacctttgttgcagaattgaaaatgaagcatctctagctgttggatggctgtctaagcatagtgatcaataagtaggaattgtattccttagtaagtaggaagtatggctgcgataggggtaagattctgaaatgtttgtgtagtcagaactacttttagttgataccaatagatttagtgtggtgggaattttagggtaagaaaatgattttgttgagttgtatgccagttcttccttctgtttttcaggctactgttggattgattcgaaatcttgccctttgtcccgcaaatcatgcacctttgcgtgagcagggtgccattccacgactagttcagttgcttgttcgtgcacatcaggatacccagcgccgtacgtccatgggtgggacacagcagcaatttgtggtaggtaaattcttacagtgatacctggctatctaaaaggaatgcataaatccaaaggatcctgaacttctttctttggtcattggttccccccatccgtcttcctgaagagctaatgacaaagtaaataaataaataattacacatttctatggctgcagagaaaataaggcatagtgtggccccagtgatatttccttggacacgtccttcacatggtcagtcttacaaaggttgggttaggtgtttcataaagtgttctcatttaatttacacaaaggcccacttccttaggaagaggtagagtcataatttgagatcaaatctgtgtaatttcagagcctcttacccttgcctcatcatgcattttgactataaatatttagcagtccgttttattatcttttctgtgagttaaacttttttcatggacctaagaatattcagaaataagtagtagcatttctgtactcttaaccacaaaaatctcaacctgaagctttga

SEQ ID NO: 105383 - DNA, 1013 bp, Homo sapiens
tgctaaaacttggcaaagttttcaccaaatacatggaagatatacaaaaatagagggggcatgtaaaagaaaaacgttgacatagtctgagcattactttctcatcttctctttttatataccttttacccagaatgattggtgcccttactgtaggaaagttgtctttgggattcagcgctgtatggaagctctgttgcactgtgtatgggggaggggtgctgctttgaattagtgctgccaggaggcctcttttcagtgacattcaagttaatggaatccttcttccttcctgaactaattgcaagttacggggaacttcgggtatataatgtaaataattacagtctaataattgttcctcaaactttacagaggagaatgccctgtttgttaaccatgtttcttttggcaggagggggtccgcatggaagaaatagttgaaggttgtaccggagcccttcacatcctagctcgggatgttcacaaccgaattgttatcagaggactaaataccattccattgtttgtgcaggtatgttttaagtgaagtgttctaggttttatgtccataaaatttccagattgtaatgactaataacatttcagaaaattagggaccataatagggttaccaacatttaattttatgaaaattccctacattttttggtcagtaagagaaacattgagacttgagaagagggaggagatttcacatttcacttttatgggtgcctagaggggagagctgacctgggctgccagaggcagggcatagacccccaaccaattctgggttttccaaatcttagatcagttagagctgcctctgaagaaagggtttatagctaaaaaatattatggaaatccagtgctccagagcattaaacaccccaagacataaaattcagagaatattatttactacagtgtgaatgcctcttgcactctgaattgggaatgtttgcaccacagtggggggcttgccatgttttagctttagatttaat

SEQ ID NO: 105384 - DNA, 1050 bp, Homo sapiens
aacatgttccaacttgagcccttaactttctccacctacccccttccacaaacctgttttcactgtcttctctgtcttagttaatgtcagctttgtctgtccagctgctcaggctaaaacttttctttcatataacacatcctatcagcagctcctgtttgtgggtaggcattttgcctttttttttttttttttttttaaactgctatatctctagcatgtagaacagtgcctggcagcacataataggtgcttaatataatatttgttgaaagaacaagtcagtgagtatttttaatgtgaggtgcaaagagaaaaaaaaatgtatctttgaggtgtggagttttgaagaacttccattttctaagcatttgtgtaatgttggagttacttgttccttttgtaatctgaaagtatgctttaaaaaaaattagtgtacttttgagaattttcattttgctttctattcttccttgctttgtgcatgtttatctagactgctgatcttggacttgatattggtgcccagggagaaccccttggatatcgccaggatggtatgtgtctcatatttctcgattaactccagatcaagctaaagttctaaaacttttatcagaagagccggtttgctcatctgggaaaccagtgttggcagaaaagtagtggcttcaattaaaagcagttcttaaattccagtcagcaacagtatctttaatggagcacagggaattcagagccacacaatgagtagcagtaggattacaccaccaacaaatacatgctactgctaggcctctgcagtgcaggatgttacaatttacctggctttttattctctttttggccagaggactcataatacctttgtctacaagctacccaaggaagataggaaaactcctgtttctaggctcagatctcgggtgggtttttacatagttgcattatcatcagggttttcttgaaaagctaatttaaatctgggtaatgaacatggaggatggcatagaccactaacaattataactgtcttacatttataaccgc

SEQ ID NO: 105385 - DNA, 2157 bp, Homo sapiens
gaaatagtgcctttccttagtacttttgtgggtgtcacttggcctttttgtcaagatagattacacctgccagacctcattattgtcttaatcctccttcccatgacttctcactgcctaggtggtcacacagtagattcctgcttcttctcctcgggaaccccaagtctcttgacaggggtaaatgcagagtgttcagggttagactaatgatgtgactaggccctgctggtgtgcctgtctgatggaaatagatgttatttgtgtagtctcatgggtggcctggcactgagtaattacttggctaaagaaagctggaggttgaagaggctagaaagcgttgttttctgacaagtttgctgctgaactttggatgccctaacctcagtgttaacgtctatgtctgcttctctcctctctcttttgccttccttcttgcctattttgttgacaccctgactcttctagatcctagctatcgttcttttcactctggtggatatggccaggatgccttgggtatggaccccatgatggaacatgagatgggtggccaccaccctggtgctgactatccagttgatgggctgccagatctggggcatgcccaggacctcatggatgggctgcctccaggtgacagcaatcagctggcctggtttgatactgacctgtaaatcatcctttaggtaagaagttttaaaaagccagtttgggtaaaatacttttactctgcctacagaacttcagaaagacttggttggtagggtgggagtggtttaggctatttgtaaatctgccacaaaaacaggtatatactttgaaaggagatgtcttggaacattggaatgttctcagatttctggttgttatgtgatcatgtgtggaagttattaactttaatgttttttgccacagcttttgcaacttaatactcaaatgagtaacatttgctgttttaaacattaatagcagcctttctctctttatacagctgtattgtctgaacttgcattgtgattggcctgtagagttgctgagagggctcgaggggtgggctggtatctcagaaagtgcctgacacactaaccaagctgagtttcctatgggaacaattgaagtaaactttttgttctggtcctttttggtcgaggagtaacaatacaaatggattttgggagtgactcaagaagtgaagaatgcacaagaatggatcacaagatggaatttatcaaaccctagccttgcttgttaaatttttttttttttttttttaagaatatctgtaatggtactgactttgcttgctttgaagtagctctttttttttttttttttttttttttgcagtaactgttttttaagtctctcgtagtgttaagttatagtgaatactgctacagcaatttctaatttttaagaattgagtaatggtgtagaacactaattcataatcactctaattaattgtaatctgaataaagtgtaacaattgtgtagcctttttgtataaaatagacaaatagaaaatggtccaattagtttcctttttaatatgcttaaaataagcaggtggatctatttcatgtttttgatcaaaaactatttgggatatgtatgggtagggtaaatcagtaagaggtgttatttggaaccttgttttggacagtttaccagttgccttttatcccaaagttgttgtaacctgctgtgatacgatgcttcaagagaaaatgcggttataaaaaatggttcagaattaaacttttaattcattcgattgtgtcactctttctttttttcttgtcattaataaatggtttgtgagggtggtaagtaagtttatccaactcaactttatcctgaactttatcctgagatagatagatacatagtgaagtaatttgttgtagcgatagagagggccctacttctctagatgcaatttgccaagtttctttagcatttggccctggattacgctggacccctaaaaaagtgtttcagccttgcacattgtgattagttctgggctttggtgggagaaagccaagcagactatccatctatctatctctaccccaatccccctcagatgatttgattccattaaagtaatgaaataaatagtaactacccctacctggatttggattt

SEQ ID NO: 105386 - DNA, 1050 bp, Homo sapiens
aatgtgtctcaaacaatttgctccagtaaaaaagttcccgttttaagctcttaattgcacatccacacctataagagtaagaaagctcctggctgattggctggaaagggcaatggagcagggagggtcagtgtgtggagtgggtctgggacacataagtcagctccaggcaggagccaggcaggcccactgaaggccccaggcctggtagagtctggctgcctaccactcactggcagtgtttctggcagaggtggctcagatagtgagtggtggctggggctgggagctcagaaatagctcagggtgctggcatggccaattctgaaccccaccaggactgtgggccaggatttcctgcttctgcttcccaagaggatgctgcagctggtccaccagatactcgggtgcaaaagaggctggcccctttgaaaggggggagcactttaccttagagatgcctattaagtgtacctactttggtttttcttacagttcatttgccgacagtgcggtggctcccttggccctggaaatcctccaagccgttgggcactaggcaagaaggtgcttagcacaagcccgccctgtggccccagccctcggatgcataagcaaggtcagctcccagacacctttgccacatcccctcacagctgtctttggacctaataaagtcagcttaacccagaacctggtggcccaagtgctcactaaccccagggcctagaaaactgactcagaatggacttccttggttcctgtggaatgcatctgggaagcccaggtttgttagctgttctcagaaatgttctttccctctctgtgtgggccaggtgggctaaggttagcactgcctgtggtaataaagcagtggatgcaaagcacagtcctcagcctgccagcatctgtgagcatctctcctctcctcagggaagagcggaagggcgggacgaggcaggaatgctctcccaaccgcagctccagagcaagcctttggaagctaatctctgagcctcttgtcttctccccttttacctgcctggcttt

SEQ ID NO: 105387 - DNA, 1050 bp, Homo sapiens
cctggggtttagttattaatgcctctctcccaggtccccaggcaccttcttggcatccttctatccacgtgaaagagatcatgttgggctgagagccccaaagacagatttccagttgctagccaggcctcttgagtcccagcacagaaaaagtagttttgctttaattggaaagttcaggttcccagacacaaactctcctgagagatccgcaggaggctccctgccctgaactggccgtcttctgccccagcagactgccttgtcccctcccctgaggaccaccagtgtcctgcctctttccccttggtcagcaacactctgtgggggaggttacgcatgggggttacagacaagcccaggggacaccccccagtgccttaggcagccacagcaccatgcaggcctgatactcagggtgcccatccaacagggcatgagtcagggacgggtcagctgaccactgtcttcttcctcctgcccttgcagatcacctccaatgagaagcacttggagagcctcaagaatgcaggcagcctcctgcgggctctggagcggctggcccctgggagtgggtaagtgggacccaggaggatcagcagtctgctctagatcagcacacactctcagccattcctttctccactcctcccactcatctccctccacaccagggactaccaccttccagcccatcactgtccactgagatccttcccagtgtgggaagggaagctctgccactccacacactgggaatccccagttatggtggggaaagtgaggggacaggaatcaacagggggagagaaagtcttagtcctgccaggggaaacaatattcccaccttgaggcccctgaagaggttgagtggatgaccaagtgggagatgcaaggaacctcatgagaaaggcagcccctggcctgtgcacacatgcccccatcagcagcccagccagaggcatcctcatcaccaccttgtggaggactcaaggcccaggcagggctggggcaaatgtgacagcttagcctgctctgctgcaccaggtt

SEQ ID NO: 105388 - DNA, 1160 bp, Homo sapiens
tgcacttgttcatgcccctaaagacttgggcttccctaatcaatcagacttcctgggaactagggaattaaaaataaatatttatgtaatatgtatcctctgccactctcactacccatttagcatagcaaacctatgatcccacatgcatgcatagtttcttcttaagaatttgcctttaaaatcaagcatcatagtaagtgacctttttgatctgtgtcagtgcacatttactttgatttttaaaaaatattttggcttgtaggggtgatgagtaaggttgagctaaaccacatggtctccttccagtctttctgcttagaacatttaggagatggctgggcaagggttagtgccccaaacgtatgtcatagatcaggtctcattggcattttaggcagttgtgccaaacttcctagaccggtatcccagtgatggccatgaaattgttattgaggcttgtttaacgttttctgtttcagggattagtctttttcaacaccattgttcaaggaaatgttttgaaagtgttcctgagaattatttctcatggcatcttgatttcctttttcagttgaaagcaagctgctatcatgaccctccctgaagcaagtaatgattagggctctcatttcaaattattctgcctccatttccaatttatgcatataacatttttatccattcttcaaagaaagtctcagagttccatacagtacatgtattttttaggatactgaacactttttttttcttttttcactattttttttttaaatactttaagttctgggatacatgtacagaatgtgcaggtttattacataggtatacatgtgccatggtggtttgctgcacccatcaactcgtcatctacattaggtgtttctcctaatgccagccctccccttgcttcccatctcccgacaggccctggtgtgtgatgttccccttcctgtgaacatatgctctcattgttcagctcccactaatgagtgagaacatgcagtgtttggttttctgttcctgtgttagtttgctgagaatgatggtttccagcttcatccatgtccccacaaaggacttgaactcattcttttttatggctgcatagtattccatggtgtaaatgtgccacattttcttttttattttatttt

SEQ ID NO: 105389 - DNA, 1050 bp, Homo sapiens
aaaatgtgatggaaatccttcaagtgtctcccaagtttacctttcccttaaactggatatcaatgggagttttcccagggcaatgattgtagattagctacttgtcttttaattaaagctagcttactccaacactcaaaatattgactacacatgaaccaccacagatttgttctgtgcctaaaattggcttaaatatatgctatcgactactctctgaaagcagaaaaatagtccatggaagggtgactataatatgctgatgttactaactccctgtcaccttctcacccgtctacctggtgcagcagaggtggaaggaatgtgatttgcaataactctctgaagatgaatagcattaaggatatgttacaaatatctattccatgaagaatctttaccctgtggtcttcagaaagtcttgctgtgctcaccatcattttccttctgatttctcatataggtatcggcccttctcattccacatgagaacagacgtgttctgttgctgaaaatgagtgtaatatagcatttccttatgtacagagtcattaaagagaccagatgaggaaaccaggaattctgcagccattcttttaatattttagtaccaggttgggttgtagaacttagaatcagaagaggcactctttctactagatagaaaagtaaagaaatattccttgaggtataataaaaaggtaaaattatacctctctccctcctgtcttatttttcttggggttaagaccttccattcttgacttgtattcttaaaggaaaacagaatggggattgatgtaaaaccagtaaaatttctaagagaaacactgtgtacccaaatgagttaaaagtaaattcaatcaattttatatgcaatctggttttttagaagatttcctaaaaccatgagaggatgctcttaagcgtttctgaaagagatcttttcttgaatccatacacactcatttgtagttccactggataagcattctctgccactgattgccatagggtttgcaagttaatttgggaactttttgaatgatt

SEQ ID NO: 105390 - DNA, 1042 bp, Homo sapiens
aaatccctgataatgtaggtctgagatcataacttcccagggcagcctcctcagttgtcaggagtgtgaatgtgtgtggaggggttggtgaatgaatctagtttttccttacttagagagtataatctcctctcttcaggtgcccatttctgtgtaaggtgactcataaaactctgtatgctaggaggatgggagtgcaggggtcccactgataacctttgtttgtgttgttgctaagtgcttcctgggcagtcagctccatgctctcatggtctcaactctctgcctccggttttcatcagaaactagtctgaaagctccccctgttttcagagcttagggtttagggtctttatattttatctggcatttttcattgttttcagtaagaatgttaatccaagtaacagtacccactataactaggaacctgtttgtcatggtcattgtcacagcaatgaattccaagtcatcaaataagatatgacttgctgggtcgttacttgttgattcttttgcctaatgagcaataacctatggttaatttgttaagatccagtatttataaatatctattttgcattcaaatagaaattaattttctaatcatatgaaatgcaagcatactaattattgtaactacagcgtctattagaagaggtattattgcaacttactggcttcataaaaatattttttaatgatataactcatgagaaattttctaattacctctttttgagcatgactggaatacatgaagatgaagatccaacaccccaaggaacatactgttgtttgaaatgttagcacacatgatgttcaaggctgctgatcaatactatattgtatggaagtggctaaatgcatttgattcttgctgagcacgagctcttaattcagatttttcccagagttttagaccatttagctcctcagagttgaaatcatcaatctggcctataggacagtgagaaagccacgatttgttttgtacagcgaatttgttccccactcatggtggtttcggaaaatattatta

SEQ ID NO: 105391 - DNA, 1029 bp, Homo sapiens
gcgccgggaccctgcggggacagccctcctaatgcaccggccgcacctgcaggaggccctcggagcccggaaaagtgcccctagggcatcgtgtcggccacgccgcgtggcctggattccgcgctccggcactccgaggtgacagtgaggcgaccttcaaagagcctggagctgagcgcgggcagcaccccgattcccactcacccgcaaaacttgatgaaaatgacatcatctgagcgtgtcagagagcagagagcctttagagccctcctttgcatccttgagagttaacaagtttactttgtcactttcttgacctgatttttaaagttcttttctagtctccaaggtcaagctcttgcaggtaaaaacaaatgtaatgaactgtatcgtttcttcttttgtaaagttgtgtttcaggaaagatgttaaaagtcggcctgctcttgaggctggtgctgggtgccccttccgctttaagcttgcctgttttagaacccgtggctgcacttgttcagacactgaaattagcgtccgctttgagagccttcagagtattcgtcgttggaccgctgatttttttttttttctgatatgcttcactggaactttatttgcttcaaaagtgtaaacgttgtcaatactgtctgtgagtgtgtattcgggactggtaaccttttctggagggtcttttgtttatctggaaggagagtggaggttaccatagggaaacggtctagttccagggtcctttccaatttccaactacaagagcagcgaagaggaaggtgctcagactaagctctgattagccctggagccagtctgcactggggagggtctccccagattgagtgaagggacaacaggctgggagcttgactggtaggtttggagagttggacctggagtgacagatggcgccttcccctctgtctctcggtttggaatggtcatactcggttgctctttgatcttggacctcagctttgtcacagaggttcccagcccagtgtagcctaagccagc

SEQ ID NO: 105392 - DNA, 1016 bp, Homo sapiens
tttgggaggccaaggcaggtggattgcctgagctcaggagttcgagaccagcctgggcaacatggtgaaaccccgtctctactaaaacacaaaaaaagtagccgggcgtggcagcatgcgtgtgtaatcccagcgacgtgggaggctgaggtaggagaattgcttgaacccaggaggtggaggttgcagtgagccaagattgtgccattgcactcctgcctgggcgacagagtgagactctgtctcaaaaacaaaacaaaacaaaagaaaatggactcagatttatttaactcatctatatttggcatgcactgtgatttttgtagggaaagacaagaggatgttctttttaaaagatggagatagaacccaagggcttatgtgggttcttaggttttattttattcttggacagagatacactgttgttagacagagatacactgttgaatgaatgggtcttctggcttctcacctccttttccccccttcttttcaaacaaatgttccctattctgacttgtcttcttagatgtatctaagtggaggccacttgcagtgttgaaaagtgcaaattttagtgaagagacagtaaataattgcatatgtgtaaaactggatgtctcctgagttacacagaataccaatgatgttgagctgcttaaaggctatgataggcattttatgaaaggctgtgtagtatgattcattatagtgagaaatttatttaattattattgttaatagtgcacctgaggtgaaacagggtggaatggggtgggaggggagctcttgaaatccttgtttggacttaatttttttgttttcaaaatttattatttttattttacagtgctgttccttgcagagcagggctaactcataggcagtgtgcctgtaggcagcctgtttggacttccttaaacactttttttttcttaaatagagacaggttcttgctatgtaacaggtgaagctgggaatagcccttcctagaatgctgaggtgggaggatc

SEQ ID NO: 105393 - DNA, 1051 bp, Homo sapiens
tctggttgttttggtacaataaaaaagtgctttttttagagatagaatctctgttgcctgggctgaagtgcagtggcctgatcatagctcactgtaaccttgaactcctggactcaagccatcttcccgctttggcttcctgagtagcatgcgtgctgccacacttggctaattttcttttcttttttaaatttttttgtagaggtgaggtcttgctatgttgcccaggctgccttagcttcaagcgatccttctgccttggcctcccgaagtactgggattacaagcatgagccactgtacctggccaggcagttctttaacataaacaacgtgtgctgtgggtctggattttttttatgctaacattctgtaagctctcagtttttaagttttgcaaaatgtagaacatatatgatacaacctactctagatacacagcctctagtgtaggctgcctccttttattatgggtttctatcaaataatttccagtttgagatttgagatgtgaccaaagataaaatgtctccttataatgttagaagtggtttggcttcagctgtattattgagtcaggaatttggacctttaggagcaggtaaacaatgagagcagaaactacccttgaatttatgtttgtctgaggaccattgggaaatatttcttggagagtggggaagacaaattcctttgacctccagaagaattgattgtcctcagtgtgatgagaaaatcagggagagagtgactgaagacagctcagctgttcatgccaaagggactgacggtccagattcatggtggaaccaggtggccgtgttctggctggagaacagcagtgggaagaggacaatgctcacgagagggacaatgctgtctcggtttctgcctgacttttggttgctactgtgttctgtggaacaaatattttatatcatgttgcattaccatctaaggttgacaagttaactagaacctttaatttcttacgcattgaacctttaattatcttagctccattaattttacttacatataccacttgtact

SEQ ID NO: 105394 - DNA, 1030 bp, Homo sapiens
tccagaggtgtgggccttgcctgcactgaagaatttcaaacctgggaagaaaattggaggtttacttaaactaaagggacagattcttgtcatgttcggaagttggaattggcaagctttatactggagaattaaaaactcaaaacaaacaaaaaaccaaacctatgattcaggaatagcattataatgatttagaggaaaggtggggaggaggaaaatgagcaatttgttatgtgtatgactcactggtgctgtgtctgcgagtattacatttgggtgcagaatttctgagacaattggtttactggctttcttagtagagaataaaagagtgtcacctagacagtgagcatttcatttcaacctttgcatctagaatatattttaaataaaatgcagaatactatgggaattgtacagttgtacaattgctttatgtacctgagtgggaagtagctttgttttcattcattaattaaaaagtaaaaaccttcagattgaacagtgtagatacaatgcagcacagcattgatgtgtttgaagccatgttcttttttcccctgtaagattgttgcttaggtgtgttgaacccagcaactcctgtttatgacaggcagcttcggaatcattaccttatatgataacctcatacagttattatttttttgaaatggagtctcactctgttgcccaggctgaaatgcagtggcacgatcttgcctcccttcaacctccgtctccctggttcaagcaattctcctgcgtcagcctcctaagtagctgggattacaggtgtgtgccaccacacctggctaatttttgtatttttagtagagacgggttttactgtgttggccagactggtctcgaactcctggtcagttatccacctgcctcggcctcccaaagtgctgggattctataggtgtgagccactgcgcctggccctcatacagttattaagaggattatgtgaatttatacatgtgcttggctaagaggaagcatttgtgttagccataattattgt

SEQ ID NO: 105395 - DNA, 1061 bp, Homo sapiens
ggccaagtgagatagaagctaaaatatcttttgggtttgtttatacatagtaggtatgcagatatttctagttgtatcatttggttctttgtttttcagaagagatgctggcttagccttgtaaacatcgcagttgcataaaagtatttatgatagtccttaaaatgctgtaattatctttgaagttttataattttgcagtgtttaacttatggcagcaatagcattggtattttaaatcaaaacagaacactgtcaagggttacataacttattcatgatattaacaagatataaagcaccatgtttttgtgtgtaactgtttaacagtagatgaagttaatgattgcccactttcagctaatcatatgattgctattgaaataagtacttgctagacagggatagaatctagtaatttgttagcttcagtacttcatgcttgcatacacacccatgctattgtgttaccaagcctgagttttgaaatgtggcgttctttgtctttttctggtgaataaaccccatacgtcttaccatagccatttgactcttcctggctgtcaggatgtgttgccctggactgagagtgagagatcccagatttttcagcttctcttccaattgctagggataccacatcagtgccaacgtgagtctcctcttgtcactttctgctaggcttccccttagaagctgaaattctttcccttcctgatgctaagttgcagtttcttaaaatgctagagagcttttaaaagcataccgtgatgggaattagtttcaaaagattataccagagggggttaaaacttgccaaccttgtaaaaacctaacttctttgtttacgtcctccctgccccgctttctgctgtgcttggtttcctcctagcaatatgccttggtcagggggagagtcttcctgtcagacataacttcccagaccagcactcctggaggggcctgtacctcagaccctggcaacgaggcacgctggggcacgctggcctttcgttgtggtgtagaaaatttttcatttggaattccattttaaaaataag

SEQ ID NO: 105396 - DNA, 1004 bp, Homo sapiens
tagcgtgtttctagtcctaagagttacagacttcctaggcttgactctgtaacagccaaatgccttttaaccttctagggagtttattgtactttttattttctatctttttgagacagggtctcgctctgtcacccagctggagtgcagtggtgcaatcatagctcactgtagcctcgaactttggggctcaagcagtcctcctacctcagcttcctgagtagctaggattacaggtgcatgccaccacacctggctaatttttatttattcatttattctatttttgtaaattttattatttttctttttttctctgctgcttgaatcatcataatttcttattattttttgtagagacaaatcttgttatgttgcccatgctgatctcatactcttaggctccagctatcttcccaccttggcctcccaaagcatcgggattacaggtgtgagccatcatgctttgaatttaacctggccaagtgcagtagataatgctgtggtaccacagagcagaaatgtgctattgttgtagtgtgataccatagaagctgcttttagagttttaggattcaagtaactgattagataaggttcatcatcattcttttattggacaaatatacacggtgtgtccattttagacccattttccttaattatcttattcactggcttatggattttgttttcggccttccctctaagtagaccagaagcttccagaggtcaggggcttcatctgatgtttcctgcagatgttcaggacctagagaggtgcctggcaagtgttgagtcaatggcaggcagggtactggggatggtgagcaggcatgcagatgcataaactgtcatggtgtttacagtctggtactatagacagacattaatgcaatttcacaaacaaatgtcaaattgtaactctgacagtttctgtggcagagaccactgttctcagatgactaacataagagctttggcttagccaggagtttgggaga

SEQ ID NO: 105397 - DNA, 1049 bp, Homo sapiens
tttctatttccaatattaggattttaaaaataaaaatcttgtgtgagagacaaagtaaagtaccaaaattgcctcagttagaggagccagttttctgtggatttgaaccaacctgtaacctgagccgtgcacagctgccatgaatagaacagggacctggtgaagggcaccttctgccactttggccgattgagatccagcaacctcctggctggcagtgatcatgaagatgggaactaggacactggtgcattttaaggtgcagtaattaaaggcactctaaattactctttgctgtttagaccacctgggctgtccagtgctactttggataccaaggaaaatggaatattcttatgtaaatatggatggaccatgagctcctggagggctggaatccagttttgtgcaattgttttctccacaaagactgacagtaggttcacggtcctgcttcttgaatgaaggaagaagggaaggaatgaagggtgaatgatgggagtaacagaaattgattgccaattcacatccatctctgccacactttcttctttcctaatagaatccagatttcattccattcttaagcctcctttgcagcatgctggagtaggggttgaggaggcgtccagtgggtattgattggtccaggccaatcacagtggccccattccctttgctgtagttgtgactgggccgattgggatcagaacaagtgggctgcagtttcctggggaggttttgttatgtttgctggtgatgctgtatctgctgctctcatcttgtgatctgaggagaacctgctggaaggcgagcactgacctgctgtgtgtggccaagcagaaagggagcagacgaacttagattctggggttggctctgtctcatttgcatcttgggcaggccacatgtctctcctccatcaagtgtcctgtaacctggagaactcaccctggttcacctgacacgtggcccacaccatgttaatcagtttgtgcttttattcttaagtatttgaaggaaccagaaaatacaaccaactgaaaggc

SEQ ID NO: 105398 - DNA, 1029 bp, Homo sapiens
aaaaatgcgaatgctcgcagccaggcgggcgctgtggctcaagcctgtaatcccagcacatttcaagcctaggtgggtggatcccttgagcccaggggtttgagaccagcctgggcaacgtagcaagaccctgtctctaccaaaaatacaaaaattagccagtcttataacccggtctcaaatgaataaataaatagagggatacaaattaaaaaaaaaaacctttaaaaagaattctcttacagtctgatgtcaatgttggaagattaagaaataaaataaatttttgaacttgctgtctgagttacccaaatgtaatttctaagaactctaaaatattatcacctagaatctaggaagctaccatgtgatcctagactaatagcatagaatgaatgttgcttcattatgaacttattatggaaatacaaatacataataaatactttaagcagactatagactgtttcctaaaatactgaagttaaaatatttgtgctagacttcctgatatgaaaagcttttctcataatgatttgtgaattaattttaccatagaatagtaagggtatatttttaatgggttaagtagctatacttaaaaaatacatgccaggcatggtggctcacacctgtaatcccagcactttgggaggccgaggcgggcagatcacgaggtcaggagatcaagaccatcctggctgacacggtgaaaccctgtctctactaaaaataacaaaaaattagccaggcatggtagcaggtgcctatagtcctagctacgcaggaggttcaggcaggagaatggcgggaggctgaggcaggagaatggtgtgaatccgggaggtggagcttacagtgagctgaggtcgcgccactgcactccagcctgggtgacagagcaagactctgtctcaaaacaaacaaacaaacaaacaaaaattagctgggcatggatgcacacacctgtaaccccagctactctggagtctgaggcacgagaactgtttgaacctggaaggtggaggt

SEQ ID NO: 105399 - DNA, 1026 bp, Homo sapiens
gattgctttagcccgggaggtcaaggctgcagtgagacttgcttgtgtcactttactccagcctgggtgacacagcaagaccctgtctcaaaaaaaaaaagaaaaaagaaaagttatgggtgggtcggatggtgcagtggtgctaagctcacttagctgtcaacaggggagggctgggtttgtcatgttggaggtcagacaagtacctaataaggaggtaactgaggactgttggatgtatttctctgggtggggatggtctgcctgtgaagatgaaattctattggaaatattctttaattatatttttacatgtctcacttttatttaaatagggatactatattctgtactttgttttgtgacctgcaattttcccacttaatctatctctagagcgtcttttcttggccaccatgtgattctctgcagtgttactggaaatggcgttgtggtgaaaaatgtgcagacatgatatatgggaggaccatgccttatttaatcaaaatcagtattattagacattttcattttccaatttttaacagttatataactgctgaggaaagttacatctttgtatgcagttatgatttttcttagaaaataactgaagaagtggaattgcttttttttttgagacagaattttgttctgtcacccaggctggagtgcagtggcgcagtctcccctcactgcaactgctgcctcccgggttcaagcgattctccagcctcagcctccccagtagctgggattacaggtgcccgccaccacacctggctaatttttgcatttttagtagagacagggtttcaccatgttggccaggctggtctcaaactctggacctcaggtgatctgcccgccttggccccacaaaggccgggattacaggtttaatccactgtgcccagcctggaattgcttttgattcatgttcctgggtgtgagtgagcttgttacctgcacccttgtcagcagcaatagttattataataattatgaataataataattattata

SEQ ID NO: 105400 - DNA, 1089 bp, Homo sapiens
gaatttttctttgagtgaccgttgatttattatttggggggattccctttttccagggccagagaaaggtttagccttaaaagtggcatttattttgtgtttatctgtgtgcatatgtgtgtttgtgtgttcgtgggcctgagtgtatatgaaatgagagcaagagaggacagacacgcatgacagcatgcacgtgcagcccccagtccacatacaagtctgccctgaagtcattcgagcagaatctgtaacaggggctgcctggggcccctagctgttctggcttgtgctgttcaggaggccctgggggctctcccaggagttcacaagaggctctggcagttgtccttgaccctttgtcatctccttccctgcgcctttggttaccctgacactgctccgactttctgactatagttgctgctgtcggctcgtctaaatctttcttattctgtgggtggtcacacacaccgtcttccaagatgctgcttcccttcacagcatagtgtagcagtagttgcagttttccagtgatcagaaatgcttcccagtcctacatctacaattatttgagataaactttgattaagtcacttaatctttgcccaagccttttccccaacccctgcctcacaaaatggggatgattctacgaagctctagcatatgattattgtacgggcaggacctgtggcctagggcatgtgaaagcccattgtgaggtgtatagcatgagggtcctgtgaggcggataacggcttcttgacagccttgcttttttgctcacctggcattgttgctgtaaacctgcaactcatctcctcatctcccacctgttcaacttttacatgatattttccactgcgcagccacttgtccagttatttaaggagctgacccggactgatgggcgtgccagaaaggtcaaatgaggtaggagagtggtaagatgaaagacgggaggaacagacctctttgcatggttgcctgtcagctgcccccaacccaacttgaccccggagttcagaccccatcattgtcctagctggagtatgcatatttcatatatggacttgagcagtctcagcg

SEQ ID NO: 105401 - DNA, 1570 bp, Homo sapiens
ctgcccaactgccccagactctggcagtggggcccccgatggcagtgggcacctccccgtgaaacctgccaagctggacgccacagctctgcacgacgacactttggccaactccgtgcccccttcggaggcatgcaaccatgcagtcctagcctgcagcctgggcatccctgaggaacactacataagcgaggctgtggaagatgctcccagctacagagggtaccgggatgcctgcaccattactggtatgggggccctttccctgccagggaggaagggagggaggtttcagtcactgaggactagggaaggaatgcagccacatgggagggtcttggggaggtatgtggagaggaaccaccaaagtgcaaaagactctgagctttcggattgtgagacctccaatccagaacctgttctgccagtgaaccattttgtaacttgtgtcagttgttgacctactatcctgactgagaggtagacagcatttcactaaattgtcatgaaggttaaagatggtaacatccaaacctgagcagcaagcatggcccatcacaggcactcagtgtattgaacccttccttctctctttgcactcagcttcttcagatataagacaggtgtagtgggaataacatgcactgtcattgtgggatgcaaaaacagaaaactacatggagtgccctttgtacaccatcaggatttgcacagacatggatttttacagatacctgtgtcagtcataactctcagtgtcccaggtggtaatcacctaacatctgtgcgggcacttagtagtagagctattgcttttttattttccccaaggaagcattgagacaagtgcttgaagctagcacaagagagggctctcaatggaaatggtgtaggatggtgtgcataacagcagcaagtggcaaaattatagctcaatccagttgcattcatatagaagtttgcttaatttctcatttttgtctgcagtgtttgcttttgtttgtctgtttgaagtaatgcctgatgacagcttaatatatgcaagttggcttccagtagcttctcttggttctgtgttaccagttaagccttgaggacctcctgtgtgtcaggggtttcctggatacagaaaggcacagagaaagccgggggtcccagcctggtgcctagctgctgtgctaggcccccacacacctcctctccctttttgttaagtggcccacatgtgttgtcctccgcttgtgactgagtccctctcccacttgcctgccccctgaaggacacagttccaacatctcccttttctctactgcatcattcttttccccttgcacttgggtctttcttattagtgcagaaacatgctatgatctccctcttcggaaatagaatccttctcagtcccgtgtttcccgcaggccagtgtctctgctcttctgtttgcttactctagtttttcttttgttctctctggagtccactgcaggcaggctcatgccccaccacactgacagcctggttcagtccaggggtctgtcctctgccttcaccttacttcacttttcagtgg

SEQ ID NO: 105402 - DNA, 1071 bp, Homo sapiens
ttctgtggagggaacctgacctgcgggagagagggagggagaaagagaacagagagctccagccagctcaccctttggggtgactggaagctgcctagaaggtggttttgccctaatttacaaatttactgcccttttgaggccttatctggtccaggctcacttcctactctgctaccttctatcatggtgttggaaaagaaggagcgcctagcagggtgggccttttgagcatgggagtccacagtgtaccccttggagcccagttgcagggagagcaagatggacaggtggtttcatccagaattgggttttgctgtatgggtgccgtgaaagtcccacgagagtgagggaggccgagccttaggcaccagcgttgctggagccaaagggctgggggattccagctggacaggaagtgggcggtagaggccatgcagaggaattgaggggctgggggtctccatggaatagcggggataactgagggagagctgtgggggaagggggttgcagtcagggagggggtatctaaattccagatttcagaggtggcccgggtgtggctggcagaagtggcatgtgataggagggccgtggaggtcccagacttgagagctggggagtcaggtggtgtcaggtgtaggggtggcagtggcagcctggatgagtggctgcactcggtggagaggacggccgccaacctctaccggggcggagttgctgatgggtggacgagtgggcataggcgggggtaacccagctggatggcctgagtctcaagcgagcaaggatttttaaaggcaaatgggaggaaatgagagggggaggtggcccaaggagccagaggatgctggcaccaactccagacctgagtgcggcagctcagagcaagaccctaatcttgaccttccaggaggtttaaaccctagtttgattttgacctagatgatggaacgtttgcgtggtacgaactgaaccttcttagtgggagagatggaaatggttggaaagacgatggtgagctaagcctgtgggcaggggcccctccttcaaaccccagccacgcag

SEQ ID NO: 105403 - DNA, 1045 bp, Homo sapiens
tttacaggctatgtgatgtgggtctaggtattcaacttctctgtgctgtagtgtattcattcttatgtcaaacggggataaatgttaggactcttaggaggattaaatgagttaatggatgtaaatgcttataagtgcttatggtaccactccataagtgtttaccattattactgatgtgtttgttatcattataagaaagtgcaactggatccctgcataactccatcaaacccaataaaatccagatggttcaaaaggtgattcaaagatgtaatgttggctgctaccctaggcacactgcctgtgaattagccctgctcagcaaacagcagttaaaataaaatagaaagaaaagatataatgttaaaaattcaactgtgaaagtgctagaggaaaatattgctggatattttactaatcttgagatgggaaagtccatcctaaacatggtataaaggctagaactataaggaaaatgactgatcgctttgagtgtgcaaaattaaactttacacaggcattctttaactgtgtatttgttcctgaaaacattgtgtgtgttcatgcacacgtatgtttattgtggcactattcacaatagcaaagacttggaaccaacccaaatgcccatcaatgatagactggattaagaaaatgtggcacatatacaccatgcaatactatgccaccatagaaaaggatgagttcatgtcctttgtagggacatggatgaagctggaaaccatcattctcagcaaactgtcccaaggacagaaaaccaaacaccgcattttctcacttacaggcgggaattgaactgtgagaacacttggacacaggatggggaacatcacacaccggggcctgtcatggggtaggggtggcgggggggatggcattaggagatatacctaatataaatgatgagttaatgggtgcagcacaccaacatggcacatgtatacatatgtagcaaacctgcacgttgtgcacatgtaccctagaacttaaagtatatatatatatatatatatatatatat

SEQ ID NO: 105404 - DNA, 1054 bp, Homo sapiens
tttgctgtgttggccaggctgatctcgaactcctagcctctagtgatctgcccgcctccgcttaccaaagtgctaggattacaggcgtgagccactgtgcccagccaacatatgcttttaagagaagttaccaagactattggaaatcaaaagtattttatctttttatttcctagcaaaacaaattcaaatcgacagtaatagtctattttttgagtattctcctggagatttaactctgggctgaacttatacacgttaactttcacgtttaaaataaatttgtgtacaatttttgctttgtgttttaatattagaatcaatctaacactaataacctgtactgtaattatcgcctgtttttttttagttgtgacattttggggcctccgtaacaggatccttcctccctttcctttgccctgcccttcttgtcctttcttgttgagcaacaaactggcatgcccaagtggaatgcgccacattcagttgccctttagcctcacgtcggacaccctgtttccaaacacggctgagtcggctggattggctgtctctgtgcgactgcttctttgggggtatgtgtcaccggggctggtgcatgtatgtgtgagtagatggtaactcggtacgtgacaccaggctatgtggaactcaactgtgtaattttgtgtccgttttcttagaaagcgtttcttctgttggtaattaaggccatggaattctagagaactccccagtgttggttttcgttcctgtctctgaagcatagttagtctttcctttcccatcctatgagggtttctctgcttgtccttctctcttctggagatcccctttgctgttcacagcaagtgagctgtccctcagtggggagagaggcagaaaaggaagacttggacctatcccttgtccctttgtggctggggtgtgagccagggtggagtcggaggtcttgcttccatttctgccactgcttagccttgagacttcccccatgtctctgaaccttgcagggccacagtttccccttctgtcttttagatctgggtct

SEQ ID NO: 105405 - DNA, 1092 bp, Homo sapiens
caaaattctagataggaggatagcttcaatggtaaaagagtggcatgaagaagttaggcatactggtgaaattaatactggtttggctgacatgtagaacgcttgaaggagaatggccagagaaagggttggaggaaagacttaactcagatgataaaagctcaaaaattttggcttttcttcctaaatagtggacactaaacagcaggaaacatttgggtaggtcttggccgtaagcatgcacaattcaaagttttgagactagaatttaaattggaaaaagactcctgatatagccttgtctagcttctttgtgctgtagataaataaccgaagatacctgccgcaggctacaagtttagttaactagcagcaaggccatagccatttctgggctctcatttcttggttgtcttgtctttagatgtgtgcaacagcaccgatcttccggaagtcgagatcattagcctgctggaggagcagctgccccattataagttaagagccgacaccatctacggttatgaccacgacgactggctccatacacctctcatttctccagatgccaacattgacctcacaaccgagcaaattgaagagacgttaaaatacttccgtaagtagttgtccatgtgtgttgtgatggcagtatcatgatcaggtcttcttagccatggccccaaataagatcttgtactggctaccctgtgatgtggcttgccacctctggaaaggtagtcaaagaaatgcggctgtaggggttaaccgcacaaaaggtcccaattttaaatgttctgaatagaaattttagaggagtgaggaccaagtaagattttcatttgaaccaactttttatgtatttatttttttgagatggagtctagctctcttgcccaggctggagtgcaatggtgtgatctcggctcactacaacctctgcctcctgggttcaaacgattctcctgcttcagcctcccgagtagctggggctacaggcgcgcaccaccatgcccggctaatttttgtatttttagtagagacagggtttcaccatgttggccaggctgaccaacctgagcactcctgacc

SEQ ID NO: 105406 - DNA, 1353 bp, Homo sapiens
gcctctgctgccagcatccttggaagacatttcctccatctctgcatcatttttcagagccggccagtttctatggcaacggttagattgaaagatgagcggcgagcaggagacgaggcttgagtgagacagccagtggtggtgtgtgtctctgacgtcaccctctaggcgtctggataggacgatcctggctactcccattcagggctgctgtccagtgctgctttattggcagtgctgccagggtctccgttagctctctgcaaattgccttcctttctgctcctcctactccctccttcccccatagaatttttcttttcattgcccactttactgttttggctccagactgtcgttaagaatgtacagcctaattctggtgtgtttcgggatattcttctgtccagtattctggaagggcggggaggcatggcagcgttttacttgacgttgatggtgctgtgaagtccattctttcctctgcaagactactgactatgcagaaatttatcgaagcggattattatgaactagactggtattatgaagaatgctcggatggtaattatggcccctgcaaaacagagccgggatgtataggggtattgtctccttctgggtggggggtgtcctgaaacctttaggggagacaggcggctggcgggtgggaggtaccagaactagcaccactggctctggcaattccaaaggcatggtggaggaggtggcaggtgggcagggctctttaccgtgaaagactcctgcagtatgtatgattgtttgcttagaaggggagatggtttttggtgtgctgggcttgtaagtgttatacttctattggattgaattttctctggtgtgagacgtgagtgtgttgttgatgcatgaatgtgtgcaagtggaaatgtgttcactgcgctcttgctgttggaggggataggaaactgggggcttggaatagtgtgttcaggaggtggcttcctggactgtcagcagcaggcctggaagactctgcccttttctgagcccagacctgggaaccatcagaggctggagaaaaggcagaagcagcttaccacttagcgggtgattcaaatgaagtttgcttgttggatccaacagagatgggggtggggaggtgatgggaggggcagggaaagaatgtgtccttctgtcactaccttggtttgtgcagggagggtgtggcacattccaagggagactgggtggaggccaagttgtgtggctggacaggtctcaggaggtttcaagcacacagaaaacagcactgaggtgcgttctcagagacatcacagtgggcggggtctcaggttcctggggtgttggaca

SEQ ID NO: 105407 - DNA, 1034 bp, Homo sapiens
atactaataaaaggtgagtcaaatgttttaaaaaagatgcagaatcatcatttatgtcagagctactgactcacacttaaattgcagtgttagcactgaaaaagaaatgtatatggatgggaatatagattgcaggccaattaggacccctcttttgaagttggaattaagggatagctactgttctcttctatctttgagggttaggagaactttattcagtgttgaataactgtattcctcctgtttattaatgtttgttgtgggggtcttctattcagcacccatctctgcctgtcctgctcccccgcccccagaggaggatataataagaggcatgggacaggggcttataataataagacatgggaggggttgattacccagtgtcttcaagtaacttttacgagagatttgaaatagccagcgatcaatgcaaaatagcaatggccttggcagaatttgcacatacatactcaatgtttacagtttaaactctggtgtcagacagggtcatagttaccccgattggatgcatcccatctctggtgcagaacctctaaaacttgggaaatcattgaaagtcatctgcttattaaaaaagcagattctcagactcacatcagactaggagaagtcctgagaaatctaaatttttagcacatgctttgggggattctttacatcacgtgtgtttgggaaactgtgctgattgatgtccatggaaagcagcctcaggcatggggaggggctggaaaagaattatttaggtcagtttcgggatcttagattgtttcttggctacactggccactttttaaagtgtgcttagaaagagtatgacacctttttaattttcaaaaggacttgggttcagtgtatgtccttatgttaaagaaacagccctctttgtagttactctagaaataggtagaatggcagaaagagcgctggctgtctgtgtttgaggcctgttttgtacttcatgtggccatgtggtatgggaacatcctgggatttctgtgagcctctgt

SEQ ID NO: 105408 - DNA, 1046 bp, Homo sapiens
gagaacagcatttccagctcctcaggaagtcccttggtccctttctagtttacatctaccttcccagaaacaattattatgacttctgtcaccttagatttgttttgccacttcccgatctttgtaatggaatcaaacagggtgtattcctttgtgtctggcttttgttgcttaactgaggtctttgaaattcatccttgttgttgctaatatcactaatttttttttgtgcatggcattccagcattctgttttaagagattcagttgttatcttgtgactggttgggttttgataagttaatggacaagagaccagtcttattaaatgaagcatgtttttgttctggcagtgtttatttttaaaaaaattattaatcacttatctgaaataaagattttttaaatcttagaaatatttcaaaatgaatagcccaaggctgacattgaaatctgggagcccactgccggctctcttaaagagatgctcctttgcagggaaaagggaggatgttaggtaaagataggcccagatgctggtatgagctttctagttggccttccagggctttcacccacagcccagagaaaggagctttgggggctgatcaggatgtttaaacaatgactaatgttctttaggtcccttgagtaaaaacaatcagaatatgtttcaaacttctgctttaggatggtctattttcctgtcttgggataacttttttcttttttcttttttttgggacggggtctcactctgttgcccaggctgcggtgcagcagtgttatcctggctcacggcagccttgaccttctgggctcaagcgatcctcccacctcagcctccctagtagtgagtagcagggcccacaggcacacaccaacttgcccagctaatttttaaaattttttggtagagacaggatctcactaagttgcccaggctggaacttttgttttcaacattatttataatcagccatatactgaaagtatttttcttttgaagttactgttctaaaaatatggttaacacttcccctccag

SEQ ID NO: 105409 - DNA, 1014 bp, Homo sapiens
tgccagtggtttcttgggggcaccgcatcttgcctctgactttccatctcatgcccatcttgaaaggggacatcactcttgtccttgttgtcccagtgagaagccctgatcagtgctttttgatttacctcccactcagttttagttcttaaatctcaggataagagcccactccttgccacctacaatttccttgcattaatccaacagcctcaatgcttgtcaatctaaattgccttgcaccccctcccccattgctgcacactggagccaaaatgcttctgaaatataaaccttattgcataaccccccttcaaaaactctctagtggttttccatttaattccacccttcttaaagctacttgtcaggcttcgaaccccctgagccccatcctccaggctgccctgttttctgtgtgccccaggagggcaggtgtcctgccttgttcagtgcagagcttggtgcgtggtaatggttgtttggtgttagtcagaggtgaggcgtgtgtattttactatggtgggtaggcagcaagttgcatttaacttctttttctaggagatggaccataattttcttatattaaattatcatagagactgagcacggtgggtcatgcctgtaatgccagcactttgggaggccgaggcaggtggatcacctgaggtcaggagttcgagaccagcctggccaacctggtgaaaccccatctctactaaaaatacactaattagctgggcatagtggcaggcacctgtaatcccagctacttgggaggctgaggtgggagaatcgcttgaaccagggaggccgaggttgcagtgagccaagattgcgccatggtactccagcctgggcgacagagcgagactctgtctctaacaaaagaaaaaaaaattatcgtagaggtttatggtggctcctttattttgcttttctttcttttttgaaacatcttttgggtggaagtggatttatttggtagcactccttgggtcagaaatggaactt

SEQ ID NO: 105410 - DNA, 1048 bp, Homo sapiens
ctgtctcccaattcctgttggtttctggccgtttgtgtgctggaagccttccgcatccttcaggtgctctggcagtcccttgccatgcctgagccatcttcattattatgctgtgtgcttgatttgtttgcattgaaatgtgcgtacaaaatgcggctaaaggccgggcgcagtggctcacgcctgtaatcccagcactttgggaggctgaggtgggcagattacttgaggtcaggagtccgatactagcctggcctacatggtgaaacgccatttctaccaaaaatacaaaaattagctgggcgaggtggcgtgtgcctgtagtcccagctacttgggaggctgaggcaggagaatcactagaacctaggtagcggaggttgcagtgagctgagatcatgccactgcactccagcctgggcgacagatcgagactccatatcaaaaaccaacaaaaaatgtggcgaaggcatgcaaaatatcagcgcttgttggaacttggcagcctggatgcatgaaggcaatgcagaccaggtagtcaggtagtgagctgaggagcactgatgaagcaactgctgagtgttcagtctgagaactagttctagtagagacattaggtagacttgagttagatttttggagactatacttccaaagagaagtgaacattggtattgcagttttaaccaaatccacctgaaaccacttggactaggtgctaattttcagtcagcctctggagactttaattctgtgcagtctccctcacacagttctttgaatcctttcctctaggtacctaataagcacagctgttgagtctgagaaatgacaaagggccatgaaataaggtacctttttttttttttttttcaattttgtgttttgagatggggtctcctgtgttgcccaggctggtcttgaactcctgtgctcaggagatcctcctgccttggccttccaaagtgctgggattacaggcatgagccactgcacccggccaagggaacttcttggtagacactgaccagtgtggataaatgtgcag

SEQ ID NO: 105411 - DNA, 1059 bp, Homo sapiens
ctgcctccctgtgtcagctcttggcttcattgtcagagcattttagaatttctatatttattcattcattcacttaacaaatagctactgtttccctgtgccgggccctggcaatacaatagcccagccctcaggtggagagacaggttatcaagtgactgcacaaatatcaaaagcagttgcaaataattgtttttagaagcatttttttctttcctgtaggaacaaagatttgttttcattacattgtcaggcttccctttccttgtgtgatgtctgtgtagctctcacacactatgtgggcagaggttatgcctgttttaacaggcatcaaatgctaacacagatggtgaattattaattcctttgttatttctagatgcttatgttttcctcatttgacactgagcaccattgactccttcaggaaacacaggtcttttgaatctctgttctccctctttccttttgtagaaagagcgggatttagaattggccgctcgcatcggccagtcgttgttgaagaagaacaagaccctaaccgagaggaacgagctgctggaggagcaggtggaacacatcagggaggaggtaagacattggaggccgaggcttccagaggggcccgccacaggcctgggagctggaggcatggctgaaggagatgagagaatggagtcctagttggaaggacgctcccgagggcacgaccgcggcctgagcccagaactgtctcttctgaaacgttcacctggggactaaaagccaccttcctgcagctcctgctgctgcttgtgtctcttttctttcctcaggccatgtggatgggatggctaagggcgggcatggtcctcactcagtcgtacatctgtgtgccatgttgggccagccacagtccttgtcctcagagagtctagactctaacgatgcaggctgatcaagatgctccatgcttggcagaagggcacccaggctaacaccacaacgagcaggggttcctgagtcaggctgggcgtgggcagctggagaaggagccctgttaggaggccagctcgtgta

SEQ ID NO: 105412 - DNA, 1093 bp, Homo sapiens
tgactctgaatatgggttgaaaactccaaggaaattgcactgtgcagtcagtagttcctttttagaactgggtgcagcaggggattcctgtttagtcacatgggttctcttgtgtggaatgtgaggatgtggctagatgcactcatgttttgtttgtcactttctatctgaccactggagccttcctgatttgttctggggagacagccttggttggtgggcttgggaccctacactgagctcaggagtgctatctaatggggtgagattctttttcataactgattgagccctgaagaagctgctttgcttctccatgtgggaaaatggtcattatgagttccttcctgcaccctccccactctaccctgtcttttagtaaggatggtttttcttgtgcaaaccacaaagaaaccattctctctgggtctgcatgtgtggttttctgacttcctctcctgattgttgcttctttgtcaaaggggatgccaatgtccagattgctagtatctcagaggaactggccaagaagacggaagatgctgcccgccagcaagaggagatcacacacctgctatcgcaaatagttgatttgcagaaaaaggcaaaagctgtaaggcttctctgtttatctggctgatacaacaatggccatgctgagacggggaagggacatttactccagaagacagtgctctttagtttcatatcttagcagttcgtgttgccgctttgcagaaaaagcttagtggactcagtagtataaaactgattacctgaattggtgacgagtcttatttgtgacctcttatctcctaaaattatattgaattcattaaaaagatgttgtaaatatggacttttgcagtttaacttatggatcatctagtctagtatttgtttttacacagtgcactagatatgtgctgcagtagagcagtatcctcttcagatttaagaagaggcagcaaaatggactttgctattagtgtggggtaaaatgcttccagagagctttggaagatgggggtggggcggtgggctatagagaatgaatgtggatataggaaagactttaccttcaaaataatat

SEQ ID NO: 105413 - DNA, 1011 bp, Homo sapiens
ctgtctccatcattctgaacacatcacccctccctcataagttctgcatcccatctcgtagccatggttacagctccatggtttggccaacggagcatagggtttgcttttagacacctaatggcatatgagtcagcagctttacactcagtgcccagtggcactgccacactcagaacctgcctgggaaactgctcagccagggtctctgacaacagagagtgctgttaagtttgtgttgtgggaagaccgtgagcttctgatgccttggtttactctccatggcccacctgggtgcatacctcttttagagacagagcatttgaattggcgctcacttgacatttgtctttctggcttttcccaggattccttggcagcagagattgagggaacgatgcgcaaggagctgcagttggaagaggccgagtctccagacatcacgtacggccacagtttttacagttttgagattcccagagaccaacttggaccagtgcagtgttcaaaacctagcaatgttgaggctctgggtaccgacagtgattgactattgtccttcccagtccagattaagggaaataatagaacacagctgacagcatccctcagctcctcttattatcttttgttagtgttaatttttatttatttattttttagagatggggtgtctcactttattgggcacgccagagtgcagtggtgtgatcatagctcactgcagcctcgaactcctaggctcaagtaatactgctgcctcagcctcttgagtagctaggactacaggcgcatgccaccatttccagctaatttaaaaaaatcttttgtagacatagggcttcaccatgttgctcaggctgatctcaaactcctggcttcaagtgatcgtcctgccttggccttcccaaagtgttgggattacaggcgtgagccaccactggcctgtgagccactgtgctcctcttcttcttaggttttaaagacaaattgtgaacttccagaaagtcc

SEQ ID NO: 105414 - DNA, 2876 bp, Homo sapiens
tgatttctgctgcgctgagcagtaaacactgccctgctgcagcgtttattctagtgaatattatgaaaaaagaaatctaggagacaaaagtcatacttaagtatttttatttgtgggttaagctttagggatgtgaaacacaatttcactcttgctggcatcacctttaggatacaaccatgcgttcgagtcctgggtttagtgggtgttgaatctctcaaatttcgcattgtgaaggaggcagccaataccctaagaaacaggtggcaggcacaggatagcaggctgctgggggactcgtcataggccaggtgcccttttggctcagttgatcatttttggagggttaaactccagggttgtgcccgcatttgctcactcacggatgccgtgcattctccctagtcaccagaagcgtgtctttgagacagtaagaaacatcaaccaggttgtcaagcagagatctctgaccccttctcccatgaacatccccggctccaaccagtcctcggccatgaactccctcctgtccagctgcgtcagcaccccccggtccagcttctacggcagcgacataggcaacgtcgtcctcgacaacaagaccaacagcatcattctggaaacagaggcagccgacctggggtgagcaagctgggagttttcacttctctgttttggggtgaggagtggtagtatggattgtctgcaggctcagtaattattaagagggaggtagatgagagtcacctgaaaaatacagacctggccgggcgtggtggctcgcgcctataatcctagcactttcggagaccgaggcgggaggattgcctgagctcaggagtttgagaccagcctgggcaacattgcaaaatcccatgtctactaaacatacaaaaaattagctgggcatggtggcatgcacctgtaatctcagctactcaggaggctgaggcaggagaatcgcttgaacccgggaggtggaggttgcagcaagctgataattgcaccactgcactcctgtctgggtgacagagtgagactctgtctcaaaaaaaaaaagcggaccttacagttctccaaatctgttctgcttacccacttgagcctatgcctatccttgatatgatattttaatcagcttaaagatgtataacaagatgataccagaaagtctgctttcctgtgaaatgcttgggggaaggattaatgaatatttttttttttgttaatcttcacggtaaggctacagaatagacatttgttttgtgaccgttttgtagcttgatgttggaaaggctgaggaggactcaggctgtctgtcttgtgaccagaatgtggtcacaaggttcagagggtggggtgcaggggggccaaggtgcccaggactgggctttcctcaggaatggtcagttcctctttgtcctgaagccctgcagaacctggacggacggacggacggacggacagacggacacacacacacacacacacacacacacacacacacacacacacacaccattgtctactttgtgcatccttttcctctgacttaataaaattgattcttccggaccagttggaacagacagacaggaagctccttgatcagagcaggttttgttcagagttggggtctgggctcttttccttcaagagaagagagaaacatgccttaaccccattatccttctggtagccaggaacagcaacctacaggtttcttcctaaaggttcttcagggagatgtttacagggactgaatttacttagtctgtgtgcagatattcatcccaccttagtcctcaccccacctcaaccccactaaaaaagacccctggcgggagtggttctggacacgaatttatttccccctgttgcctaaatgtcaactgcttgccttggttcccatggagaatcctgtagccccagggaacgtccaccgctgtgcattgagcagtcgggcctctgtggccttggagccctgctggcattccaccctcacacccctttcttcttccagaaacgatgagcggagtaagaagccggggacgccgggcaccccaggctcccacgacctggagacggcgctgaggcggctgtccctgcgccgggagaactacctctcggagaggaggttctttgaggaggagcaagagaggaagctccaggagctggcggagaagggcgagctgcgcagcggctccctcacacccactgagagcatcatgtccctgggcacgcactcccgcttctccgagttcaccggcttctctggcatgtccttcagcagccgctcctacctgcctgagaagctccagatcgtgaagccgctggaaggtgatcacgcggggcctcggcccctctctgtcctcctgggggactccctttggtccctgatccacctgcggaaggcggggcacctctgtcacgcctactcctttttcttccgcgacagccacccgcgctgctggtttgagttcctctgagggtggtgctcagcctaggcctccgtccctcccctctggctggcaggtgtgacaatgcacacataggccatgaaactcgccgaggaaagacaagcatgtgcactgtggtcttctagttctttcctttgcctttagaaccttagaaataaaaacttttgtggcggtagaggcactgctaactgattcaaaaattaattaggttttgcctgtgggtgtgaggaatgcagaaaattaatgctttagcttttctgcagttttggtgtcggggagaggttccaagcaaactctattaaatggggatttttttttccccataaccacctgaatgtgatttgtgggcttatgtgttctgatttgaacttcatatagcaaggttgtggcttttgg

SEQ ID NO: 105415 - DNA, 1053 bp, Homo sapiens
ttatttctttttttcttgaatttagaatattttctatttatatttaatagatccaaattaagtatgttgctattgtacccgtgaacccttaaaactgggataagccttgatgtgggtgtctgggaactctttaaacatgtattggcagtgtgcaccttttttttccttttgagtggatttgaaattgttcatttataaatccctttcaagcctccctggctgagatcgacacatgagaagttatttccaaggggtgtttggaaatggcagactctgcgcacaccatgcggcctctccctcaccccaccgcctcccacctcggcctgcctgtgttcccttctcttttgtcttgacttcctgagctgccgactcctggcatctttgactcccttttcttcgctccccagggcaacctggtatcctggagggcttcttgcctacccagaaagtatacccttggtaaaccagtggtgactgcccgagcatccatttgtgcaggaagcctcctgcctttcggtgcccgagaacctcttcagaagtctctcctttgagcatggaatatttatttgtgtggccatgcatatttgggtgccttcttaatctgtagaatggggctagccctgccagcctcacgggccatgcactagcatggtgtcatgtgaggtgttaataagtgttccaagggtaaaatgggttgctctgtcaagtaagttggcaagaacaccgtagcatactaaaggttctgtgatgcccctcagtaaaaacacttaactcaagtttcctgagcatgcttggcctaggaacacttctctttgtagaacacttgtgacaccttgaggtcttcagggacacactccagtgttattacagaccttgcatgatgtcatgtgagtcctggggtttggtgtcatcgagaagatgggctcccctgctttagacctctgtgtggacttactatgttcttaaatcacacctctttaacccaattccttctccctaacccggcagcctctcaaagttgctggcaaaatacagaaaacctaagtaaaggag

SEQ ID NO: 105416 - DNA, 1670 bp, Homo sapiens
tgtctcaggcagcagaagttacccgagccggcctcaggcttccccagaggagatgcaggagccgccagcggccacggaggaggaggaggaggaggaggaggaggaggggtctggtgagggcaccacgataagtcctgtaaacttggcacctttcccggaggcagagttttgggccattctcacctctgttccaggcaccatccgtagtggttctctgtctgtagcttccgctcgtctgtgtgggtgatgattaaagcattctcattgcacagttctgtttttaaatacagagtctgatgcctcctatttgtaacaatgggtgtagctcccctgcccatcttggaggtgcatggcccatcagggatctttaaagtgggagcaggaaaggctgctaaaaaaaaaaaaaaaaaaaaaagtgggcttttgggtccctgaaaacatcagtgcccttcttcctggtctgggtgtctccctgagtctaaggggaagattctcaagtcccctggtgatttccaagtggagctgagcagttttagggaaattgagtgctgggtcattcagaaggtaaatgagatcatctgttacctgtacgctgtattaaaatagaaccaggaaaggctcaggatttcagacatttcatcagccttttcactttcccagcttcaatggaggtatatatgtcattttcttttcagcttacacatgtgttcaaagtggatttttaaaaagtgttttagcaatactccttaaccaaataaaccttcggagaacgtcactaagcttttccagagagaagaccctagatgaagttggaaaagagctctggctgactccacccactgtccccaagcattaaaggtgtggccatgagtttacagaattacccacattccagttgccactgggatgaaaagctttgtgctcagagctctgggaatcatgggatcacatggttactgtttaccccaacagcatgctctgtctagactggacctcccagccccttgtgttgggaaggcaaagcttttgtggagtcaggggggagactgagaaaaaatgaattaaccctgtgttgtcatcctcatgacattcctgaggattcaccaggttagaagtgaggacgtttatctttgtgattcataattttcatttgtgaaggccacaacactccccttgaaatacagggcaggaaagagctgaggttcttggtggtgtctcccattcccctggctaatttcagacagctgtggtcaagggattttacttgggatcaacttttccttttttccttgacattaattttagagaagtcatcaagtcatgtgatttgtttagcacataggtttatttatggtttgattttttttaggcagttatattactagattaagcttgtgagggaatgaaaatgttttttatttgttatctacacactcgaaaaagagaaaccagctgcggtactgtcccatttttgtcatcagcaccagtgtccgtcaggaaggcaggtggtggtgcagaaacatgatgcctggctgattttcgtggctaaaggggtaggccttatgttgattgggatgctcccctacagccttacaggtagaatagaaggtgagttctggaagtgcaaagaagcaccattaagtgcatcttctagaagttgtacagaagga

SEQ ID NO: 105417 - DNA, 1096 bp, Homo sapiens
gttggctcacacccacctgtattaggagatgctaaggaaagccctgtgctctgccgtcagaatatatattaagccagagtaaaacaggccaactgccacctgcaagtggaaaaatgaatgaagaatgaaagaattgactccttcaaaacaaacagcatagagtcaaccctgcttaaaatatccagaacaaagcccacttgttgagcattttctctctggtatcctcacctctgaacactacagagggccccctggtgctcctagaggcacgtgggttgctgaggaggtgtctgaacctgacacccttctaatgtggagggcccttgagggagcaccctgtgttgagaggaggagctgtgcaaccacactgcctagtgaagcacaggtgaagtgctctcttgtgctggccttgaacgcactagtggggaaaggtcttgatgcagctcagccaggccagctcccttcacctgttggtgtctgccacagaaggaaggacaagaggacagagggtatagggaccagctttgttggtgtctgaagactacaaagggatttctgcatttgccctttggacgttttaatagcattctaaaaatccccctctctctagaagataccccaggggcacttgagagaatttctgaccctctctgcacaatgctgtgaaattgtttatctcttaaatcacatacttttcagatgaaacagggtaggcaacttggtgtagtgggaagaagagtcgacttttaattttgcagaaaccaaaaataagttgtgcagaaaccagaaaaagatcttgtgatgtgtggttcgaaatctctgtgatagaaacctcccaggttcctgctggccagatgtctgatcaccgaggagctcagggacctctacggagctgcaggggcagtcgagagctctgttgaagaaatgcttaagcagagaaaaaaataaataccaagcctctgtgaagcccagaactaaggcctttaaaagtgttatcttgtacaacatattacagtttaaaatcacttttgtattttttaaaacaagaaagttgcactgttgcatctgaaactgctcttgattccccgactcctca

SEQ ID NO: 105418 - DNA, 1074 bp, Homo sapiens
aacatctgcacgacagctacgggcagttcatcaacacaggagatcttgaataataatcaaggattaattaagtttaaagcgtatcacattttgtaccagtgtcagaatctgggggaggaagaacaattaaaaaagaattaggggtttttattggtaaatccaaattcattcctaaatcaaatgatgaaaatatttgtcgttgttaatactctaacccatttaatatgtgcctgtctcttcaaaacactaggaagccctccactcaggttgagagaaagaataagaatttaaatagggaattaaagccttaaatccaagaaactctatcctttgagctcccaaatgagcagcatgggatgaacacataataccatcttctgcaaagaactttctgtttagataaagaagggggctttggtgcgtggcatgggcttggtgacttcacagtgagccctcacccaacccccctatttcctgccaagaaggatgttttatgtttctctctctctctcttttttttttttttttttttagaacttgctctcttcctgcacccagggctttaggaatcagcccgttgcttctctgtagcaagcatgaggagcctctgatgatcccagtcttgggtgactcactgtctctctgttgtgtctcaaggaagggaggtgcagcagcatcctggcagtcagtggtgacatgcggagagcccacgggtccaggcgtcctggtggtattttggaagggccaaatctctggctttagcactttggaaacttgttgatcttccttggtcttctacggctattcattgcttctggggaatggtgacttgtgaatttttagcagccttttcctatccccaaaacccatttgtataagatgggtttgcttctgctgatgcaactacgtctctaaaatgtccatcttacactccctattgcaattgaagatccaatatgtaagagggtggaggaggaagtgaacatttgtgaccttttgatttgatattctggccatatgtttaaatgggggtatgcttctgattttaaatccagccttcccttgtttgatttc

SEQ ID NO: 105419 - DNA, 1043 bp, Homo sapiens
aacaacttgttgccatcccattttcattagaaatcagacatcttagagatgtcaagaaagcagctagcagctagggggtatggggacctgtcctgctcacactgctgtgtgtcagaccagacctgatcctggagctcaggaccctagagagccctgatctctggaactcttgccacgttgttgctgaggcagctgaagtccccatctcccaccataacaatcacaaatagacagtagtggagccagcatccccaggcccctttttgtgtaagcagaaagggagctgtgagccttgccctgtttgcaggtttcaagtgcctctccctgcctgtacttctccccttcctctgagcagagctttggtagctgttgccaatgcaaagaaatgtaaagcagcaaaagaagacagcaggttctgacctgaggagggaaaccaaatttatcccacaaaggcccattaccccacccccctcgcctcccacccccagactggatccactactggcccaagaatactgatgagaaacctagtctggattgggtcggaagctggaatttggtgctctgcagaccagtgctcaaaattgtggttatttttgaggactcgccttcaatccagaacatttgcgtttcaccttcctcgcccagatccagttaacaaggtagctcatcacttcttgcatctgttgagtgacatgctggattttaatttttattgtggttgtacttggatgcaaggaatatgttttgttcctcccaatttagcgcaccatcctgggaagtgcatgtctcagaccaactccaccttcaccttcaccacctgtcgcatcctgcatccttcagatgagctcactcgggtcacaccaaggtaagggaccctggctttggggtgggcaggggtggggtgaagtcagggcactcccttccctgcaaggcttaatgttgaggaaagccaagtagagaggctcatagaaaaaccaactgaagccagtgtaagcatctcagcatttgcaggcacttgttctgggtcccatccttccttt

SEQ ID NO: 105420 - DNA, 1077 bp, Homo sapiens
atgaatttcgaacacaccaagccgctaatgagatagcagcttttttctgggacccagagtcacaaccaaattgatttaagaccggacccaagacacctttaacaataggactgaaaggaaaaaggatagggaaaaagcttattaaagaaatgtgtcaacaccaaatgtagaggggaagaaccacaaccaggcataataccaaaccggttccagggggaaacaaggctttggtattccgctggctccagcgctttttctgaaacccgaggctggccagggtgctgtcaccatgcggtctttgattgcagccattcaatgcccacatgcttttccttcttgtttcagaacagcacatggtcacaacaagatattttctttccctccaaagccttttgtctccttgtgcctctttttatccttaggaaaagatccaggtgcttgtgaaaagaatcatgaatgcaacaagggaggctggtcctgttgctgtcgccgattaagttttaaacttttatttattatttatgtctgccgtattttaaataaacattctcgttccttccagtttcagtcatagtgtgtctgtggcattccagtccaaccatgtgacttatttattctaatttgagggctgcactgtacaccatggtgtcctgtgacaccgtgttccagacatttatggaaggaaaacatcccatataaatgaaactgtcatgctgtgtcctccccggcagcagaagatgtgtccttccattgagtgagggtaaccttatgtccaccaaggatactttgagaaagcccctaaggaacaagcctcagtcccacggtttcagactatttattctctgaacacaagagtattggttaattatgttctcagctctccctgctgttgtatgtgtgcattcactgcaagtaacttatatctttttatttgaatgtattttaaagcagtagatagaataacaaaggaatatgaaaaccatggactgaatggaccattttatgtattcagagagagaagccactcatcattgccagaaataccatgtaaaaattggcagttcagaggttgcaata

SEQ ID NO: 105421 - DNA, 1015 bp, Homo sapiens
gaagatgtccctcacttttcagggctgtgtactattccactgtgtgcatacacctgctgtgaattatacatacctttatgaaccatcccttacagatggtcactgggataattctttttttttttttttttgtggagacaggatctcactccattgcccaggctgcagtacagtggcacgaacatggcttactgcagccttgacctcctgggctcaagtaatcctcctgcctcagcctcccaagtagctgggatcacaggtgtgtgccaccatgcacagctaatttttattttgtattctttgtagaggtgggggtctcaccgtgttgctcatgctcttcttgaagtcctgggctcaagcaatcctcctgcctcagcctcccaaagcaccgagattacaggtgtgagccactgtgcctggtgtcactgggttaattctaatcttttgctatcacggtactgtaatgaaaaaaccttacatatatgcaattgtccacatatgtgagtacatctgtgaaataaattcctggatggttattgccaaattgccttccatagagttaagagacaaccaaggacagtggaggtccaccagatggagaattgtgagaagaacaaaagaaaaaaataaatattctgccacctcaatatttgaaagcagtgagattatgcaaataaacactgtggtaggatgtggcatcatggattttaagtcaggtgctaaccatttggcagtggtgtgaccttgggcaagccacttaccctctttaggtcctccattttttttttttttaaacctgtgacatgaaaacagtaatgcaccttagagttaattagttgagtcaatgtattttgagcacctaccatgtgccaggcatttaagtactggggacgaataagtgagccagtttctgctgtcacggagtgtacaatctagagagaacaacaccaagtgtagaataacaagggctgtgcagagaattaaaacagggtggtgtgaaggagtgggtggctgc

SEQ ID NO: 105422 - DNA, 1050 bp, Homo sapiens
tccatccctcactaaggaccaaggaactgtagtcaggcctccttcctgcctccctgtcaggacagccccgtgcaacctccgcagggctgtgcctcccctctcagactggaggctccttgaggtgggagcctggcagagggaggaagagagtgggtgcctatggcctcaggccccagggctggaggcacctgcactgtgctcacccatgtgtcttctgccttacccccataggctgcagcaagatgtgggacaacctcacctgctggccagccacccctcggggccaggtagttgtcttggcctgtcccctcatcttcaagctcttctcctccattcaaggtaagacccctgggttgaagaggtgatgtgagtggggccggctggagtggggactcacctctcaaggaagtggaaaggcaaaggaaagtggtcaaagaggctggagcaatccgagggactccctggcagaggaggcaatggtgctgggtctttaaagaactcacaggatttgattagctcttcacataaagataagcatgtgggaaaggctcactaaatatttgctcaacaattgataactgattgactgacaggtacttgattaaattatgactcccatagtcctgttgtcttgggctggtcttgattcagtctttcgatgcctggagcctatgacctcttgggctccatgaagccaccacatgactttgcttacacaccttgtcatgttccacttaaatgaatgtccacagaatgaggcagaaaagaaaagggggagcccctttaggaggtggctttctagctagtgagtcattaaagagattcacaatatagattcagtcattcttttgtgcagtgaatgaagcacttaccagtgtgccaggcactgagctggacaaacacagtggagagaggataaaacagcccccggggctgctctcccagagctagcattctcattggagagacatttagtaaggaaataaacagatgtatcatcaataataaaaagtgctggacgagagaataaggagagtggggactaactta

SEQ ID NO: 105423 - DNA, 1026 bp, Homo sapiens
tgctggtggagggcctctacctgtacaccctgcttgccgtctccttcttctctgagcggaagtacttctgggggtacatactcatcggctggggtatggtaccagggagggcttccaggctggggacagagggggcaaggcctggagaactccctagggggagggtgccaacccagcttgcagtcctacgtcttgcttagctgcaggtcctgcctgcaaggatatcagccaagggtcaagaaagtcctcaaaatgtctgatcccaggacaagtccctcaggttgcagctgcacctagggctgacctgtgggacagattttgtgaacatctttccatttccctttagttcccgaaatacacagggccactgctaatctataaagggcctctgtcacaattagaaagagaatgtccgtctaggtagacacagcccttcaggcatacagcttcaccccctcagtggagcatccctccgtggtgaacaacctatgcaaccaaagacagcagactgacaacccacccttttctctctccctccctctccctgcttttctccaaaatctctccctcatgccctctacccctgcttcctgtgccctctctgctctttcactctccctgggcctgacaggggtacccagcacattcaccatggtgtggaccatcgccaggatccattttgaggattatgggtgagctgctgccccacacactcccccggccgccatcacttgggcaggccccctgggtgggatgataatgccatctggccttggtgagtggacaaaaaccacagctctcgggccagaggggaggctggaggaggacctggggagcaacagactctgggcccggggttgctaaagtgctcaggagcagagctggggacaactgggggaggtgctgctgagtctctctctggctgaggacaatccctctcattcctccccacggtctgctcaggtgctgggacaccatcaactcctcactgtggtggatcataaagggccccatcctcacctccat

SEQ ID NO: 105424 - DNA, 1017 bp, Homo sapiens
acggtggcttgtgcctgtagccccagctactcaggaggctgaggcaggagaatctcttgaacccgggaggtggaggttgcagtgagccgagatcgagccactgcactccagcctggtgacaaagcaagactccgtctcaaaaaaaaaaaaaaaaaaagtcggtaagaacggcttaaaaatggactgttttcttttcctatgtggcattgggttgccatgtagacctgtaccccaggtgctttgggcatctgagcctatgatccatattcagcaggcagtaaagaaacggtccttgaagatgagtccttcctggtaatgcttcctgaccaccgaggcactaccagagatgttatccacaccaggtcgaatgtgtggatatcagttaacatctacatggggtgagattgacttttgcaaacaaaagggaaaagatgcactagaaaaacagtacaagtaatgaccacaaaaacattgtttgactgaaatccagctagctaaaagaatcctcagctcactgaaggaagagactgaaaataggaaagaagttctggtgatttcatccgagggaaatccccaggcttaggtttgacttggttcagggttggaggtttatagcctcttgtgtgatccttgataccagcaaactggttccaaatcccaggagttatcctcactccaccatggactcactgttgttgtagcacttttgttttcccagtagttaaatgctacctgtgcagctgacatcactggactagatctgggaatagatgaaataatgttgaaaacaaaactttagaggtgccttctggtatcagatgctgcaaggccttgagcatcagagtgtgttaagtcccatctactgtatcaaggccagagtgtggctccatgctcttaggaagggtttcccaaccacggggccagagcccaaaaggtttccccttccctaatatgctaatgaacgaaacatgtaaatctgttttcccctgttaggctagtcttactgtgatgagaagt

SEQ ID NO: 105425 - DNA, 1100 bp, Homo sapiens
gagaatgaccagctgatccgctgtattgtggagtatcagaacaagggccgcgggaacgagtgcgtgcagtaagtacccccacccccgcgcccctgacctgtgggtagaggggaagcctgtgtgatgcggtgctttctcgaactaagagtcttgggtgattgatcgcagttaagcccctctttgaactgaggaaagagaggctcaaagagtttgccaacctgcccaagaccatacaacgagtacactgcggagcctggagtcagacgtggctctttcttcaaaatgtgaattattctcactgcaaagcctccttcactcaaagctatgccggctgatgacaacagggatgggggtgagagcacacagaaaactaagctcaggagattagagccatggcccctttctcatcttggatccctgcctcatcctttctctgttaagtgaaggggtcaggccatttgactgctaagcttcctctcatttctaacttcccgtcagtctgttagtgacacacacacaaagacaaacaaaggatttacaagttaagtcaaaggtaaattgtgcataataatttaatgcactccctaagtagataccaaaatgagagaaaatagagtctgagtctcttttccgaatctagtccaggtattacgcccatttttttcttttctttttttttttctttttgagacagtctccctctgtcacccaggctggagtgcagtggtgcaatctcggctcactgcaacctccacctctgaggttcaagcaattctcgtgcctcagcctctgagtagctgggactacaggcgtgtgccaccacgccctgctaatttttatatttgtagtagagacagggtttcaccatgttggccagactggtctcaaactcctgacctcagatgatccacccacctcgacctcccaaagtgttggaattacaggcatgagccaccacggccgaccttatgcccatttcttatagaaaaatatattatttcattgttactgaagaaatgtttcacaatccctaccccctagaaaaattacctacagtccctcactgaataccttaatagaatagtagagatatcagtttt

SEQ ID NO: 105426 - DNA, 2062 bp, Homo sapiens
tttttttagaggcagaatttcaccctgttggccaagctgatttcaaactcctgacctcaagtgatctgcctcggcctcccaaaatgttgggattacaggcgtgtgccattgcgcctgacctcattctttgactagagtgataagtgtgtctagtattatgtcctatagcatgtagagtctgtaccacacaattttacatttacatgctgctttggattatttattttggtttgcgtgcatgtgtgtatgttaaattatcatgtcatctatttcttatatctcttccagtgcctagcacacaggaaagatttgacacaggattaattggtttgttctttccatggaaggatgtataaataattaaacttcatttcttttttttttttttttttccaggagagaaaggccttgggaaaacaactgggaagaagttatgttataaaggttctacgttccatcgtgtggttaaaaactttatgattcagggtggggacttcagtgaaggtagagctaaaagttgtgttcctaataactccatctatcagtttttaaagtatttcattattacttttagttctaaatattgtgtcagttacagtatgatataaaatgtggtcagtgaatacttgttggatgagtgaatattataggtccagaatgtatgaaaaagcaaagtaccacgtaagacattttattttgtttttatgcagtttattttattaatattatagttacttagtgaattcctttacaatgaatgccaaagtactgtctgattgcttttgttctggaatgtttttggtgttattactgtttgaaataagtaggttgtgaagatgacttttttgatggtatttcttgtaatgggacttgacatatattttacagatgaagttaattgaggactctgagaattttgattattgcagcagttataacattccaaggtttccttcagcgaattgaagctatcaaaaatgatttctgtgttagtatatttttaatgttcattatggcttaaagtaggtgattatttgcaggtaatggaaaaggtggagaatcaatttatggtggatattttaaaggtaaggcttaatattttacggtcttttgtttcagttctgatattaaagcaagtttgatcatatacttttaatgagaagaggtttacttatagttcactttttgcatgaaactaatgctgcatgaaaatactttatttgcatgaatttggggataaattatattgtaatatataatttttaattgacaagattaattaaggctaactttatggttaaacatgactttcagcatggaggttaggcaactatatacatgaaaactcctatcttcctgcctaaaactgtcaacatattcttttgtttatagagaatgtggtcttttgcaaaatgaaaaggtaagagaacgaagctcagtaacacaaactccaattctgttcccttgcacccttcctaataaatttatggacagtctgggtcaggttgtggctggatttctatattgcttgaagacttggaaaattctgtgtattatttcatacatgcttctgtatcttttttcatttcccaatgggttattaatttcacatcagagaaaagagtctagttgtggggttttttttcccctaaaccaagcaatttctttgaataaaagttgaaatttcgtttttcaaaggtttgtatgttttcttttgtatattagaactatgactgtgtttattctcataatagtagcatctgcataaatctaactattgcacttgccccaaaaagccttagaaaagtcagttgcagagatttgtaatgaaatctaatattactaggttttaacgctataatagcttcagtgttataatagtcttttatatttcctttgggggaaaatggattactactctttttcagaagcctgttcccaaggtaatcactttttaaagttttctgtgtttctgtttgttctgaagaagatttgtttgtatgaatgttaaaaggacatataagttagttttcaaggatattcctgctggaattaaaataac

SEQ ID NO: 105427 - DNA, 8373 bp, Homo sapiens
tactactaaaagtgactgttctaaggctgtttgtgtgaagtattaaatatatgttcttttcctcaaggctttaattagtatcttttggcctttttatgcttttgttatttgattagcttaaatttttcttttctgagtgttcagtcaagttatctgtactgaccagaagaggaatttcatcttttgctttctatttattacttgaacattactttaaagtgacttataattggagactgacaaatttgtgttttcttcaaacagatgaaaactttattctcaaacatgacagagcgttccttttatcaatggcaaatcgagggaaacataccaatggttcccagtttttcatgtgagtaggcataattcagagatgagcttttcttaaacagagaagcgctgttcataagaaagatggtatagttaaaccaagtttaatgctaaaattctgtcagctttatttttattattaatttctaatatcatagtaacttataaggtctaacaactgcctcagcattcagcatatatcctgaattggaagaatgggacttaaaaaatttaaaacttatacattgttttcaaaatatgccgtcatcttcagaaaagatgacggcatatttaagcccctgtcaaattcgagtgctgactttaccaaaactagattggaacataaactattgatgaacatgtaaaaattgttcatagacgagtattcagttactgtaccccctcaacagggaaagcagtttgagtaaaccattgcatggttgttttttcctcttactgttgctctttgaggcaattttgagagaggtactattattttctgatgttgtatagagataggtgacctgctgttgagcgagcattttaaaaaactcattttatgaggtctccatgcataattgaaataacccaatgttgctgtcatttccaccaaaatttatgagattgtcactcaggaaacttaagaatactaaatttgcttttgaaaaagcaaatatatttacatggatgtgcattgcacaaccaaaaacttacctttttattatctgaaaattctaaataaatcctttggcatacttttagttatattcttatctaaggctgcttcaaaacctatttttatcataattctatcatataaaatgtgaaagataactgtccagcatgagggttattgcttttgattggaagtgaatctcagttgtcctatgtatgttggagaaatatttcattaataatttattgaaaacattttctttgtcatctttctgaatgaatgagtatgaatggcgcttccctgtctttaaaggagtatattactgacatacaaaactcaaatgttaaatttgtctgaaaaatatatttctacatgatctgataaagttcagataaggggcattctgttcctaagaatgtcctaaaaatggaaagctgataaaagattatgcttagaattatacaggtaaaagacctacaacagttgttctcttgttttgatcccataggttatttgttattactcttctttaacagagtgattttctattcttaaccttcttaagagccaatacagagtagaaagaaatattttcagaaagcctttttaatagtaacttaatgtaaaaattgtttatcctttggttgaggtttcccatttccatttttaagcttatctgaactgtgaacatgaaaaacgtaatgattcattggtcaagaagctaccatttgagggctctaaagtttcttttagatttccttttttatatcagtacaattaaaatttgatttatcaagtagcagcagcttcttgatattgttacatacattagcttgttcataaaatgttagagttaaaactcattaaaaatgctatcgttaaacataaactaattaaaattcagtatacgagattctcccttcaaaaacatcttatttttattttatttagtacttgcttcagtgttttctaggaatatctagtaaaggcctttactgttttccacatggcctaattttatattggactacaatttttgagaaggaatgccaaatacaaaattttgaatcaataaattacaattataatttttatacttattttcaaagttaatttactttagatggcagtaaaatcactgaacttctgattgaaagaaaattttttagtttgaaatttccttctggaaaggggtttgcagtccctttggaaaggagtaagcaatcctggaagtaattgagtatttaatcctcctatattttttctgaagatttttgtgtcagtatactttctttatgctggctagaaagatcagttctcaagagttgcaggataaaatcaaattaactttcatgtttcagaactaaaacatatccttgcatttatgggaaggataggtaaaaatggagatggtggctgataaaataaaaatctttgaaactatgtttttacaagcccaaagccttttggagttgaaagtattaaaaaaaagtatgatatgctatcttcaggttatgtatatgatcacagataatagctctgatggtcacagagcttgctgatggcttccaaaggatggctcctgccttttaccttgttaccacagctcctcatagggcactttgagtggcagttctggaatctgaaaaagaaaggatagtgtaagaatggtggtaaaataaaaagaactgtctttatagttcctgctttataggctcaataaggatttttaatacatccttgcaaaattgtttttgtagtttttgttacaaatctgttactttgcaattcctaaggagtagatttggtgctgttagtatgggtatttgcaagacatccctcaaggattcttatgttttgtgcattaactactgtcttcattacttacacatctaaaaactcccccttccttaggcatatgtcatttttattcaacataattttgcatatattgctttctttggctggaacaattatatacatgatgaaaatcagattttcttctataaatctatttgtaatttttacagtaactttatttctagtactgtatttgtcataatgattttgctctcgggggtctatatagaagaaaacttgattctttttggaatagtactgctcaagaaatgtggaagaagtgatatatggcactatacccatgaatcactaaagaaacagtggttttattttgaacatttttgaagaaattcaaagatttgggactaaagttaccaagttaatttggtatttattttgtcctttgtattcttattttttaggttaaagaataggaagaaaccacaataaaagctggaattataaagtcatagagtggaaagggatttagagattatctagtccaaccttttcattctgtagattatgctaaattcttgaaaagtcatgtaaagtccaggttatagaaattttatttacaatctggaagaaactgatagctagaaaaagaatgctgcatacttattcatattattaatgcctttactataaatttaagcttatttaagctcaaaattttattaaccactctgctctgaatttattttagttaaggattagaagcatcaaacattttgctggaaaacaaaatgacatttggggaaacattctttccccttttgctgttactgatagcttattaattctggctgtaatttttttgtctttatatacattaatcaaaaagacaaagatgttgtataaaatagtcatgaaaaagattgagtaaatagtttatagctttgtagtaacttctgggataggacactaatatagctgtcaggaaaccttgattttagtttcctatgtaccttcagttcgtttttcttaaacattggtataaaaatatggatgtaaaaggaagaaggtattttgtagggtagttgtaagttcctgaatgtgtggaatgatttatgtgcaaacattgtcttgcctaatggaaatagtcataattgcctagttttcattagtctgaaaaatgtcttaaagaagtattgggctcatcttaaatcaagagcaacagaagtctcttcatcagctgctgttagaacatgagtctgcgcagccatagagtagggatctgcagaccctgcaagaacagttcctgtcactggccactgtcagtggtcattaataattataacaatgtaagaaaacaagataatatagaagagtcaaactttgaactttaaacaaaacatgtttgctacattttaacagtcataaatagggcaatgggggggcggggcataagttttagaatatgttttatgtcatttaagaatctgacttgcaagtacctgaatgggagagaagtgctgattattacaaagtagtggagcaaggagagttgaggagtagttggttttaaggggtttgtaaagctgtgttgatgttttgggtaataaaactagattcggggtagaaatgctttttctacccacgtattcataaatttatgtaagaagaaatgctagtaagtgttaataacctgagaagctctagctttttccttcctttttttggggtaataccttcatatgttaatttcagattttttcatgagcaaagatgttcgtgaaacttagccataaaccatattctctgaatatcaagtgtcatccctaacattcaggcttaataacttaatgtttatgtgacttacgtgctagcaatgtggaagaaattttttatctagtaatgtttggtgtgtattatcttaacattagtgctgaattttagaaagcacttctattttggtgacttttggaacacatgggtagagcattgtcaagtggcttggttagtttccattacccttatacaagtgttgtcattctgtacaatttggtgcctcttccctgacagtgtgatagtttcaggagttgaagggaaagcattgcatgttaaaagctaaagtggacagaagttatctttatttccctcttctgtactactttacacctacagtcacttattttttttttttgcaacattcattgaaaactccacattatttcaaacattatgttcttttttgacttattcatgttgtcaatgcctttatgataattttaagcttatttttaaatatttcaagatttattacattcaaaactcttataaagcattttgttcatggtataatagtattttgatctgagtagtaatagatttatttgtttaaatatagataaaaattggtcagtgtgtgttctccaaaaaaaaatcttgataatggggaaaatcagagattagacaggaaaagaagatattgtggctaagatttgactgcacttacgctttcatctctcttgcctttttattctctgagaaggtccctaaaattgtagttaatgctgctttattattatgttcagtgacttaacttcaatgtgtatctaatatcactgaacagtaactagggtccgaacatttgctcattaactcctgaaagtagtctgttgtgatacgtcaccaaacaaaggtttcaaatgtagaagcatgaaaggttctttaattatttgatgtgaattagttaaaagttccttgaaattttattttggatgatcttaactcacttttttctaatgaaatttttgctttcaactggtagtaactggtcctgggcattcagatttttatatttatgtatgtatgcaagatacactattctcttttgagaaaatgttgtcttagctaatttctgggatttgtgaaaggaaatgtaatatgttaatagctattattggcactctatgttacaatattaaggatctaaatagattcccacttagccacgatgcttttcttaagcataattcatctctacgtaaatatcccatatgaaagaaaatttagagccctccatttaaaaaagctttcttgctctgcataaaacttgaaaataattaatttcaaagttatattgatattaaaacatagattcagtcttgtcttaaaagtgtattacaatttatttcttgccatttttgtgtaaaatttacagaaagagtgttacaccgtgcgctccaaaggtaatgtctcattactctaaggctctctctctctttgcctttatctctttaattctgttgttatgtgcattgaaacattttaagaaaaaaaaaaactttctgctttatctgtatagcagcagtacatgtaaaacaagtgcattttatttttcatggttaatcctgggaactatattttaacttcagtggcttgtttccaccaagttcctgtacatcttctggtgggggagtggggttattagtttatagtatggttttagttctcatttcagtgtggaattagtcatttctgtataagggcaaaaggttctctgataatggtataaaactatagattgtttttggagtagcagtgacacttgtcaatttctaagatttataaggcttaaataccttgcacacatgttttttaaagtagattcaggggtcgggaaaactgaaaaatcactgtctttaagtacaagagaaaaatggaaatgcataaatattgaaaggttttacaatttgaaatgttctttgtggttttttcttttttaggtatgttttcataagcatatataaatttaaacatttttgatagcctctggccttaacttactgagcatgtgtcaccattgcacagctctttaaacagccgcttttaagatcaatgcaatttttcttttaattgaagattttgaaagattaagagttagtgagatgagctctctgcctcttttagtagaattgaatagtctggattgtggatattatttctctccgcccttttgtaaccctctttggctaatgtcctctgttcatccacgtattagccaagtgccagtaaccctgctttacattgggatttctactcctggaatgtaggttgagaaccccagagggcttctttttgttaaatacttttagtattcttaatatgtaatctaatccaattaaagtgcagacttatatttctgtatcttgagttgcagatgcaagtaatggactttaatcattcatatcaggtttaggcactatgggcaggctgagttgtccttgaaatagtcattcgtgtcttcatttgttttctgcactactgctataaaggaccaagtttgcctattcttggcagttttcatttgaattaaaaactaaacttgaatgtcataaagatagctattccatcctcaaattgagtctcaagtagtatgttgctgcatcgctacactactctggaatgttttattccaccattttctccaaaggtttgccataaagtggtttttacagcctttctatcagccaagatggcaaattgaattgggctctttatgttttaagaaaaatttgcaggctttccccaatactgcaggatctgtgagtcatgggaggaacggatcaaagaaggagaaggaatgtatctaatcaggaaaccatacatcgtttttacttctaaatatttggggctgatcccttacactgtagaaaaatttacttttttaaaagcccttttggctgggtgtggtggctcatgcctataatcccagcactttgagaggctgaggcaggtggatcacctgaggtcaggagtttgagaccagcttggccaacatggtgaaaccccgtctctactaaaattacagaaattagatgggcctggtggcgcatgcctataatcccagctactcaggaggctgaggcaggagaatcacttgaatccgggaggcagaggttgcattgagccgagatcatgccatcgcactctagcctgggcaacagagtgagactccatctcaaaataaacaaacaaataaaaataaaagcactctttacatctttcatataatagagtcactagcttctgtaccaatttcttgtctttagtgtactttggtaaagttttataattaaagcacatttctatcttgaagttaccatccaaggtggtttctggatgctagtttaatgatttaaacactagtggctcactaattcactagatagtttttgttctgttttctttttgctgcctgtttttatttttataattacattggcatgaatttccacttttcaatcttctaaggaatatttgagatttttgcttttaaaacttaatatttcctttaaaattctggaacttcttaagttgacattttaatttttttaaattaaattctgtagtgctcttacagaaccgaatattcttaatgtaagtataagcattacaaatccttgtagaataaatatttttagcattgttacgaaggttaaaaactgggttttgttcacttacatgtcttaaaattgccttaaaatgaatacagaaat

SEQ ID NO: 105428 - DNA, 5675 bp, Homo sapiens
acgctgataaattttgagggtttttttttttaagtgttttgttttgttgttttggagttgagagtaactttaatttttatgtgtattcatgctgtgtatttatggctacaagtcaaactgatttcatatgtatgcatacatatagtctaatagagatgattgtaattcattataatcttgagttttttaaattagtaagatggctactattgctgttttggggtttttaaggttagatatatatcatgtttaactttttcccctatctttttatctttacttctttgttctctacatgctgtgtttaaacctttctgctctcttcacctgaacacatcgtgtttgacatcatctttgtgttgatgtttattacatagtaccacaaagcctgctccacacctggatgggtaagagttacattcttactacattggggaagtgtttgggtggccagccataaagagagattggaccatggttgagccctcaagggagcgctcttgatgtctggcttaatctcatagcaaaagctattccttaggatcacagaatatacttgttttgagaccccatggctctcatgtgactgaaggagtcaatctgtgctcatggatgggcttctcagcaatataattctttttattttttatttttctcttcagttttccaaaatgggtcggatagtaagcagtacaatatcatgtgtccctgtaaggaaggttcccaagtaccaagcgaaatctgaatgttaccagactctttaccctaaaatggttaagaaccattgttttaaaggcagaaaactgaggcccagtttgcataatcgtttccttttatgaagcagatttcaagttctcattccattctagttgcttcatacaacaaacagtttggttttattttcaggtctgtggacatgtcattgattacagttaattgtcttgattactgtttatagcttaattatcaaaccagttgtttcttgaatttgtattatgacagggtgcatgtagtctttggactggttatttctggttttgaagtaatcgaacaaattgaaaatctgaagaccgatgctgcaagcagaccatatgcagatgtgcgagttattgactgtggagtacttgccacaaaatcaataaaagatggtaagaacttttttgacagtagatgaagctaagatgcaggtaaagcattgctgaagactgtaactagatttgattagtggaactagtggtatagcaatagcccttggtgcccctgaatcataccctacatgtttaatcttttagcatatcttgtcagatcttactttttcttatttccttgccaccagccttatccacaccaccagtattttgtgtctggattattgccgtagcgtcgtaactgtttaccttgcctccgttctataatcttttgtcagcagcaatagcctcctaactggtctcattgcttatatcctaggcccgctgtggtctgtccttaacagcaaccagagtgatccctttgaaccatagtttgcattcatgtcacgcctgcacagaaccctccaaggactcccatcttcaatcatccaaagcagaagtctttatggtggtctctaaggccctggctggtctggctctctgctgtctctctaaactcttttcccttattcattgccttccaggcacattgaccttttttcagacatgccaaccactcagggattttgtgctgcctattctctttgtctggaacaccctttgttaagatatctgcatgacactgtcccttgctcttaagtctctgttcaaatgttatgttaaactacccctagtcttcctattccctttacactgctttgtttttctgtcttagcacttaatcatttgtcatattatgcaattctttttttttttttttttttttttttgagacaagagtcttgctctgtcacccaggctggagtgcagtggcactatctcggctcactgcaacctctgcctcctgggttcaggtgattctcctgcctcagcctctggagtagctgggattatagggatgcaccaccatgcctggctaatttttgttatttttagtagagacatggtttcaccatgttggccaggctggtcttgtactcctgacctcaagtgatttgctcaccttggcctcccacagtgttaggattacagatatgagtcactgcaccgggcctatttcttgttacttgacccaacaagaatataggcttcataaagacaagggacttactaccttacaatcttgccagtaattttattataaacttgaaaaaaactgtctacatttcattttttgtttgctgtatgtaaagcatattttatgatattcagtaatcacattttttactctgaaaggtaggcactgaatttagtactaatgtttttattaatgtttcttaaaagtttttgagaaaaaaaggaagaaaccaactcattcagaaggctcggattcctcttccaattcctcctcttcttcagaatcatcttcagaaagtgaacttgaacatgagagaagcagaaggaggaaacataagaggaggccaaaagttaaacgttctaaaaagaggcgaaaggaagcaagcagttcagaagagccaaggaataaacatgcaatgaacccaaaagggtacgtgtaaaacaccaatgtactcttacctaaaaacaaacactctggaatgggaaaagtatgtataattctataaactcaattttattacctgttattgaaaaaggatagcactttttaaactttaaattgaaatctggcaaatctaggagtaggtagcataggcatttcatttcaaagatttgtgtgttttcagttttcgggtgaaaatagtcctaagaactctttttttaagagatagggtcttgctctgttatccaggctggaatacagtggcacaattatagctcactgcatcctccacctcctgggctcaagagatctttctgcatcagcctcctgagtagctaggactacgggcgtataccactatgcttggctaatttttaaattttttgtagagacagggtcttccgctatgttgaccaggctggtctctgactcctgtcctcaagcaatcctcccacctaagacccctaaagtactgggattacaggtgtgagccacaatgcctggcctcctggaactcttaaaataaaaaagttaggatcatttaacaattttcctatcaaaattctagtctttgggtttttcactgggttgatattgttctctttgtgaaaatcatataactcttttgagtgagacttgtaagctatcgttaattatgctgttgttttagtaactaattttatgtgcttttattatgaaatgcaaacattatacattttaatcagtgacttggtttgttctaagtcactctgagaggagtgataccaatgaaaaaaggtcagttgattccagtgctaaaagggaaaaacctgtggtccgcccagaagagattcctccagtgcctgagaaccgatttttactgagaagagatatgcctgttgttactgcagaacctgaaccgtaagtaggatgactaaactatttatttttatttctccgataacactgttccgtcagctcattgcattccacactcatgtatggaacatgatccatgtttgaagcacattgaaagatagtatgggagtattagattaatgaatgatacgtaggaaatatgggggataccagattattgagtgatatgtaccctacctttcagaattcacattctagcagggagaggaggttgggcaagttggtcagggaagcccttattggggatctggaaagattttattcctgatcttcttgcctttgccttttattagaggggtgaggttttagttatcagaatagagagttagttgaattctttggatccatttgagtgatgaagcatgggttccaatttgaatagtgcataattaattgcatgatgattggagatacaatttagtatcataaataagttacttttgttaacttgttcaacaattacttcctgcattggaaaagtgaatgtgtcgctttagatttggtctgagaaaatagtatttaatgtattttgtgtgttagactcaagtttagaattattgaaagaaaatgtttcatgaacagaaatatcataatggctggtgtcattgataagttccctatgaagagttattttgaaagctgaaaagtataagagtccttatttataattagctctctgcataaagttatcatttagttcattaaatattttttaaagcctgatattgtcttgttttaaaaagctattgcaaaatggcatgtatctttgaattaatagcttaacataatgtgttttcattattaaaaattctagcttctttgcttatttttaattttcatcacaatcttcttttcctaggaagattcctgatgttgcacccattgtaagtgatcagaaaccatctgtatcaaagtctggacggaagattaaaggaaggggcacaattgtatgtgtgataagactttttttgatattatgtatctaataaaaaatttttacctattttcaaagtcctagcgttaattttagatataatacaaaatctgttcaaggaactaattgtattttccatggttatgggaaggtattgctgttagatcaaagtatactgctgtgtttgaatgggtttaattgagtatgaaaggaggaacatgtgaaaccatcagtgagtatgctgagaaatcattaagactttaaaaaggaaaattttatgtggattacaggtgaatctcagccttgcccatctcttttaatgccttgtttgaaataacttcacctgaacctaaaataaaagttaaaaactaaaaaaaaaaaaaaaaaaaaagaactttagaccatccttttggtaacttcaatcattacctttgatgggatgatctgagattgggtcttttacttaactctgtcacatagcagactgtcgtggagaggcattttttaaaatactattgtttttgtttttaaagcgctatcacacacctccaagatcaagatcctgttctgagtcagatgatgatgacagcagtgaaactcctcctcactggaaagaggaaatgcagagattaagagcatatagaccacctagtggagaaaaatggagtaaaggagataagtaagaactttgagtataagcacaatcctgtgtctgttatattttaaatgttaaagggattggatacaattctggacttttcattaaagattcagtgaaagattcacagtcagactgtgaccaaaggaaatacatttgggactacttgatgaaagtagtactgttaactagttgggcttttaaatcaaaatcctgttttccttaacaaaaactataagcctgtgtcttttaatgacctcttagtcaattttagaaataattaggacttagaggccgggcgtggtggctcacgcttgtcatcccagcactttgggaggccgaggcaggcggatcacgaggtcaggagattgggaccacagtgaaaccccatctctactaaaaatacaaaaaattagccgggcgtggtggcgggtgcctgtagtcccagctacttagagaggctgaggcaggagaatggtgtgaacccgggaggtggag

SEQ ID NO: 105429 - DNA, 3039 bp, Homo sapiens
aaggatgtccagagctctttaacccattccagcagagactcatacagatcaaaatctcactcacagtcttattctagaggaagctcaagatcaaggactgcgtcaaagtcctcatcacattctcgaagtagatcaaagtccagatctagttccaagtctgggcaccgaaagagagcatcaaaatcaccaagaaaaacagcttctcagttaagtgaaaataaaccagttaaaacagaacctttaagagcaaccatggcacaaaatgaaaatgtagtagtacaaccagttgtagcagaaaatattcctgtaataccactgagtgacagtccccccccttcaagatggaagcctggacagaaaccttggaagccctcttatgagcgaattcaggaaatgaaagctaaaacaacccatttgctacccatccaaagcacttacagtttagcaaatattaaagagactggtagctcatcatcctaccataaaagagaaaaaaattcggaaagtgatcagagcacttattcaaaatacagtgatagaagttcagaaagctcaccaaggtcaaggagcagatcttctaggagtagatcttattccagatcatatacaagatcacgtagtctagctagttcacattcaaggtctaggtctccatcatctagatctcattcacgaaataaatacagtgatcattcacagtgtagtagatcatcttcatatacttctattagcagtgatgatggaaggcgagctaagaggagacttagatccagtgggaaaaaaaatagcgtttcacataaaaagcatagcagcagctctgaaaagacacttcacagtaaatatgtcaaaggtagagacaggtcttcatgtgtgagaaagtatagcgagagcagatcatctttagattattcttcagacagtgagcagtcaagtgttcaggccacacagtcagcccaggaaaaagagaagcagggccaaatggaaagaacacataataaacaagaaaaaaacagaggtgaagaaaaatccaagtctgaacgggaatgccctcattcaaaaaaaagaactttgaaagagaatctttctgatcaccttagaaatggcagtaagcccaaaaggaagaattatgctggtagtaaatgggactctgagtcaaattcagaacgagatgtcactaaaaacagtaaaaatgactcccatccatcctctgacaaggaagaaggtgaggccacatccgattctgaatcagaggttagtgaaattcacatcaaagtcaaacccacaaccaagtcgtccacaaatacttcactgcctgatgataatggtgcttggaaatcaagcaaacagcgcacatcaacttctgactctgaggggtcctgttccaattcggaaaacaataggggaaagccacaaaagcacaaacatgggtcaaaggaaaatcttaaaagagaacacaccaaaaaagtgaaagagaaattgaaagggaaaaaagacaaaaagcataaggctccaaaacgaaagcaagcatttcactggcagcctccactagaatttggtgaagaggaggaggaggagattgatgacaagcaagttactcaggaatcaaaagagaaaaaagtttctgaaaacaatgaaaccataaaagataatattctaaaaactgagaaatccagtgaagaggacctttcaggtaaacatgatacagtgactgtttcatcagatcttgatcagtttactaaagatgatagtaaactcagtatttctcccacagctttaaatactgaggaaaatgtggcctgtttacaaaacattcagcacgttgaagaaagtgttcccaatggagtggaagatgtgcttcaaacagatgacaacatggagatctgcactcctgataggagttccccagcaaaagtagaggagacttcccctctaggaaatgcacggcttgataccccagatataaacattgttttgaagcaggatatggcaacggaacatcctcaagcagaggtagtaaaacaggaaagcagcatgtccgaaagtaaagtgttgggtgaagtggggaaacaggacagcagctctgctagcttggctagtgctggagaaagtaccgggaagaaggaggtggctgagaagagccagatcaacctcattgataagaaatggaagcccctgcaaggtgtggggaacctggcagcacctaatgctgccacatccagtgctgtggaagttaaggtgttgaccactgtgcctgaaatgaaaccacaaggcttgagaatagaaattaaaagcaaaaataaagttcggcctgggtctctctttgatgaagtaagaaagacagcacgcttaaaccgtagaccaagaaatcaggagagttcaagtgatgagcagacgcctagtcgggatgatgatagccagtccaggagtccaagtagatctcgaagtaaatctgaaaccaaatcaagacacagaacaaggtctgtctcctatagtcactcaagaagtcgatcgagaagttccacatcatcttatcggtgagcaatattctctttcctttcttctcccaaggagagtctgttattgtttagcttggaagaatatcagaattagggacagaatcactatttccaaatatctgaaaggaataagaagtcttgttttgtgtgattcagagagtagattgaaaacttagggagagggaatttcaggaggagaaatttgggctgggtttacaaaactattactatcagtttaaagctctctgtcactagaaatgagttcccatgataggtggtaaattctccatctttaaaggtgtgaggctgcttcttgccagtcaagtgatgccttagaagggaatcctgaattgacagaatatatagaatttgcagatcattaatctaaccttccattttacacatgtggaagttgagggccagagagacaaagttacctgcccaagacatgcatcttagtttagatggggcatagggataaaaatgatcatctttagatttttgttgttgtttgaaaagcaat

SEQ ID NO: 105430 - DNA, 2671 bp, Homo sapiens
tgggatcttatcagagtgaggcaagaggagcagtagaaatatttaagaagccttgacccctacctccacctcccccacatgcatcttccttaacctaagttttacatctgcattcacctcttgacatgggttagagattgggataggaagattgtagagaggggaccaagaggaagaagtatatatatggtgggaagggtggccccagatttctagttctcctagcttctttccctcttttgcatctgaggtattttctactgctgtcacttcactttacttacaaaggtcctacctgtacagacctttcccctaactccacccagtttagagcctccctagtgactatatgcatctcagagaagaactgcataaaacttgatcttatgaaatccaataggctttttaaaaaatccaatatacttttgatatgaaaacaaaacaaatgtagctgtgggatttcactgtattttcaccttgatgggcaaataaatgtctagatatttggtatagcctgtcctgccctgatctataagatgatggtccttcatgtgattaatattaggacgtccagcaggagcagatccaggagcagctcatatgatccccacagtcgatccaggtatgaacagggattgggaaaccaccagtggggcagaactgaaagatcttgttttgtaaactgtttgttcaaagtggtattttattgagtaactaaatgcatatatttgtctcctgaaaccataccttttctaaatgaggtctgttcgacaagttttatctgttggcccattgtactccagtgtcaaaaatgacaatatcaaattgtaatggcaggtgtttattgaatataattgcctacagagatccaccaggttcaaactaactcgttaactttgtgatatttttcaatgcagaaaagaaattaacatttttctctttaattatggtaagtctcatttggggcaattgttaaatgtttccagtacttgttttggaaatatatcctcatgctgtcacctagtgcccatgttctaagctagaacactcctgagatcctaaaaagaaataggaacatatgagtatctgagtgggaaaatttagtgtttgttgttgccgttaaagcaggtcctacacctacgatagctactatagcaggagtcggagtcgaagtagaagccagagaagtgacagttaccaccgaggcagaagttataatcggcggtccaggtgggtctctctcctttatcgtcctttatcgcactgtaggccacggtgggcacttgatgtgggagggtgatgggctgctagtggaagagaaagtggtataatcttccaaggacagaaatacttcttcctttaaatctgaacaacccacaagcagccactaaaagtggcttttatattaagagttgccaggtaatatttgttggttattattaatgtttgaatctaaaatgggtttctaaatattcacatatcttggacagacctttcttttggaaagaaagaaggccacccaaaccatggccacttgcttaaatagaaccacttgctagcagtagccagtttctcattttttttaaataaaaaaatacataatataatttgcttcagcagcaggattgaggtttatatgttgtcaattatttagtaaaatacattttttatgtattatatgtattatgtttaacatattttggcttctgcaaaagtctttatgttaacttttgtactgtccttttctggtggcttctggtcttgccttcccctgtccattgcaactgcaatgatgcttgtaaatatcagtctgatctggatactcccttgcttgaaactcttcaaggactccctgctgctttcatgatcaggtccagcctcctcagcaccaactccagctcacactctttctggcttccctcctttaaagtgttgggacttttccttctgcctggagacacacgtgtcctcttcaccatctccccttttgccacttgaaatggccagttcccatctaccctgcagatctccactgtccctgggcagccctccctgatgcctaatcctaggatacagtccctcccatgtgcctctaagacagccctttgctcctactgtggctccccttgctcctaaattacttgtcttgctgactattctattctgtccttgaaccccagagaactatacttggttttgtgtctttgtgtgtgtgtgtgtgtgttcccagcatcttgcaaaatgcctggctcacagtgaatgtttttcaaaataactgaatgggacccatgaccaggtcctcttgactcaatatcccagtggtcctgttcatgcccagggccacccccacccctcattggaccccattttggtttccattccttgagtgaaactatttgtgcaccttttccccattacttttctcaggtaatctattcaaatattgatactcattttgggtaatatggggaaactattctgctcattggttttttgtttttgtggtcccagcatttgcatgaatgaatttcacacaaatttcctaagatgtgatgtttctttattttatcttaatcttgacattactacaacttgtcatttaaaacagcttcaaaaagtccatagtgtgagtcgggcacggtggctcacgcctgtaatcccagcactttgg

SEQ ID NO: 105431 - DNA, 2884 bp, Homo sapiens
gaaaaagaaaagtccatggtgttgccatagtcagtaccctacctctgtgttatgctgcatcaatagtgcatcagttatatgagtggcttgaaaacactattgatgttttcaagccactcatataaaaaacaagctataagaggaattcaaagattttacagttacaagatttttatatattttgttttgttattacaggagttgtagatcttatggctctgacagtgaaagtgaccgaagttactctcatcaccggagccccagtgagagcagcagatacagttgaaaacgtccggatacaaattatatcttatttgtaaatatctggcaacttagcttaagaaatgtaatgacagtctgttgttctatttcaatatcagaggtgaatttcaaaaatagacacttcttaattgttactggttcatttacatgtggggagaagaatttaaaatacagatatgtctcctaaaaatatttttatgccacattttacagtagccaactatggaaatgaatttcattttcttgaatcaagaaatcgtgaaatttatctatgtataatttgcaatattattttaagtctatttcactctatcttacgtatcccttagaatacagattctttttgcctgtttttccagttttagcatatatgctgccaagcatagaactgtgaaggagaactgttaaaggcggccaaatatttatatactgattacatagagtcttgtacatatgtgctctaaaaacaaaccacccagaattgatactgttggtaaccaggagtataaggcagtggctctggggttcttaattcattcctaacttctttgatacttcacaggattaggaaagtggtcatcatacatcccacacagtctgtattacttcaggcttgtgggcaaggttaggaagaatcaatcagccttaactataaatacctgcactgtctctgaggacttactattttatgttctttttaatcaataccgatcagaagtttaggttataaaaacaattctacttcatgctttggtgcttggtaatttttggtgcgtctttaagcattactcttatatatcatatattaaaataccataaaaatgaaattcagacaaaatcactggcaccaaaaatggtttattctgagctgtcttcactttgactatttggggggcttctctcaagtacagatgtgggttggggtcccctggagcaggcaggattggcagtaagagatattggccactcaagtctactgtgtgtgtgtgcctctggaagagtgaagaatggacttcaaaagtaacatcaaaaatctaactgccaccatcctggagacattttgcagggctttcctttcaagtctttcaagtacaggatattaccacaacagcagctgaactgttgtaaccagcatgtttttcctatttccactgtgacctgcagctgactcaaagccttgcgtgacctgacccaggtgcaagagacaggggaagagggatagagggtatagcataaattacatattttcatggctttgggtggttcctccaaaaataattggacctgtaaaaactagtgtgtgtgtgtgtgtgtgtgtgtgtgtgtgtgtggtttttttttttaatctttactttgaatttgttccccaagtgtacttaatcaccttagtgccagtttaatccagttatgcagaagaaattcatattggttgcctgatgtagagctcagcaccaccctaccacaggccttgtctggtgtatttgggaagtggaaaagagccctcagttggagggagctgacaacccttggtggagggagggtgcccttgaatgtattaaaactatcacccaaagaaggtatgaaaacagggtaaggtggtcagttgtttgccaggtcaatagacagaaagtacattagaaaacaggacttaggccaaacaaacaatactggatactgaatacaaaacagtatgatttatattaaaggtttccaaaggttgcctgcaaaggagaatattactactagtcagcaggaaaaaaatgcattcagaacccaagcagaaactgccaaatgtaattaggttaagaaaagttacccttgggcagtgtattagttttctattgctgtgtgacaaattaccccaaatttagcagtttaaaaaacaatacccatagcagttctgtagctcatgagtctggcacagtgtggctggattctctgctcagggtcttaaaggctgaaataagggttggcaggacaacattccttcatggaggctctggggaagaatctgcttctaagttcattcaggttgttggcggaattcagttctttgctggctctcagctggaggcccctctctcacctcaaggctgcctgcattccttcttatgtggtcccctccagcttcaaaccagccttcctgctctttctcatgcttcatatctctctcccgtcctcctgttttaggggcatatgattagctcaagcccacagatatattttaaggttgattgtgcgatagaacataattgcaggagtactgtctcatctcatcatattcacgggttctggagattagctcattgaaagtgggaggggcattttcaaattctgcctaccacaggcaataactgcccatctcagctgtaggtggaatttttacccagaaaagataggccctagaagcctcatttcttttctccatggaaaaggacagccctctgctgcagcgttcaacttgtgtgtttactgacagagtgaactacagaaatagcttttcttcctaaaggggattgttctacattttgaagttattttttaataaaattgaattatgttgtgtattgtgcttcttaataggaaatgcattattggactg

SEQ ID NO: 105432 - DNA, 1010 bp, Homo sapiens
ccgtggcgctgggggctcacagggccccgcgggatcgcgctgcccccggcggccaggccagggccgctccatgaagcgccgcgctgggggccgcccccgcgcagggccccgcgaccatggcccccgggggcgcggccaggcaggcggaggcgcagggccgcggcgagtccagcgccaagcagctgcggccccagagcctcgggcgcggcgggcggggggcgcggggcgccgattggagcccgcgcgtcagctggggccgccgtctggacgcttaaagggccaggccgcctgcgtgccggcggggggcgcggacacgcgtggtgtgcgcggtccccgtgcagcccgccctgccgcaggctgccctccacccccagccccagctccagcccccagcccgtccccactgctcatatccgagcagatagaccccggccccaccctcccgtgctgagcctcctttctgccgggaagttcgtccgggagtcaaacatcgctgccctccggttgcgccacggagggggagccaggataggaagctgccgtgaaatcaggaagctgagcgcgccgggccccggatccgaacagaaaaggcttccacccgctcccctgagggatcccacgctgagggactgaaccccgcaccccagccgcgctcaccacccccaccctctcgcctgggctgctctgacctgggggtgagtctggggtccccaactggtccagtcccccatccctatcccagggcggcgcagggctcattttgctctgtgcctccaggacttggctccagtggacccatacctacctggcggcctcatgctgcatagggccacccagggcaggagatttaaatcccaggactacaaccgcagcgatcaaatcatctaaggtgactggcccagggccaggagacagagggaccagaggagtagggaccagaggcccaggccccactgtgcccctctagccgtgtgacctgaccactgctgagtggcccccttgctcagcct

SEQ ID NO: 105433 - DNA, 1013 bp, Homo sapiens
gaaggggtgaggaggcccctctcagctaggaggcctggggaggttggttccagtggcaggtgtagcctggacaggctctggggccagggctggcatgtacagttgggcaggctgcacattgcacaagggtgcctggacaagatggcaggtgggaaccggaatcaagctggcacactgctaaccaggctgtgcatcctggcacgggctcgtgtccacccagggaaaagaataccttttcctaattatacaaagtgctgtatgggctggtacaggccctgtgtcagtttgatgacagctgtgcctctgattctttcttaccttctggtcctcatagggcttcaggcctctctgaatgcagcctcccctcagggttcatgcctggacacagtaaggaggtcccccaattgtgtgttttggccacgccactgccccaggcaaggctgcccacctgctgtatgtgggcctggcagagcctcatgtccctacagccctgccttccttgcccgctccaagtctgggccttgagggggaggggtagccaaggcagacagtgagcccctggccaggtcctaatccctttctccatgagacagtgctgggggccctccagcatgaactgactggaagctgggaccctgcggcctaggtctcagccaggagcatgctgggtaaaccaggactggtgtctgtgagcttgaaggtgagccttctgtctccagtggccacctaccagatccttgaagagtttgttagtcctcacccatccgtgggtgctgggaggagtgcagctaacttcctccagactgctggctagggcctgagaccagggcctttctgcatatgtcccctctaaagcccaccacccctgaagctcaggaccactatgagtccctttttataggagaggaagcggaggtccagagagactgagtgggaagccagtggtcgggccgggatttgagctgaagccaggtccacccagggtccttccatccttccctgaagctttgggg

SEQ ID NO: 105434 - DNA, 1037 bp, Homo sapiens
gttaagctctttcctattgtgtttatacagttttgtttgttatactctttgcaccttaaacccccaccactccccgacactattgccttcccagcatggctggagtgggaagaggcttgggccccgggggaatggttagggggactgaacccctctgaccttatgaggcccatggcactggggcagggagctggggacattttaatcatcaataaacgaagcactttattctgtacagatttgggcaggcccaaggtgcccgagtgatctgaggatttataatccaagccacaccaccctggttgttctctgggcttggagggtacagtgccagcagcttccttgcccaattgatgttggagctgtagacgtacgctcaggcgctcctgctgtcctgggggagagaaggttcgcccctccccgaggaagaaggcttctggtcaggacccccaccccaaggctggggactccaggctcctgctttactgtagctctttttcttccttgcactccttgatctttgggcttccgtgatgtcctcagggtccccccctccctgttgctatttttaatctctagtcccagtgcctggcagctctttggagctggctcacattttcccaaaaaaagttgatctctcccagtgggctgtaggcagggtcctccatgggtttccaacccccatcactggcaccaggatctcccacaggcactggtggtgtcatcacctgctggccccactacagcctgagtaggcctgagtggccgtggccaggctgagacctgtcaggccatactgacaagcagaggtcagagacactggtggggagctggcaatgaaaccctgtcctgggacatgggtttcatgttcttgtacacttcccctctgggatcaggtgaggggtccagacagctgaccagacagcttgacagctggtcaagacggtcacgggagctctaggtgggcacaaccaacccctctcctgggaggcccctgccccactggggataggagcctgtgtccctggtgctaagca

SEQ ID NO: 105435 - DNA, 1019 bp, Homo sapiens
aagttaactatgtggtactttgaaatgtggaatcttaggactgttatcctagctcctcctctgatgttccctcgcccccaggcaactcttaactgggtgtaggacctggacaaagtgagtttgtaacctcattggcttggccctgctttttcatttgtaaaatgggtatcactcttaaggaattaaatgatataatgtaaaaagtgcagtacatacatagattcctagaaattaaaatctgttttctcattttgagacctgcattcaaacaaaactggaattctaatggccaactgaggcagcaaaagacattttaaaaattagaaataagacaaaaatccatggttttgctttactcgtttctgtataaacctgcttaggttactaatagatttttagtagtatgtatatgggtgataacgagagagatctattaagccacaacaaaaatgtagtgttttatggaactttgtagtgaacaatgaacttttaaaatttgtttgaattctctaataagcttatttctgtgttgctttcatgttaatatgtaaaggattttcctctttcattgaggctctttgatgagaagcttttcctgtgcattttttattctttaatgacgctttgactaaacttaagtataattcaaacacagatatgtggtgaattagttagtatggcaaattttccatttgttttgtccagcacggttgcttaaatgatgagccagtaggtattcttcagaatcagctgtaggtattcttcagaatcagctgcctctcttaaaatttatctgacttccactcccaaatcatcacttcacctaaactggtgttctttcctaagccagccagctgtaggcactcttactttgtttcttgtttaccccactttcaggaatggtgttcctctactcctgttgaaggataagccctggtctgtgggctgcaccagtccttggtgagcctgccatctatagtgtcctctattcttcctctgacatgcctcacctaggctca

SEQ ID NO: 105436 - DNA, 1032 bp, Homo sapiens
gaatattggtcgtctgattttggaggaaaacttatattctaaatgaaatgtttattatagataagctatagaagtagtacaatttttgtgcacagccctttttgttcaactcctctactttctcatgccatggattggttcacagtggtatccaggcagagctgcctttgttgagcatactgttttgtccctacctctctctaagaggtgtgaggaagaggcatttgtttgatgtacagatgagactgcaatggtgatgatgttgatgaaaacctaaaagtgagttttaacaagaataacagggtgaattccaaattgatagtaggtttaacagaagctggttctacaactgttttcagcagcttgcaaaacgtgtgtagggccacccacacttccttcctcttctccagccacacccacatgcttcagttgcttctgctgtcttcagtaggagaacatcagtatattcttgcagcacataacagtacttgtttctcagacataagtttttatattatgagcactcttggcaagttggcctatttcatttaggtccagcctagttatatgcctgtgctaaataaaaaggttgctctagaatggcctatctagtggttgctgtgtaaagacatgttatcttagctgtatagtcatttaaaatattgatctagaagaacttagtgcatgggaaaatgttcagtttataaaatagaggaaaaagtagttatcaaacttcatgtcgaaaatcttagctttgtaaagaactgttaagtatagaggatgtacactcggacctgatgagaagtcatcatagatgagcgtataggtgatttttactttcttctttgtgcttttatgcattttctaaactttctaaagtgaaagtcttgtattaacttttccagcttgttttttggagagaagtattgtgaaaatagttacaaatctctttttaccctgacatccccccaagcccgtaagtattatccccattttattttttaaaattgtgtctggccatatattatgaat

SEQ ID NO: 105437 - DNA, 1057 bp, Homo sapiens
ttcaccatattggtcaggcaagtcttgagctcctgacctcatgatccacctgtctcggcctcccaaagtgctgggattacaggcgtgagccaccgcacccggccttgttcattattatttcttcattccagtggaataatttttctgacctgtctacctggaacaatctctgttcactctgaaatccctgtttattaaatttcgcttaaaggagttgtaattcacagaaggcagaaggataataggagactgggttactaaagacaaattttactatttttatacatgtgtctagatccagccttagagtatatactttgactttaagcaaaattcaaacaaatagaactaaacctgtatctttttctttattttcttttaggaaaaagaagcaactaacaaaacactgtgataataaggattattcagtatgcagtttgcagggtatgtcttggagacagtacaaattcacctttactttatataagccacatcttaacattgggcattgatgttcagaatgacttttgggagctgcaagatcctcagagatcaaaaaaaatgatttagttactttgtactctaactcaaaatgtacttaatagtaggattagacagtagactagtgtttaaaaagatgttcaggaacaaggatatttttcgtctaaactttcagttaatcattgtgtcctgttcttagctatacaatttaattgtggtttcatagactatggaaaaggggtgctcatataaaaagtaaattatttggtagtaagagtgattgtttcactatagggtactcattgtgaagataccaattagattatttctatttaatctatagcttgctatagattaaaaatcatttcactgtgccctcttgctggcaaaggtttgggaagagaaacattagggtttaatagtacttatctctaggtgtctgaggctctgaaaaaaaagctttttcatttatttttgtaataaaacttttattttcaaaaatcagattcatttataaaatctgatttatatgtcactttccaggaacacatctaaa

SEQ ID NO: 105438 - DNA, 1641 bp, Homo sapiens
atcatttctgaagtggtataaatataaaagtgactttatgcttcttttatagttggtattttaactctaaaaataatattatcctaaatggggcattgattagagtggccaaatgtttataaacaatgtgggctttgaaatgtattaattaggtgtgaatcctaggttttgtagttaatgtcacttgtacctagagcagcctattgccttagctataaaaatgagaccagtgctgactggccaggcacggtggctccagcctgtaatccttgtactttgggaggccaaggcaggaggattgcatgaggccaagagttcaagaccagcctgagcaacatagcaagaccctgtctctaataaaaataaatagcagtttttaaaaattaaaaaaaaacttacctattatatgtcaaatttcgttttttgggatatttttatctaagtggactcaataattaatgctcttaatatgtaactgaaaatgtgaaactgtatattgagagcagtagaaaaagcttcgtcaaagggatagatactgactaatgggagagagctagccttaggaggttgctatattccttgttggattttgttactcagttctattaaatgttggtcagaacaaaagtgagggttcagcctgtgagatataaagttgcatcttgtttaattttatacacgtttgtttttctgagtcattgtcatttataaataggaacctatttctattcatttattgtaaaagttgaaatttttaagtacagtacgaaatgtggttcttaaaaaccaaatgatttttaagacttaaatcatctgtaagaatgcatgcctgtttactcttggaatataatcacgttatgctgggttgtgattgacagttggaaaacaatcattaaaaatcagcataactgctgagtaccagtaaattaacaaatatttactaagtacctactaccatatacctagaaccccctcaaaacatttatataaattcaattataagtttaaaaagtcaatgttaatatgtttactgatatgttaagcacctactatgtgccaggagcttatcctaaacagtagtgatgcaagagcaaacaattacctcctaaacattttggaaaaagttgcatttcaaaatttaataagacagttttgattatatgctatttgtaaccactgttctaggtgttgggggaaagtagaagaaaaaaaaatagaaccttagaatagaaaatccctgagaacctgctactgtcaggttagaggagatggtgtacccaaatacctgtagaataagaccacatagaatagaggtgtcccaaggtgctctggggatattgaggagagaaggtaattccagctgggagagttagagaaaccttcacagaatggatttttttttttttttttgcacttaaaggaagtggtgttggtcttggggaaactgaaaagttgttgggtttctgtgcaaatgtttattctttgtgttttcccttgtcaactgttgcgttattttttaagacactaaaattccttttagaaaatgtttgttttttaaacatgcttatcaaacttgccagttttcttattactcacatcaccaaaaaattgcttccaatgaactaatttttttttcagttt

SEQ ID NO: 105439 - DNA, 1487 bp, Homo sapiens
actaccggccccctgccaccacgcctagctaattttttttttatttttagtagagacggggtttcaccgtgttagccaggatggtcttgatctcctgacctcgtgatccacccgcctcagcctcccaaagtgctgggattacaggcatgagccaccgcacccagccaacatttatataaaattttaaaacatacaaagcagtgttatatattgtttaggagtacatgaacatgtagtacatgtagtaaactctgaagaatgcatgagagcaagataggttacttctgaggggcaggcatatctgtaggctttcagctgtattggtgatgtttatttttgaagttgggtggtgggtacacaggagttcattgtaatgttcctttttcttccccccttatgtcttaaatattgcataataaaacttttaaaaagctattaaaaaaggaaaagaaaaccacttgggaagatgttcaccagtctgataaatgattaccgtgtgttggtgaagtaggcttgggtggagttcataggtaactttttcattttcattatttatagttatttcaatttatattgtgtgatgtgtgattgaaataaatatagaattgctatttttaaaaaaaaggacaggtgtctttctgttaatctacattagtttatcatgccaaaattagtcagtgatttttcacaaatgtttagtaaaatgagcatacacaaatattaaaatctgtcattatattgtgagatgttactaaataaaaaaactttggttcttttttttgaataagtgttttatagtatactggtcctcagcattgagacttagctgaggaattgtctattttattattattttcaaaagatcagatttgattttatcaactatactttttgttttagatgtcattttttttctttcatctttattctttctaggatctttgaggtttcctattttttaatagcatcatgtatcaaaagcttatttctgtgtgtcttgatttctaacaaatggtttattaatgctatttagaagacaatttggcaatatctgatgtgtacatctttaactttaatgctatatgatgccctctcccacaatccctgatgacattctaggggtttcactctgcagttgtccttgctaaaatttgtctttggtttcttacttaactgaaaagttatttagaaaggtgttcctttttaaaaattccaaatggatagatttatttttctctttagttgtctggtttttaacttctaattttagtacattgaagttaatttatgcccaattgatttctgcttcggatactatttttagattttctttgtggcttgatacatggtaattcataccatggtgactgttctttatgtgattaaaatatttgtatacttggagtttttatacatacttaagattatgcattatgcaccttgttcctttgtacccttacatgtttttattctgacctgtcattttc

SEQ ID NO: 105440 - DNA, 1043 bp, Homo sapiens
gataaagtacttagatttataaggcagcttcccctgtagtgataaattacaagcagacaatcttattttgtaatgtgatgaagtgatgatgtcttaactctacttagagagtgtatgtctgtctaacagaacaaaaagatgctctgtgtaaattccttcctgtagggcacactgcaggatttccatgtagatagaagaactatagggcctagtacagaaggtgcacacaaatgttggcaaagtcaaaaccccatgaattaaaacctactggaatttggtttttaggagtttggtaattagattatctcttttgttattttcattcagttatatcctttggctcagctagctttgaaattggctgatgaaaaaatatacataaaagggtaaaattcacacatacagcaaacaaaaatgcacaaagcctgcttcgtaacttttttttctggaattgtttttcactttgcctttttctgccaaaacaataatcaaagaactcttgctttaacctattcctgtacaaagactgtttttgaccagataatcatctgttgtggcattctatcttgtaggacactgtatattgcaaattgctgattatggaaggggccagttgctgttttttcatgcagtgccctgggagtcttaaaagcagtgcttagcaacattggtgatagcatgtggctgggacccagggcccttccccactcttcagccccgagtcatgtgtctgaggtgacggactgagacgcatctggtcctgtaattcagagagtgggcacatcaccaaagaactgcattgctgtggtcactgtttcttcaagtacacactgactctgctactttaggataaatatattttactcagaactctgaatttcacagtatacttactaaactaagtaaaaatgatacttaaaatacttattttactttctagacctaggctagatgttttaagctacagctctagttcattgtgatatttataatttgaaagctatgagaatagatgtgtgggtgaagccatagaacatatttgc

SEQ ID NO: 105441 - DNA, 1013 bp, Homo sapiens
aaaaaaaaaaaaaaaaagaattaagcaaagtcagtaattactgaatgtaccacaacagggtggactcactcagtacaactcatgggcctgcttggtctttgatacttcacaggccaatacttagaaattacccaagattaatataaataatcctagattgcttagatatcaatttatttccttgcatatatggtctgatgtatcacatcaacatgtactctttcttgttttcagcacgcactcctggctttaaagtttatacttgcatttgccatacctgataagccacggcatatccagatgaaactagccagactggaatttgagtctttggaggcactcaagcagcaggtgagagcagctgtcctgaaaatgtatgtattgctttagcaaatgacaggaaaaataattcagaagaatcagtctcagcatttttttcagccttgaagttaccagtttaaatgaatacagaggactccagttcaggatgacataacaaaaccaaaatcctaacaatatgagcaacaaataggtttaaataactaaactaaagaaacaaaaatattcaggcaatgttaaataaagaatagagctagcattcagcaaaagaacaagacagacatctaagaatcaacctggggcagctccccacagcttccagttttgccatctactgaaacattaagtgaggagaagtgaatgaataaaatcctgaataatagctttcagagagcgagacagaatgagatcaggtgtgtagaagcagcaaaattgccctgaaaggagaaactgtgcctcagtgacttccacattctaccagagactacaaaaaaaaaaaaaaaaagccatgctggagttgaccattttggtgattttctgcttgtaggagagtgggagtagacagaagatccctagacacctggagtatctctcacttgttatctttagtgctgcataggaatttaagaaatgagagaatcagtaaggcattgccatctgaggggacaagctct

SEQ ID NO: 105442 - DNA, 1028 bp, Homo sapiens
tcattgggtcaattaacatgtttctgtttataagatttttctcttttatctgaaaatcttttcaaataaggaaattaaatcttaaaattaacgttaaaatagaattttttactggagtctacataatgttcttattgatttaaaaaagttttgctagtagcatattaaattaacagcatgctatactttcatatgtttattcatggcccctataagagcagaaattttactaactcaaaaaatgccatagtctataaatatataaaaattctcataaatttttaacgtcttgatggaaaaagcaatttaagatgctttttttccaaattaattaaccaaataaatatctagatacatttacatgattagaatttgttaacagaacaaacacgacttagaaaatgtaacaattttataaagttgatgttgagtgttaatgttctcaaaatttaaaattggatgaattgatagtttctattgcttttctggatcacatttccaaagccaggtcactttattttttacgcaggtttctgattctttttttttttttttttttttatttcagacagagtcttgctctgtcacccaggctggagtgcagtggcacaatcttggctcactgcatcctctgcctcctgggttcaagcaattctcatggctcagcctcctgagtagctgggattacaggtgcacaccaccacgcttggctaatatttgtatttttagtagagacggggtttcaccattttggccaggctgatctcgaactcctgacctcaagtgatctgcctgcctcagcctcccaaagtgctgggattacaggtgtgaaccaccatacccagccctgattcttcatttttttttaaagcttgatttagtacagatgaaactgagtaaaggcaaaaatgatcactgctgtattatgagaactgtgtcatttgtcacaacttttgtgtatttactgccatctagtgttgcctttaaaaattgatgacacttgaacactactttcatttgcaaaataa

SEQ ID NO: 105443 - DNA, 1041 bp, Homo sapiens
tgagccctagagttcaaggttacagtgagctatgatggcaccattgcactccagcctgggcaacagagcgagacactgtcccttaaaaaaaaaatcctattcaaaatcaaattccatacatttaatatgtatttttagtctattttagagaaaagacagttctactttcttaagcaaatcctaaaaacactttttgataatgacttaagtctcatttgctacaggtgtgaaattcattgtgaaacactctcaaacttcaaaatgtaatttgtaggacgatagataatttcacatgcaaagcccaagcaggctgtctgtgctctttttacgtttttcttttatcatgtttcagaatatggatccctgtaacatcttggaaattaagcactaaccaaatgtaaatggaataatttgtaggaattttttttgttgcttgtaattatagttgtcaagaatattgtaaccacctttcatttttagatattttaaaaacaaaacagttatggaactctataaaagcagaacttaggaggatcctgaatggtgtttcatatacttaaggccttaggactcagggctgaccagaggaaaggaaatcatgaacttgcacatttccagtgttggctaaagaaatatattctgctttgctctttttggctcttattgtatttggtaggaatctgtgttcatgatagatgctatatgtggaatatgcattttggagaatgattttagacagcagtgagtgggagggaaaagaaaatggccctgacagatacaagtagtctattttgaattttgtaagttgaatagaattttggagagctatttgcaaggctgatttatgacctgtggaagtgagaaaacaagacagagttacctttgacagggagagaccagctggctaggcttgtagtgtgctttcttgatttagaatatggcacttcacttcacagatctaaaaatttgtctttgccagtatactcagagttaattaaaggcttttgggactgactgaaacttaaaactcatgaaacttac

SEQ ID NO: 105444 - DNA, 1025 bp, Homo sapiens
aaacattttgttccaaattaattttcttaaattttcgtctatttatattaaactgcaatctttgttctatatttttatttggtgcacttttatacctagagctcggaaatattgaattctcgtctcatctacttctcatttgaataagtggcaggctacttagtggtacatttttcagtttttccatttattgaaaaactataaagaactgccatccctaatgtacttatgttatttacttggaagatggatttaaattgctaatataatttctttttcttctaccagactagaaacattatatttatttagaaagtttttagttttgaaacttttatgtttgtctaagattgtgcttatcttttgtttttgaaggtgcccagttgttgtttagaccattgttaaataaatatgaacaagaaacactagaaaatcagaacttatatcttgttggtgcctccaagattagaatgttactaggggcagaagcagtgggattggtaaaagagtgcaatgataacaccatgagagccttcacatacagaaccagacagaacttcaaaggttttgatggtaagccctaagttctttgtctctgttagaatccatttatcaaaaagaagtttatgatgaatagatcagggatcagcaaacttttttcagtaaagggtcaaatagtaaatattttaggttttgcagtccgtgtggtctctgctgcaattactcaacactgccattgtgaagcaaaaaagcagccatagaccataagtaaatgaatgggcgaggctgtgttcaataaaactgtatttataaaaccatgtggcaggctggatttggcctgttgccatcctttgcctcccctggatgaacacaaattagaggaacacatgtaacttacttatattattctattctaattcttataatttgagtattcagtagcttgatacagaaaaatccttttttttgaaagcagaatgattgtcaccaatcaattctaagtcaacaaaatacaccaaaaaaag

SEQ ID NO: 105445 - DNA, 1258 bp, Homo sapiens
cctttgctttgtggcacttagtgaagacaggcatactgggatccattttgctttcaacatccaacccctttcagttgcaatacagttgagaaagctaaatgtaatgagagtagagtagacttctgtgaattgctttaagttgtcctagagaatgatttagtgtcaattgagttgagagaaagctgtcacagaattgctcagttgcagggtagaccataaaagaggtgatttgcagttgtgtgctggagttgatttgtaccagcaagccattgctaaattttcaggaattttgccaacggttggcagcttgaaattggccatggtgggagtatttacaccacggaaatcatcaaatgctataaataaggtataaataagggatttttctctcccctccctgcttcagtttgtttgccagctccccactgggtttacattagactgtgaatgtaggtctttgccttggagataggagagtggatttctctatctaatctttttaaaaactggcaagatatgtgcctttctctctgctgccttctctccttcccaaacctttgccacctgatatcttaaaaatcacaaaacttttcactgccacatcccaatggccttctagtttttttcagtacttcttcttgggtcctttttggtgtttgttactgtaatgatagctactactttttgaaactcttattagacattctaggtcttaatgacattttgccttttatcttaccttacctgaccaacaataacttttattagtttctcctcttttttttttttttgcattctctaaatgtagtcattttccaagattctgtcatcatccttgtttttatttttcatcttgtttactcaaacgtgaactgtcttgtctgtggagatgactcagatctcattttctttctggagccctcttctgtactctggtaatgtttctaattgtcagatgtttgtgcctgattcctcaaatttaacatgtccagaccatgatcttatttttaccttcctgctcctaaactaaacgatataaaaagcttagttctggccgggcgccgtggttcacgcctgtaatcctagcactttggggtaacaccgtgaaaccccgtctgtattaaaaatacaaaaaaattagccgggcaaggtggcggcgcctgtagtcccagctactcgggaggctgaggcaggagaatggcgtgaacccaggaggcggagcttgcagtgagccgagatcgtgccactgcactccagc

SEQ ID NO: 105446 - DNA, 1047 bp, Homo sapiens
tagaacacctgacagtattctacaaattctctgcaaagctagagaccttaaaataatgggttcggtaaccactaagttccttttcacttctaggagtataataccctcatttgacagatgtggaaagaagttagaaggtaatatgacttgccaaagaccttgatcacaggttacttgaggtttgtctgaggtaggtcttcccctttaggtgtaaaacatggtcatttaggattatttacttcaataaaatgtgtactttttaaaaatagctgacaatacaagctaaaatcatgagattggatactagatgatttgtaatttttggttgctctgagaatacttcccttctcagaagtaataaaatgaaacagaatttctcttttatgttttcattaggtgtgccttgcacatacaaaaaagaacctgttcgtatatctaatggaaataaaatatggacactgaagttctctcataatatttcaaataagactccacttgtccttctccatggttttggaggaggtcttgggctctgggcactgaattttggagatctttgcaccaacagacctgtctatgcttttgacctattgggttttggacgaagtagtagacccaggtttgacagtgatgcagaagaagtggagaatcagtttgtggaatccattgaagagtggagatgtgccctaggattggacaaaatgatcttgcttgggcacaacctaggtggattcttggctgctgcttactcgctgaagtacccatcaaggtaagtggtggtgacagaagagagggattataactgtgcttccaagtaccagactctagttcccatctttggtggttgttagtgtctgagccacaaggcagacattctcttaaaggaccctatagaccacaccacaactgatgaccaatatagtagctgaaataatcatgtcagatcttcctattacacgtactacatgttaataggcttgggaaaggggtttctatttgttaagcttagaattgtagaaactttaatgtataattttaagccacaag

SEQ ID NO: 105447 - DNA, 1050 bp, Homo sapiens
ataagaatgtgatattgatctttagccatttttgcagtgtcaacctagacatacatggaaccattggatttttctgagtggccagtgatctacatcatctgccagagtgtaacttaaataacaaatgcccttttttctttttctcaagaaacacacagttctgtactctatatatcttttattattcacatttagatatattaaaaataaagccctctttctaccatacacctcttagatcctactgaatctcaaaagtttacacagaataagagcatgatacgatctatttagcactaatctttaacgtgaaggtttttgaaggtggttcattctacctttattttataaatcatgttagctctttatagtcttagggtgattttaccaaatgaacttaaatatattctttcccccaacagggttaatcatctcattttagtggagccttggggtttccctgaacgaccagaccttgctgatcaagacagaccaattccagtttggatcagagccttgggagcagcattgactccctttaaccctttagctggcctaaggattgcaggaccctttggtgagtgcttatgttctaggaaagcaaaatgtttgtaagttatgagaagagcagaattcactattgttagtcaaaatcttaaaaacaaacaagaaaaccctgaacccttactttttctcctcttcctctaataagtaccatgtcttgcacaaagacgaatgcaactaggttcttctcctcaaaggagagtctttatattgtaaacattgtgaataattagcaaagcagaaaaggagggaatgctgaggataaggttagtcagtcctcaacactctaaaaaaagccaggcaagcagagtgttttggggagtatataaggacctctgctagtccagggcctgggagaagtgtagcatgttgccctgctggtgagcactggagagcgtttggccaattgatgataccatttggtaccataaaacctgatttgattgaccctggggataacaggtaccaccacactcacagattctt

SEQ ID NO: 105448 - DNA, 1052 bp, Homo sapiens
tgtaaggttgtgtcactgttgattaactgccagaaagactgaatgttctattttcaacatttctcccctataaaagaatagacaaattatactgaagcatgatataaacatcttcccaatgaacaatttgtctcacttgtcagattaactaggttagtgcaggaagcaacatgagcgccaagatgtgttgtctgatttctctaccttaagaacaataatagtctttttagttagtattttggatggccaggtttcaaacctgtatgtggtacaaataatttgggtaatatttttgtatttttgttttacacactctctaatctcaattatcctttgctgggagaatgacaggtttcacttatacaggaaggtttttgcacaggaaatttggtcccagcccttggaaggaagaagttccttcgtttacttagtgaatggagtttctggccgcagatgtgccaagtgattgaagaaagatataccccaatatcaagtgataatttattttcctacagactgaatttgctttatttgaaagatgttgtaactctttttaaagttagattttaccctgaggtatagtatatgtaattttgtgaagattgagctggaagggaagttcacaatcctcacatttaaaaaaatatagtgggtgctaaatgttttcttaaaaatctagtacagcatttgatctttgttatgcacagcatacttttattttacagaataaattttcctgtgatagtcacaacaagacagctgtatagtttcttgagtcttttgtatggaccagtctctgtataatagttaactacaggactgtggatccagcaaatgttcagtaaatgctgctgttgttcttagggaaggctactctgggtgttgtggccgccatacatggctttacctgggtccatgcattcccttaagatgacttctgttttcttcttttttcttctgattttccaaaaaaaaaaaagccttgcctaaggttggttttagaatatgatttgcagaacacttttgaaatgtcttcattcatatatgtaata

SEQ ID NO: 105449 - DNA, 1081 bp, Homo sapiens
gccaacaaaagcaacatggcaaaattcttgaaaaatgccaaattctcttaaattgggaaaatcagtgttctaacaaattcagatagtaaagtaccctaatattctgcatcacttaaaacgccagggcaccaactatgggataagattgatgaacaagtcagcaacaatcttgagtaatgagtgtttttaaacttctacattgctgatgaaaactattcatggttctctaaagctaacccataaataactctttaagaggtgatgttcctgatatgcttcctccacacctccactctccaaaaaatgataaaggaggaatttggaaataatgagatgacaccaatcagggcttatttactacccagagactgatgaagtgggacctggaattctgagcattactgttatgtgactgttaattaccgctgtgatgtctgcctcattgttcattaatctttgaccgtggggacaggagccaaccattaagtaaatcaggtatcacacacatacctattaaacaacctccactaacagagatagatctgagaactaaggaagaaagaacaaggcctgagcgcctagagtggacaccagtgagccttacacgtaaagcctgcgtgcttcctggttgccagaaagactcagaggccctccctcagcatttaagcagtgggcattctcactgcacttccaaattgctctttttaatctgctgagtggattagaatcccatgtaaaagtaaggatttcctggtttctaacatgtttgctgggagagagacttagcaaggagtaacaaagaataagctggtgtattttcaaatatgagcttttaaagtttttgtggtgactctaaccataacagcctgagacagaggtcccaggagatccctccttgtggaaaagcagtagttctcttccccagaaaggactggggtcaaaggatgcacaacagtaacgactttgtggtgaggttggcagagaatatacgatggggagcttgatgtgtgagaagtggaaagaaggtcatcttggatgattggaggacaacatcccgcaaacgacaacagggaaagcacag

SEQ ID NO: 105450 - DNA, 1101 bp, Homo sapiens
gggcatgaaagacaaaggttgtcgtgcaccccgcttcattttctagctagtgaccattgactttgttgttttgtggaaggctaattaggaatggaatatttttttttcccagaggaatcgctgaaataaatattagtgtttataaagcacatagcttttttttttttttttaaataacatttgacaggtaactactactgaggtgtattgtaaagactggacagtgtggtgtgttgtttcagtttagggatgattatgggattgatgttatgtctgtgggacagtcactggtatgctcccatcaaggtacatgaaaataaatgctgccttttcattacaaaggataccacagtgaacagggagacatcccttcaactgtattttctatatccttattttattcttcaactttggttttcttcttccatatccctgtatccatccatacacaaccccatcattaaaaaaaaaaatcatctccacagactctgttatttttcaggaactctattatgcctataaacttgacctggattgtgttactaatttggtaggttattttgtcatacaggaaatcacagcctatgggtcgatatgtgcatatgaacccctcagctaaattatctaaattgtttttaaaagatatttttaggccagtgaacacttagcaaaaatatctttacagatctcgataaacctatttttagtgtcagtactttaaaagcttgctcaacccaaccggttctaatcgatgtaaaatgtgcttctaacaaaagatatttatattgttgttgattaaattattctaaatttcctttatggaaatacctgacctaacaacaatagaaattttactgtgtaaaatattactctgatttttaactctagaaaatgtatgcatttattatatttttggaggaaggagccatgtaagaatggataactaaagtacagtaacatttgttctgggttcatgttttctgtaaacttgcatattctacttgatatacttctatcacttttaacaaatccacttaatttttcatgtactgtgaatttatattatatattaaatagatgaatataatatgcatatataca

SEQ ID NO: 105451 - DNA, 1112 bp, Homo sapiens
ggacacctttgtgcaccactgcagcctctcagcttgtagccattgcagaacctagttataagcagcttccggcagcttctggcagcttccctcaggcacaaccaggggtgccctcccaggagcaattcctgcctctcacttcctgccctgtgctagccatcaccctggagtaggaccctctccagtgagggctggcagagatctactttccccatttatcctctactgatagttctgaaacccatttgtttaggttccccggattgtccttgtaagatccagtccagtcacccatagtggcagcgaacccagtgatgcctcctgtacttccgtgacctcctcccccatcccattctcctgtccccagtcctgctaaactgcctgccttccagccactgttgtaggcagtgctctttggggaacccagactaaattggatgagcaccattgcagaggcaaagaaggtacaataggtttcatgatctttttcttaaaatatctcattcaataaattgctatactatccagtctatctggtaacagctaaaagttaataagaacttacagttttaagtcaaaacatttaatcctcatggcaaccccatgaggtatcgttcccattgaatagatgaggaaaccgaggcacagtgacattgagtaactggctcaaggtcccacagcagtcaggggcagagctaagtgcaggcaagctaagtgcaagcaagctaagtgcaggcgagccattaccaccgattctcttaacctccttatgtgaccacactctcctggctcttgttacccacagcctcagtccctccttctgatccctctgtctctgctgtttttctttgcctgaatccttaagtctctcaaagtggcatgcatacccaaaacactgggagaccatgatctagcgctaataattcatttttccccattgactacaagagttaatttgtgacaggacaagcaggagcccacacaaagctgaccccagcattcagaccagctgtgtggtccctctttcaccctaaggattccagttctgtggttcagcgcagtagtgagggctttggtgatggggtatctgcactgccctgtccagccttggg

SEQ ID NO: 105452 - DNA, 1084 bp, Homo sapiens
gagactctgtgtcctacttaaaaccacctctagtttcctcactgcctgcagggtagaatgaaaatgccttagcttgcgtggtgcttcccaggcaggcaaccttttcctttgggcctaagcactttggacttgtcacccttcccagtcacactgtgcttctgtgcaccccacgagctgattgctgtgctgggaatggccctccagccccagctgcacaggctgaccagttccctcacccatcactacctggccccaagggccaggcccccaccgaaacctttctgcacccatgttaagcattcctccacaacctcctgcaacgtgttcagaccctcgtgagagcaccctaggttgatgttctctgctcaccttctttttttctcactggtctgtgagctctttgaagttagaaggcatcattactttcatctgtctttccagcatctagtaaaaataaataaataaataaagcctctaaaacaaaccactagaacatataggcttacgtctgtacctcaataatgaactccaggctatcaagtgatcattcgtttgctcattcattcttcagcagagggactgtgttcttgctttctgctagcactggatgttagatgaggtgctgggaaccccagacactcttagagcttctacttggcaaagatggaattgaaggttaacagacattttatgagacttggttttggagtcacattagtttagggttgattattttttaaacttctaatctccccagaattgaacttaatgagctatcccctgtcactcagaacttgtttggaggaactagaaaaccatgcagattctcagcattttttattcacgattttaaaggcaaatctggatgtggcattacaccgaggtgtttttagctttcctgaatgtcctaattgacatcaaatttttatgaaaacattccaaaacctatgattattattactctgaccactgtttatatttgagtgctgagcagaaaaagaagaatcaccaaagcttttctatttagtcatcttctagacaaaccatatgaaaaaatagggaagtgcttcattcgcagaggttc

SEQ ID NO: 105453 - DNA, 1077 bp, Homo sapiens
catgtgaatgattccaccaagccttaaagaggacagcaccaaagacaagtgacaggtatgctttccattcaaccatcctcaagcccttcatgtcctttatggtaactgtgagggtagaacgttaaacctatttggtgtcaggacaggacaggattttccagccatggaaaagagatgtttagctgatcttcctgttttaacccttttcacttagcgtattcagctgacgctgggtggggctgccagaaacagtttggaggcatgctgagtgccgtgacatccttgtctgaaagacatggccgctggctggcatccaacactgtggttgactttcaaaccatttaattgaaatcatttttttaaaaggaggggtaggtgccagagtaggagaaagatcttggcaaaaaccttatacgcactttttccaccactggcttgaccagacagggccacaaagccgatacaacaggattagcaaaattgcattgttggacataggcacagcgtgacaggtggtacagcaaaggcatttggcaggattaacctgccaaggataaagatgtagcagacaaggggctgaattaatggattggcatgaccaaagcagggaaatctatttgcatgcaatattaactgtgctaataaactccaggctgagctcagcaggccaggcagcctctttgaaccaggggttttatttttcacctagaaggcttctgccaagataggctaaaacaaacaagctttacaggttgccttttggtttttttgccatcatcttaaagtagacatgctgtcttaaatgcctacaataacatgtatgctttactgaccatgtagaatgatcctaatacctcagaatttggaagccaaaaggtcctccatttagagggtgattgtctatgaaaaagcagtgaagaaatatagatacggcacactctggaaaacacctacttgggataggttgttttatctgagttttatattctgatttcctgaaagtcgggggggtctggagtgagcaggcaagatgtccaagatgcagaatctcaggaagcacccatggtctagctcaga

SEQ ID NO: 105454 - DNA, 1022 bp, Homo sapiens
tattttaatccattttctatagcctccttgttcgataaaaagttcatttttcaggggacagagacgccttggaaatttttatttgaagtaattagggcttgaaagtagagtcaaaagttaaactaattttcagagataaacagcataaaatttattcgtggttttacttttaaggcaatggttttaaatgatgattttttccctcaaataggactagtttgcccaatgcaactttaaatggggccaagtagtaaccttcatgctcaggaacttaatctattctgtttggccccaaattgatttaatattatgtcatattttacttaattttataattcctgaagccgttatttatataatacctgaatatcataatattttgtgaatagactcaaagaaaaatgaaaacacttttcattaagattcagtggtacatgacttaagtttctctgccatttatttgcagttacctttgtggtatcatactcttcttgatggtcttattgttataagaacttgaaacttatcaccaaatataatgctgtctatgtgccaaatggagaaccaagagttttattgatttttttaaccatgtaatgaggtagcctggtaatctgcctgttttgaagatggaaaaaaatgaagacaaatttgtcacttgcccaagatcacactcctagtaacagaatctggatttgaacctagccctgtcttactctaaacctagtgattgtctttgtagtctgaccttggtttttgaatcttcttgttaccacctaacaactatgtgaccttttaggcaaattatttcatctttctgtaaaaagggaaagtacttgcctcagggttgtgaggattaaattaaataatgaatagaaaaggtttgggcatttttaactgttataccatacttccttggaggaatacaaaggaaaatcagagtaaattctgcattcaagagcaaacttctctgttgagtgacaagatgttgacagtgagctaagccaaatttagaaagagat

SEQ ID NO: 105455 - DNA, 1118 bp, Homo sapiens
agaatgtttatagcatattatatacattcattttttcttctggtttcttataaaccataggacagattaattagaagcagcagtgacttttaaggggtgaatatagtataattaactcttttcttttgttaaaggttacagatgagacgatttaaaaagaactggaagtgtgatttagattcagccttgaataaattagaggtatgacatttattattttaaatacattgctgggatctctgaaaatcaatagcaacaaaaaaggtttgaataataaccccattttatgaaaagttttagaaatgtggctgttatacagagaaaatgctcaaggaaaggaagttttgtttttcttacaagttaatattttgaaaggcaaacgttttaatttctagagttgtggactgtactaaaaataattctaaaaattgttcagtttcaaaattatattaaagtaaaataacaattcgaagcttagtctttaagttttgagactgggcagactcgctcagtgcataagaaagctgaggtacttgtcatggatggctacagtacatgaaatggtgggagaaagcccaggtcacactgaactctccaaccatttagagtataagaaatgaggaccttcaggatgatttttacttttaaatttaatatcatttttgtattcatgtagtaattgttgctctggttttaattagtacttttatattcttaagacaactttttttcttgatgtgaacaacttctttagtttataacagaaattgtagaaagataataagttgattgaaatttactttgtggccacttttgtagaacgtagtgtccaaaacgatatgtgggcccaaattataaatggccagataacattaaaatgtactttctaaaagtagtaaaataatgcattgccatggagacagttcaaattatgctgctcatcatgttttccgtaaaatccatctccactgtcaggttcagttttgggggtgaatacagttaaatactttaagacctggataattaaaacaaatgtgcattgttatttggaatttatagaggctttactatagccagaaaagcaaagttacaatagtgtgttgttgatgtgatacttg

SEQ ID NO: 105456 - DNA, 1054 bp, Homo sapiens
gggactacaggcacatatcactacactcagctaatttttttattttttgtagacacagaatcttgcttcattgcccaggctagtctcgaactcttgtgctcaagggatcctcccacctcagcctctcaaagcactggtattacagacataagtcacagctcggccagtggcagtgttcttaacaagaatgtaaaactaaaaaaaaaattaaaaaaagaaagaatgtaaaacccttgaatattttccatgttgtggataaattaatgcaggctttagatactcttccttctctttctgaatttttccatctatttattgttagattatggtaaaaggtcaagaattggtgttttagtatcaaacgtttcacattcttatttttcttttcactcagattggtaaaactattgctaacaaattatagtggagcacctgaatttttgaattatttaagttgttactctctttactattacaagtcaacagagtctatatagttttgaatttgttttgtttttgacctgagctctttactactgtagcctttatcaggggttggcaaactttctgtaaaaagccggatagtaaatattttaggcttcgaacacaccacatgtgatctctatcacatagttttattttctttttaaacgatgctttgaaaacaggaaaaccattgttggctcctaggctatacaaaaacggggcacagtttgccaacacctggtctttatggtagtatcaataattctgtattagtttgcctcttccatcattttaagtgactattttattttcttttgtatgcctatttgtgtttcagttagcaaagatccacaaaacagtaaagtagataaaggtgtactgggaagaattggaatcagtgctatgtacttctatcacaagctgttgcagtggtccaaggtacttcattaagtttttgtcttggcttggtatagagactactagttttaaaattatgaacagaatataagttaaccctgcaaattaggagtttgctaataatcattacaattgataaagtgggacccag

SEQ ID NO: 105457 - DNA, 1044 bp, Homo sapiens
agatcagcaaaagaattagttgggtgtggtggcacgtgcctgtagttccagctacttgggagggtaaggtgggaggatcacttgacccccggagatcacaccgctgcactccagcctgggcaacaaagcaagactctgtctgaaagaaaaaaagagagaaagagatagatatagacagatatatatagaaagagaattacactattggatattaagattttttgatctgaataagaaacttataaagaaaattgttatcatttgcagtgaagtcagctgaatttcaaagtggagtattgaggggaaattattatgttatttaatatttctcattttgcaccagaaaaatttataaccactgttttagaaaccatgtggtactcactgcttgtaaaactaatagatttcagaaaaccacaaagtatctatcttgtttctgctgtgcatagtacgtttagttttattgtcacttatacattgaggatttgtgtgtgtgtgagtgcctcaatgaataaccagtccacatctttttaaaaggttatgtctagagaagatatttccacactggtttcccttttcaagagctttatcgggagctgaagcagtcaatgccttgaggcctttctattttgcagtacatccagatttctttggacagcaccccgtagaaagggtaaacatttatttatttttaaaccattagtgtacatttctgcttatttacctttgatacaatataatacatagagttctataaatgtggattattctgttgtggtgatataatcaatgctttgaactaatttgaaatgtagatactgaaaattgaaaatagagctttttttatgaaagctgtcattgttttgtgcaggcaataaagctgtcatttaaactctttagagtactagtaatcatgtttttggtaccaatttttgaagtacagttgagggtttgaaagaaaacttgagacctttattatcatgatcaatctctctctcttttttttttttaaggatgatacatggaagagttttcaatgcccta

SEQ ID NO: 105458 - DNA, 1010 bp, Homo sapiens
aggtcaaggctgcagtgagccgtgattacaccactgcactcccgcctgggcgacagagtgagactctgtctcaaaaacaaaaaagagaacctgataaacctaactggaattcgtagttggaacttgaatctaaaacaaaaccatcgtcattgtaacaatgtgaaaaagaaaaacacttttttcaaagttttcccatttcatcatcttatttttaaatagaaacatcttatatttgcttattttaaatctttggatacctgaacatagtagtaatatttctgccctctggtaaacaattcattttccatttggttgcttttttaaaaattagctagcttagaaacatatgatcaatcaaaacatgttatgtgtgtgcttcaaaaagagactcattggctttccaaggactccagtagttgtggtgggtgctcgctccgtcttcagggtgccacttgttaacatgagtgtgtgctctgttggcctaggtggcagaggagctggggcatcgcccaccgctgtagccagctgcatagtttaagccgcttagcacagcagaatttggaaacacttaaaaaagcaaaaggtaaacattttccattttcttttaaaaaatcacttagctgctatgtacgtctataaattttaatggaaaaaccaaataactttatcacagctgaacttttaaatctgttctttgaataaagcagtggcataaaattagcctttaagcttctactgaatttaatcctgggtttatacactatttgcacaatgctgaaagaatgaagcacctcgaccatgaccaaaggttttgtgttttgtcatcagggtgtacaatcatatttacagaccgttctggcatgagtgcagtgggccatgtgatgctaggaacaatggatgtccatcaccactggacaaaagtaagaaagagccttaaaattaaaaactccttgtcattcataaactttcatttccaacaatgctgtaatgttaagggactaaaaaaaggt

SEQ ID NO: 105459 - DNA, 1066 bp, Homo sapiens
atgaaataccaggccacagtttttttaaaaatgaggatgttctctatatactgacgcacagtcaccaagacatgcactttataggaaattataagctcctccttgcctaaatctccttaattttgcttaataaataacaagtgaagccagaagctgtaaactcataattttaatgaagaaatgggatccagaagatggagatgtttttcattctactttattagatgaggaaaaggagagtaaatacttgtatgccagctaccacaccttttaaagttaatgttaaccctgctaagaacagcaaggagattttatatcagccaggttttagttgccagaaaccacaccagttattttagcaaagaccttataaagaagtgtactatatttaagtagctaaaaaggcaagaagaaaatgccaaggtgtcttggaggtagcaactgctaagcagctgccaccccaggactgggggagctagaatagagtctccccatgtttgacgtttgtctgctaatagcattcaagctctccccctcagtttgcctggatctggacaagctgataagaaagcccagccacttcctctttgcgtcagaggggaagttcaaactgtgcaaaccctgactgtcaaatgcactgagctctcataaccacaacaaaaaccagagccacttgttcgtcctttcactgaagcccaacagactggcgtgggtgcccgctttgctttccctagaaggcctcatgtgagtagtaaactttttcataacctcttggtgtctgcagtgtcatcagtttcaacatccgaaccagttttgagtgatggtagtttattgatcccacctcatgtggagcaaagtgcaaagcaggaacaaagagacgtggctagaattgttgaaaggtgggagattggaagagggaccttgtggagctgaactcagacctatggtggaggagtggactgctgggctgacatagtgtctgtgctcagggaggggccctgtggcctttggatctgtgcttctgtggagaggtcccagctactaatgctggggcagggagcagaag

SEQ ID NO: 105460 - DNA, 1089 bp, Homo sapiens
tgagtagaaattgtgagaaatattgtgccaggcaatttgcaaaatcttggaaggttgtgtgcacttaaccacccagcaactactcctggatgcatcctagagaagtgccatgtgaacagagaatgattttaagacttcactgaagtattgtttaggtagcaagattgggaaaagcctgcatttcatcagcagaagaatggataaataaatgggttgtttttggtccttggaaagtgaatatgaaagagttacgtctcaacacagatagatgaaaaattatgctgagaaagttggtgaagctacatacaaggtacccttagtgtaaagttaagcatactgtgtacctgtgggcacgttacttcaacttgtttttcactttttctgtaaaatgggatagtagtggcaatctcacagggtgattgtgggtgggggggtggtcaatgaagtaatgcatgtaaaatgcttagaatagtgtctagcatgtaagccttgtggacatatagaaagtgttattgttttgcacagtaatctattttctgtggattcaaataatatgaaatgagtataaaatcatgtattggaacgatgtgtgcaagtcaccattctgccttcctaaggcaggagacctgatggatttggggagggtacatggggccttcagttgtgttttctttgtttttttctaaaaattgatgcagaggcatcacaatgttaagatttttacagggtagtgtggtgggtactttttaactgtttgcttaaagtgtttcaaagtaaaaatatttcttaagcatagtctctgacatcttatgactttatagaaatccctgccaggtacatgatgttacttagagtgagccacctaatctttcaaggcttccatttcctcacctgcaaaaattgggagtgtcagaggcgtttgaaccagagtgactccatcttgaatagggaactgggtaaaataaggctgagacctactgggctgcattcccaggaggttaggcattccaagtcatgggatgagataggaggtcagcacaagatacagtcataaagaccttgccaataaaacagcatgtggtaaagaag

SEQ ID NO: 105461 - DNA, 1075 bp, Homo sapiens
gagaccactgccctttgtggttggacagaatatctgtggcatcatgggctatggctgctggaaaggggccagtgggatcctagatttgtcttcaagtttggcctgtggccatgcctattctgttgactttaaaagcagcagcatcaagaactcctagccttcccaaatgccccctggggagttctggctggggcttcagccttcctggctggcttttggatatctgctagggggttagagtggtctcagcggcaggtggaggagagcaggatgctgggctcaagcgcttggcgtgtggatctctaccagtaccctgttgccatccccatcccacaggcctgcataggcagcagcggtccatctgtttaacagaaatgtgctgagcactcccatacaccaggcgctggtgtgtttgccagagacccagcagggaccagaacagatgaaaatcctgccatcttggatctttacagatgacaaacaaatgggatacgcagtattctggatggtgatgtgtgtagtggacaaagtgaatcagagaagagcagagggagtgctggattgggagatcagtcgtgattttagatagtctggtcagggagggcctcaactgagaaggtgaaatgtgagcaaagacgtgaaggaagccagggaggtagcaggtagctctctagggagagttgcaggcagaggagattgggtcttgactggtgtcctcaggaaggaagcccctgggatggagtgcagggagccagctggaagggaaggagaggggccagggaggccacaggcccggccatatgagcatcatgggtcattacgggggcttgagctggctcagagggaggcagggagcttttggacaattttgagttgaggagtgatgtggtttgaatctgaattatattttataagggttaaccacagatccaaggactcagtaaaagggtgaaaggcttctcatgcagttagccttgctgccagttcccataaatcagactcctccccactccgtttctgaattttctataggatcctcggcctcagcagatataaacgcttaccattgttgtgt

SEQ ID NO: 105462 - DNA, 1102 bp, Homo sapiens
aggatcaatgtgaaaatcccatacaagtaagagttaagaaagaagagaccaatttcagtcacaggacaggaaaagactctgaagtatcaggaagtaatagtcttgacttaaaacatgttacatatttgagagtttctggaagaaaggaatcccttaaacatggctgtggcaaacacttcagaatgagttcacaccactatgactacaagaaatatgggaaggggctcagacacatgattgggggcttcagcctacatcagagaattcatagtggactgaaagggaacaaaaaggacgtgtgtggaaaagacttcagccttagctctcatcaccaacgtgggcagagtcttcacacagtgggagtgtcatttaagtgcagtgactgtggaaggactttcagtcatagctcccatcttgcgtatcatcagagacttcacactcaagagaaagcatttaaatgtagggtgtgtgggaaagccttccggtggagttccaactgtgcgcggcatgagaaaattcacactggagtgaagccttataaatgcgatttatgtgagaaagctttccgacgcctgtcagcctaccgtctgcaccgagaaacccatgctaagaagaaatttcttgaattgaatcagtatagggcagctctcacctacagctcagggtttgatcatcatttgggagaccaaagtggggagaaactctttgactgcagccagtgcaggaaatccttccactgtaagtcatatgttcttgaacatcaaaggattcacacccaggagaagccctataaatgtaccaaatgtaggaaaacctttagatggagatcaaactttactcgtcatatgaggttgcatgaggaggaaaaattctacaaacaagatgaatgtcgtgaaggcttcaggcaatctcctgactgcagtcagccccagggtgctcccgctgtggagaaaacatttctgtgtcagcagtgtgggaaaacttttactagaaagaaaactctcgttgaccaccagagaattcacacaggtgagaaaccttaccagtgtagcgattgtgggaaggactttgcctataggtcagcctttattgttcataagaa

SEQ ID NO: 105463 - DNA, 1090 bp, Homo sapiens
gctatttgaaatgactgggcctccttcgctagcttctgctgcctgccttcctggtctttcccaccttcccaccaggacttcaggcccagaggtcctgaagagtagttctgtgtcatccatctcccttctcatgccattctcttctcttctgcagtgggaccattcaccaaacctgctctgatctcctggttggaagcaagggagccatggggcctgaacatgcaggcagctcagcctaaggggaatccagttgctgctcctacaggtgagttccagagaacctgccaggtcctgctcctcctgcttttacttttctctttcttaaggtcagttacatcactgggaatttactccattgtttgctggaaggaagatctttaacagtgttggtaagggtgcttgggccactgggtctcttccatcctggctggcctccgagaggtcattcatttccggccatgtctattctcctgtccccttctcacagcagccctctcaataatagttcttgcctgctggagggcttcactgttcctgtctttcactcactgatgctcctcctcactcctggcctgcactcctgctgaactcctgtactcacccctttctgctcttaggagccctcatcccactcctgttctttcttttcttggtccttctttttgtaataggctgatctccagccctttcagccaagtgctccttggagccccaccccttggcttttgggtacctttctataatgccatgatttttctcccactctggctgtttaacactttcttcttaatcctttttatttccctgctggatgtgacgtctgcatatctctagctgccctgcccatcttgcttttcttctcccttccctgtaatctgggataatcttccatgttttgccttatgtttgactattttataaaggtattggcagtcaggcaaaagcctcaccacccagacattttattgccctttggtgctttctgcagttccaagtatgggaaaagagtacattctcttgtgttatattttttgtcaggagatgacctccagagtaaaacaaacaaattcatcttaaatcaggaaccttt

SEQ ID NO: 105464 - DNA, 1379 bp, Homo sapiens
gagactttcttctatggttccatggctgactctcatgattagcattgcctctctatcagtgttattattaaaaacaagtttacaatttgggagctagcctgcctctttgagttcactttgtacatcagtgcctagagcagcacttgacagtagatattacttgactgtatctccactgtgaaccattatgagtttaattctcaggaactagttccttctctctcatttctaagttacaggcctggggtgggagctgaggggtagtgggaaggtggcactgtgtcatctgaggcctgacaagagtgctgtactgagttaccatgtgcttccttgtgttgagctggagtctgtctctacctggactctcccatgaccctcattagagcccaaggaggctgaggtggttggaggtacctccctgggcgttcttcttgccctttcctcctgcctggaagtaataaaggacctggcttacctatccctcggcctttgtccttcagagattggtcatgtggtctcttctctgagtttgctttctgattcccagaaagatcctctcacaacattttcttcttgccaggacccgggccctgcccagagcccagatgtgcattggatgggtacaggagccctgcgatctgcacagatatggtcccttgcttcacctctcaggagcagctctgctctgggggaccacctggagcctccctatgaaatagaagcacgtgacttcctggctgggcaatccggtacttgctgcctggccttaagaccccagccttatgccacacttcttgcatttcctgtagtgttgtctttccacatctgtcctctcatgagaatctccttctgtcctggcccttagctctctgtcctctccatccattctataacctatatgtggcttgctcctcccccattacaccccccatcccactacccctttcctggccccagtagactgaggacatgtgagatgggtatttaacaacattatgtacctgctcatgggtccaggagtcctctactggggggaagagtgggcttctcactgggctgtccagagctgagccgctctctcatggctttttctccttcagatactcctgctgcccagatgcctgcccttttcccgagagaggggtgcccgggagaccaggtaacaccaaccaggtccctgacagcccagctccaggtgagccacagaacatttggtccttcctgatgtccccacgtcgctgcctaatgggatagtgcagcttccccatcctgggtttctctgtctagtaatctcacatccaaagacccgtgttccagagaccagattatccccctcaagcccagaggtcttctgctgggtgatggtcttccctttcacc

SEQ ID NO: 105465 - DNA, 2904 bp, Homo sapiens
ttccaaagtgctaggattacaggtgtgagccaccatgcctgacctgtcataattttagctattctaatcccattgcctttccacataaatttatctatgtctacaaaaaatcttgttgagattttggtaggatttgcattagacctgtagataaatgtggagagaatttacatctttactgtgtcacatcttccagtacatgcatacggtatgtctgttcatttatttagatcttctctgacttttttcatcatccctttgtgttttttacgaagttttaatgtataagttcagtatatgttttattgtggggtattttcttagcttactccaataggggacagcctagctctggtctacttgatactggcatatacctttgtgcaaacgctcttcttatatatacaaagatgatcccaaccagcagaatccaactgcaccatgtataatggacattattctctcatcccctcctgcacagaaatgctggtaatttcagtcacttgctgatgacttctgatgtcccagcaaatgttggcattgttgactgctgagaagatacttctgaggacccacgtctaaggtggacttggttcgcactcttctggttagtccctgaacaggagtgatgcctccaggcaggtggcatgctgcctatccagctcaggcccagtcttcgagggagcgagggcggcttcagacagtaaagaaggaagaagaggatgaaagctatactccagtgcaggctgccaggccacagactctcaaccgccctggccaggagctgttccgccagctcttcagacagcttcgctaccatgagtcttcagggcccctagaaactctgagccggctccgggaactctgtcgctggtggctgaggcctgacgttctctccaaggcacagatcctagagctgctggtgctggaacagttcctgagcatcctgcctggggagctccgggtttgggtgcagcttcataaccctgagagtggcgaggaggctgtggccttgctggaggagctgcagagggaccttgatgggacatcctggagggtgagtgtgagcaagtgtgtggtgcccagggaactctgcctgctagtgagccagcttgtctggggatgggggtggccctctaaactgtcaatatagaggagtgcaggggaagccttcctttcttcccatggtacctgagcagctgagaacgggaccctgagccacggaccctttagcaggtatcctttcctaccttcccagaggaatatcagctccagatagggtcagcaagtctccataaataacagcaacttctgggcacagtggctcacacatgtaatcccagcactttaggaggctgaggtgggaggattgcttgaggccaggagttcaagccagcctggacaacataggaggacccccccacactgtctctatacataatttaaaaattaggccaggcatagtggctcacacctgtaatctaagcactttagagtccaaggtgggcggattgcttgagtgcaggaattcgtgaccagcctgggcaacatggcaaaaccctgtttctacaaaaattagctgaatgtggtagcatgtgactgtagtcccagctacttgggggactgaggtgggaggatcacttgaacccaggttaggtcaaggctgcagtgagccgtgattgcaccactgcgctccagcctgggtgacacagcaagaccctatctctaaacaaaaaagcccagtaactagtctttggacacagtggcttacagtatacaaagtccatctccacatattatctaatttgacttgagactaaccatagccctgtaaagtggtgggtgttgggacagcatttagggttagggctcttggcttctcagtgggagagtacatgttaaaactcagaagagcgctctgcaggcaccatgtagcttccttctcagtaagcttttttttttcttttcttttctttttttttttgaggcataccccaccactcccagctaattttgtttgtatttttagtagagatgaggttttaccattttggccaggctggtctcaaactcctgacctcaggtgatccatccgccttggcctcccaaaatgctgggattacaggtatgaaccactgtgcccagcccttctcactaagcttttgaggaccttttctatgtgtgtgagatgggaggcagggaagatggtcatgagtgctgaggggcagagctgggctgagaaataggaagacctcgattttagacttcattccacaacctcaacatctgtggccacatagttgtacctttcagagcctctgttcgttgagaagaaaatgcagaaatggtttaatcgtgagaatttgttcggtaaatattcaagtgcttatcatgtgcctggccctggcagagttggcagtcccaggcctggcaggagagcagcagctggtcagttcaagtgcgttcgttcttcctgcccttctcctgcacacaggggagctgatgcttcctgtattgttacagttttttaaaaaagcatttatcacttttttaaggcttctttatataaaaatacatgattctggccaggcgtggtggctcactcctgtagtgctagcactttgggaggccaaggcgggcagatcagttgaggtcaggagttcgagactagcctggccaacatggtgaaactccatttctactaaaagggcagaaattagccgggtgtggtggtgtgcacctgtagacccagctactcaggaggctgaggcaggagaattgcttgaacctggaaggtggaggctgcagtgagctgagatttcaccagtgcagtctagactgggcaacagaacaagacgctgtctaaaaaaaaaattaaaaaaaaaaaacatatatagacataca

SEQ ID NO: 105466 - DNA, 1005 bp, Homo sapiens
accctccagggaaaattcacaccactcttgggataatgccttatggaagaggttaagagtcagtgtgtgtggaggtgcctgggttctcttgaatccacttattgggaatatagatcttatgggagccagaagcagggcttgtcccactcatagctttctttcctccctcagctcaatgtacttctccagttcctacccttcctcaagtggggaactcaggagaccaagcaggggcaactgtacttcggatggtcaggccccaggtgagcttggttctttgtgtttttaccaagtccccatgagtctggtccaagaatggctagaggtctcacccccaggactctgccccatctaagactattcctgtggctctcctgcctcattacttcccctggaggtaatggactctatcttgccctggacttgtccttttcgaggtgtcatctcagctcctctctcccatacttttgcccatgaagagcccataccctgtgcccttcgtacccctgatgactctgcccttcaggctgtgaatgttcctgagcgattggagcttgtcattccaggatactgtggcatatgaggacctatctgtagactacactcagaagaaatggaaaagtctcacactcagtcagagagccctgcagtggaacatgatgccagaaaatcaccatagcatggcctccttgggtaatgattctgtttcctagtcacttaaagtctgcatgctgcacaatctcttttctatattccttgtctctttaaactttttaccatgaaaatttccaaacatagttaaactagagtgaataatatagggaccctttctgcattcatcactgagattcaacagtgatcagcatactcttcacctcattatgaattgatatagtgtggtttaggtagggcttcttagttgtaaggaacagagagccactcaagttattgtaagtaaggagctgtgagtcataggcttaaaggaatgagaacctggaagaaact

SEQ ID NO: 105467 - DNA, 1035 bp, Homo sapiens
gaatgcaatgagtgtggagaggcattcattcgaagcaaaagtcttgctcgacatcaggtcctgcacactggtaagaaaccttacaaatgcaatgagtgtgggagagcattctgttccaatagaaatctcattgaccatcagagaatccacactggggagaagccttatgagtgtagtgaatgtggcaaagccttcagtcggagtaaatgtcttattcgacatcagagcctccatactggggaaaagccatacaaatgtagtgaatgtgggaaagccttcaatcagaactctcaactcattgagcatgagcgaattcatactggagaaaaaccttttgaatgtagcgagtgtggtaaggcatttggtctgagtaaatgtcttattcggcaccagagacttcacacgggtgaaaagccctataaatgcaatgagtgtggaaaatccttcaatcaaaactcacaccttattatacaccagagaattcacactggtgagaaaccctatgaatgtaatgagtgtgggaaggtattcagttatagctccagccttatggtacatcagagaacccatactggggaaaaaccctataaatgcaatgattgtgggaaagcttttagtgacagctcacagcttattgtacaccagagagtccacaccggagagaaaccttatgaatgtagtgaatgtgggaaagcctttagtcagcgttccacttttaatcaccaccagcgaactcacactggagagaagtcctcaggtctggcttggtcagtttcttaaggtatggttctctgagacagagagcaacgacctttgagttaagctgtctttataagcaggatgctcatagtggtttcccggagccagtagtcacggtggaccattccctacttgcttttccttggatcactaaggtgggagagtaggagtaacttattccagttcttacccattattaggaaggtaaggactacacatgtcattgaattgtaggtttcctttttttttctttacttttaaattttaacttttaaa

SEQ ID NO: 105468 - DNA, 1059 bp, Homo sapiens
ggtgtatgatgtttgctacaactgaatggtttttcacatatcttaagaattggtcatttgcagcggccgcggggcgctgagggcagctgtggcggcgcggacgagccgggacggcggcgaccggagcttgagaggcgggccgcagcgggaagcagcgggcccgaggccgcgtccttgggcccacggcggctgggcggcggcggtgcgggcgggagctgggcgtcgcgcgcgctgtgaggcccgggcggctcaggagcctcggcgcgtgcagcgagccgcccgcagggaaggaggccggtcagggcctgtggcagggccggcgagggatgcggcggcggccgcgctgagcccctagcccgccgggagcgccaggccggccgggcctgcgccgccgccgccgccgcgccgaccatgtcggcagccaaggagaacccgtgcaggaaattccaggccaacatcttcaacaagagcaagtgtcagaactgcttccagccccgcgagtcgcatctcctcaacgacgaggacctgacgcaggcaaaacccatttatggcggttggctcctcctggctccagatgggaccgactttgacaactcagtgcaccggtctccgaaatggcagcgacagttcttcatcctttacgagcatggcctcttgcgctacgccctggatgagatgcccacgacccttcctcagggcaccatcaacatgaaccagtgcacagatgtggtggatggggagggccgcacgggccagaggttctccctgtgtattctgacgcctgagaaggagcatttcatccgggcggagaccaaggagatcgtcagtgggtggctggagatgctcatggtctatccccggaccaacaagcagaatcagaagaagaaatggaaagtggagccccccacaccgcaggagcctgggcctgccaaggtggctgttaccaccagcagcagcagcagcagcagcatccccagtgctgagaaagtccccaccaccaagtccacactctggcaggaagaaatgaggaccaaggaccagccagatggcagcagtctg

SEQ ID NO: 105469 - DNA, 1040 bp, Homo sapiens
agaatatgattaagtaaatgataatatagccacaatttagaatactatgccagaatgaggtagttctatatgtgttgtattgaaagattgttaagactattgtgaaatacggaaattgagttaaaaaacaatgcaggttgctgaacagtatataactgtgatgatctaaagtatgtttttgaaaaataagcaatatgtgtgaaggtgaacatataagtatgtaaatgcagagaaaatgggttaggactcccatctaaactgataagtactttgtgtgtgtgtgtgtgtgtgtgtgtagtgtgtgtaggttatatatttaattctatatatttctgtattacttgatcctttttcaatgagagtgaagatttatcaacaccataggttattgtgtagcatttaaaataagcatgaagaatggcaacatgaaagtaatctttttttaaatcttaagtgtaatattttatctcacaggacatttggaagctatggaaaatgtaaaaatcaaacaaaaaaaatgaaaagaaccttaaaactacctgtaattacaccatccagagttaactacccactgctaacacgttggtataaagactcccagtctttttcttgggatccttttgttcacattattttgtatccttggcaataaaaaatctttttgttgtaaaatccttttttaaaaaatgctatgatgataattgtgaaaatatgtatccccaaagtcaaaaacaagaatttgtaaaatcataattattagtagtatggttggagattttcctttgaaagaaatatcttaaatcttaaaatgtatagtggttatctctttggaggtagaccgagatgatttttcttaatcatttgctgcttttaagtttttacaataaaagtaagttaacttttaatcaggaaaaaatcaataaacattatataaagctgtttgcaatgtggttattatgggaagatattacatatttatagtccaaccccttcatcctatgagggaggaatagaggattccatgtcctacattggcccct

SEQ ID NO: 105470 - DNA, 1020 bp, Homo sapiens
tgaggctgtacactgtgctgtccttaatgtttcaaacacaccccttaccattactagtcaaatgagggcagaggttcccccagagcctttctgtaataatatcatcaaaaccttgctgctttgatctttagatcccacaaaagttcactctgaaaattcttcccatatgctctctcctcttatcatgtactcactggtaagctaggtttagattctggagtgagcagtgaggtgcaatcaaagtaataaggaagaaagtagctagcttgtttctctgcccaactcaccctgggggttggaggagactctggcttccttttctgtttttaaaaattgttctatggcctccaggaatagataattatgttctcattctcaaaattgtaaccacactaccccctaccaccagttccctcttaaacatgtgcctgcttgtctctagggtcagaacatatcctgggatatggcggtagtcctgaaagcaactcaggaggcacctgctgcttcaacccttggcagctactcattaccagggactctggccaagagtgagatactggagactcatgggaccatgaactttctaggtatggttcagttccctgattctgaatctgaccattggggtttctcaaaatcttttcagagactggtgggcatccagtctcctaggttgaccaacagagtactgaggtattgaaagtgtccaggaaagctggaaagaggaatgctgaaatgcctgtgcatttgtcatgggaagtggcttattttgcacacaggctcaagacactagacaaacataggtgttgtgctgaaacctgatcaacaccaatatggtaccaggttcaagaggctgaagaagagacccagagccagcaaacaacatagaattttactaggtgtttatgtacagggtagacagtctagaggcagtggactgggcacgggagaaccacatggcccagtggcacaggctggacaggagagctgcaactgcttgcaaaaggcatgcggtttatg

SEQ ID NO: 105471 - DNA, 1053 bp, Homo sapiens
tcatatatcgaaaaccagtcaagcatccctcagatgaaaaatattcaggtttaacagcaagctcaaaaaagaagaagccaaatgaagatgaagtaaatcaggactcggtcaaaaagaactcacaaaaacaaattaaaaatagtagcctcctttcttttgacaacgaagatgaaaatgagtaagtgtaaatattttgaatttagtctactttgaaagtatatggagtgttcattaaaatcacattttttcctattataaagatactacaagttctttatagaaagtttaggaaatagagaaaaaaatttaataaactacatctattcatcaatacccctctgacttaaaatgccaactctatagaaattagctagtattaacattttgttatttcccttgtgtggttgtatatatatgtaaattatatttttaagcaaaatacattttttgtgtgtaaacaaaattttataaatacaactgtattgcaaatgttctttgtcctgcttctcacttgacattgcattacgagtattcttccaggtcagtaaatttcaaaaacctgacattaatagctacagataatttcataaacatctcattgtatctttttcattagcaatagctccactttgggtgggggagatgataatgtgccttgttaaaaatacctccccaactcctgctaagggtggccatgagactcagctctggcaagttaagaaatacaggtggaattctgcttgataaagctgctgggttttttgttacaaaaggacagacttggcaaacatgagcctttgctcttatcttttcatcctacttggagtgcagagataaaacctgagtaccagagccacttttaggcataaggaaggcagccatgtgctttgggtcatgttagtaaaaagactcagagcttggctccttgctgacatgcctggaggagctgctacaccagcttggattgctgacctctgacttcttggtagtgagaagaataaacactgtgcttaattaggccttggtcaggtttcttttatatgcagccaaatg

SEQ ID NO: 105472 - DNA, 1138 bp, Homo sapiens
caagcagtactcgtgcctcagcctcccaagtagctgggactacaggcgtgcaccaccatgccctgctaattttttgtattttagtagagacagggtttcaccatgttgcccaggctggtcttgaactcctgaactcaagcaatccacctgccttggcctcccaaagtgctaggattacaggcgtgagccactgcacctggcctaagattccctttctgaacccaatcatgtttgggcaaatgactgatgagtatttatctagactgcagagtaaagcatccaatggtctgttttaaagcaggaagactctttaaaagacttactgttttgttgaggtatagcttcatgcagttaagggcacaaatcttaatattattcaacaaatttttacatataaatacactaatgtaaccaccatccagatcaagaaatagaactgttcctgtactccagaaagttccctgtgacccttcctagtcaataactacctgatccccaaccattactctgattattattatcactgattagttttgcttctattcttgaacttaatataaatggtacagtatgtattctttttttattctggtttcttcaactgaacattatgtctgtgatcattgtccatcattgtatgtagcagcagttctttttcattgctgtgtagtgttccattatgtgagtataccatgatttgtttattctcctgttgattgacatttgggtttttattatagttagggctgttatgaataaagctactgagaatagacttaagcatatttttagatggacacatagaggacctcaaagttgaaagaattttacagtgaatgcctatagacttcatttttttcttttcttttttgagacagagtcttgctctgtcacccaggctgaagtgcaggggtgcgatcttggctcactgcaacctccatctctgttcaagtgattactcctgcctcagcctcctgagtagctgggactacaggcaaccaccaccaagcctggctattttttatatttttagtagaggcagggtttcaccatattggcaaggctggtctcaaactcctgacctcaaatgatccacccaccttggtctcccaaagtgttgggatcacaggtgtgagcc

SEQ ID NO: 105473 - DNA, 1164 bp, Homo sapiens
aatataatgatgtgttaaaactagttatcagctgagcacggtggctcacgcctgtaatcccagcactttgggaggccgaggcaaatcacgaggtcaggagatcgagaccatcctggctaacacagtgaaaccccgtctctactaaaaatacaaaaaattagccgggcgtggtggcgggcacctgtagtcccagctactcgggaggctgaggcagaagaatggcgtgaacctgggaggcagagcttgcagtgagccaagatcgcgccactgcactgcagcctggacaacagagtgagactccatctcaaacaaaacaaaaaaactatttatctagattttttttacttttaggtatcttatattgtattaaaggataatagcataggaaatttacatcttgtgaagcgagtgcaaaattaatgctcatgaaaactaggtatgaacacatgaaaataatgtatctaaatgaggcttcttttttacaggctggagctggaaagagtttcctttgtaagtgttcctttattgaaatctacaacgagcagatatatgatctactggactctgcatcggctggactgtacttaagggagcatatcaagaagggagtctttgttgttggtgcggtggagcaggtggtaacctcagctgctgaagcctatcaggtaccctgccatgagtacttaattggtgcttaggcaacaaacctgctgtgaatgcaccccaaactccaaaaagtgacaattgaggtaccaaaaatatgtcataaaggcataatacagaatgttcatgggaagtaaagataaaataatatggcagtattttcttttccaagagtctttcaaaatggaacctcgaaagggcaatttatacagaaataagatgatacattgtatcatcagtttcttacttgtccatatgtttttagtggttcctcctgggagatgcctgtttgaggggcttctgggaactctggcctttaaaccagctggctgttcttttctacgttgcttgcttgttaggtgtcaaaagctaacttaccttgagcattcagctcaggacaagcaaacctcttgacaggaatttacaaaatattctagatatgtttttatgaaatctgatctggcttaatgatttgaaagttttttattatgaagcatttga

SEQ ID NO: 105474 - DNA, 1050 bp, Homo sapiens
tttttgtagaagtattcaggcaaacatgcttgtatttgctttttccccttatgttacacaagtgacagcatactgtgctatttttataccttgccttttttattttggagaccaagtctcgctgttttgcccaggctggagtgcaatggcatgatctcagctcaatgcaacctccacctcctgggttcaagagattctcctgcctcagcctcccgagtagttgggattatagctgtctgccaccacgcccagctaaattttgtattttttagtagagacggggtttcaccatgttggtcaggctggtcttgaactcctgacctcaggtaatccacctgccttggcctcccaaagtgctgggattacaggcgtgagccatagtgcccggccgctttttttagataatagtattttggaatttgtctcagtttggaggatctctctctctctcttgttttttgtagctgtatgaatgtatcagatgtatttaatatgtaatatacagtatttaatgttataaaaagaaagcataaagtactatccaagaaacataacagatacaaatagctgggcgcagtggcttactcctgtaatcccagcctctttgggaggccaaggtggtggatcacttgaggtcaggagttcaagaccagcctggccaacatgatgaaaccctgtctctattaaaaatacaaaaaaattaggcatggtgatgcatgcctgtactcccacctactctggaggctgaggtgggaggatcatttgagcctgggaggcagagatttcagtgagacatgaacatgtcactacactccagcctgggtaacaaagtgagactctgtcttaaaaaaaagaaaaaagatacaaataatttcagttttatactgttgctgattaatagggttataacagctacgaattttttttttttttttgtgatgagacagagtctctgttgcccaggctggagcggaatggcccgatcttggctcactgcaacttctacctcccgggttcaagcgattctcctgcctcagcctcccgagtagc

SEQ ID NO: 105475 - DNA, 1969 bp, Homo sapiens
ctttatgtaaatatatttctttttccctatgaaagtagataattagctgtatgttagtatttttcataataaaatgagtgattctcaagtgcttattttacattttaagtgtacctattcttgttcctttttttttctcttttccttttttttttttttttaagataggatcttgccctgctgctcaggctggagtgcagtggcacaatcatggctcactgcagccttgaattcctgggctcaagagatcttcccacctcagcctcccgagtagctaggactacaggttcctgccactgtacatagcaaattattattttttgtagaggtgaggtctcacactatgtaggtcaggctggtcttgaattcctatccacaagtgatcctccagacatggcctcccaaactgctaggattacaggcataagccactgtaactggtcctctcatttcttttaatatgttttccttttgcataggtgttgtctggaggatggaggaatagacgtgtggcatcaacatcaatgaacagagaatcgtctaggtctcatgccgtctttacaattacaatagagtcaatggagaaaagtaatgagattgtgaatatacggacctccctactcaacctggtggatttagcaggatctgaaaggcaaaaagatacccatgcagaagggatgagattgaaggtaagaatgaaattatggtcttcaacttgtgtgtgagttcttactagcagtcaatacagtcgtgatgcatgacagtgtctcagtcaatgaggaactgcatttatgatgggggtcccttaagagtataatagctataccacatggcttaggtatgttgtaggctataccatctcggtttgcataagtatattctatgatgcccacaaaacaatcaaatttcctaacagcacatttcttaaaatgtacccctgttagccgggcgcggtggctcacacctgtaatcccagcactttgggaagctgaggcaggtagatcacgaggtcaggagatcgagaccatcctggccaacgtggtgaaatcccgtctctactaaaaaaatacaaaagtcagctgggcgtggtgatgcgcgcctgtagtcccagctacttgggagactgaggcaggagaatcacttgaacctgggaggccgaggttgcagtgagctgagatcgcgccactgcacgccagtctgggtgacagagagagactctgtctcagaaaaaaaaatgtatccgtgttgttaactgatatatgaccataccaagctaagtgttttgagggtggcaaagaaataagaaattgttcctattgaaaaggaacagagatttcttttgtggaacagtgaacatagatgggatagggcaagtctgtcagtagcaaaaatgttttaattcataccagaggggataagggtacaagagacaacaggggtcagaggaagaagggtgcaatatggactgcttgtggaacatgtggaaaagaagtagttcttgacttgtgaaggatttcggtagggagagagaaacaggaaatgcatgcctggcaggggggcatctcaagggttattgtggatgcagaatgagtgtagcatttggcatttcagcatggctcaatggatgggttggttagagaggcaagcaggcccggattatcaaggaccaggagtgccaggccaagtttgtatcaactctgcgaatactgggaaacacttaacatttcttagcaactaagtgattcatgaagaaagcctgttttatagaaacttagtcatctgacccactgctgttaagattttagaagggagagcccacagaaaaagatgaccacttacgctgtttaatatttcaggtatgaagggttaagtatctagtcctaggctaaggtatcaacagtgggaccagaggttctatgtaatatgtattgtcaatatgtgtttatatatatatatatatagtaatacg

SEQ ID NO: 105476 - DNA, 1299 bp, Homo sapiens
tcacccaggttgtagtgcaatggcacaatctcagctcactgcaacctccacctcccaagctcaagtgatcctcccacctcagcctcccaagtagctgggactacaggcatgtgccaccatgcccagcagttttttgtatttctttgtagagatggggttttgccatgttgcccaggctggtatccaactcctgagctcaagcaacctgcccacctcggcctcccaaagtgctgggatgactagcatgagccacagtgccagcctgtgtttgtcttctaatactaaaattacagtgtacatcaaataggaaaaggttagggatagttcagcacttcttttttatttgttgaatagttgttctttattaacattgtccctgacttgccttttcatccagaattttcctctgctagatatattttcattcaaaataccaaagagtaaccaacgtacctaaatttttgttcttttccgtcaacactttaggaagcaggtaacataaatcgatcattgagctgcctgggccaagtgattacagcacttgtcgacgtgggtaatggaaaacagagacatgtttgctacagagactccaaacttaccttcttactacgggtaaagtagatccttgggttcctgggctccttttggttatgctaaagttgatagtgggacagtctctcagccttggtggcaagagtatacattttctttgcttaaaaaggtcttgtgatttctcaccgaaaatatgttcattcctatcattaaacaggattcccttggaggtaatgccaaaacagccataattgcaaatgttcatcctggatccaggtgttttggggaaaccctatcaacacttaactttgctcaaagagccaagctgattaaaaacaaggtaaaatactggcgtatacttcattaaataaatgagaaaaatactaaagcttacagtatgccatttttgtgattgccctaatattaacattaacttttatttatttctcattgtatgcaaaatttctattttatctttcctacccttctatatcacacatgtaattagagacctaggttagatcttatggttgttattgcttgactagttttttctttttttttgagacacagtcttgctgtgtcacccaggctggagtgcagtggtgcaaacacagctcactctagcctcaacttcctgggctcaagcgatcctcctgcctcagcctcctgtgtagctggaactacaggcatgcagcaccatgccaggctaatttttttatttttttaatttttattttatttatt

SEQ ID NO: 105477 - DNA, 1076 bp, Homo sapiens
tagtgtggtaaaaaattaaaaaaaaaaaaaaaaaggaagtgtcaaaccaacccctccttccaagagggctgttaaaaaataaaggtcggattcctctggagaaggttgcttctgccaagctcaagcccaccctgcaagtcatcatgcacttagaggctaggctccttccccgtagggagctaggaaagaagggaaatgatactcactgaggtattggctcttctccattgggagggtgggggaaggctgtcgttctcagggaaagaagtattaggtgaacacacccggatcctaagggtgacccagcctaaaagctcagggctagtcagctggggggcagagagcctggctggggctgtctctctctggctccaggtctgaaggcacaagaaaaggaagcttcctccccacttgagcacactgtgattcctgtgtccttttgactatgatgtggtcttgaagttttgtttgatgttcatcactacaaatcataccaaacaaatgtaaacacaggactatactactcaaaaagcattattttaatgctttttaaaaaattcctgaacaggcagtagtaaatgaagacacccaaggaaatgtgagccagctccaagctgaagtgaagaggctcaaagaacaactggcggagcttgcttcaggacagacaccaccagaaagcttcctgaccagaggtaggatgagcacacagtcctttatcttggggaagactgtacaaataatagtttaagagcccttggtgatagacacaacacaataaggcaacccaaatttttctgcaggtatctctttctgcttatttctcctatataggaacatagtggtttgtttataatcagatacagataccataggcagtgagaagggggaattaaaataattttgaataatgtataagtgctaaaaagagattaatttcatttagatctacttctacgtagcatatgtaatctatatatgtttactataggataagagagacttatttttcttcaaagaatagctagtagagaattaattaactggaaatccataaaggcaagagggtgaattattaa

SEQ ID NO: 105478 - DNA, 1272 bp, Homo sapiens
gtctcattgttttttttttttttgagacgcagtctctctttgtcacccaggctggagtgaagcagtgtgatctcagctcactgcaacctctacctcctgggttcaagcgattctcctgcctcagcctcctgagtagctgtgactacagacccacgccaccatgcccagctaatttttttgtatttttagtagagatcgggggcggcgggaggggggggtctcaccatgttggccaggctggtctcgaactgctgacctcaagaaagatatccgtctgcttcagcctcctaaagtgctgggattacaggcatgagccactgtgcccggccacagtctcattcttttagattagttgagagcaatcaattaaaggctatctgttctcttggttttgcaatgtgataaatattttttttcatcttccctttcttattggatcaattacagacaaaaagaagactaactatatggagtatttccaggaagcaatgttattctttaagaaatctgaacaggaaaagaaggtaggaaatggaattagtaataaaggagattcaagatagttagttttttgctgtgtggtttttattgccttactaagtgaaataaataataccaagtcaataaagtaatggaaggctatgaaaaatcaaattttgcctttaagattaaatatgaaattagtatttgttgctggacttacgaaaatttagggaagtcaaattatttttcatgtttaaccaaattatgaatttctttaagtctctgatagaaaaagttacccaattagaagacctcaccctcaaaaaggaaaaatttattcaatctaataaaatgattgtgaaattccgagaggatcaaataatacgcttggaaaagctccacaaggaatcccggggaggttttctgcctgaggagcaggatcgtttgctctcagaattaaggaatgagattcaaactctgcgagaacaagtgagtatacggcatctataatatttctaaaaataaaagaagttcaaagcaaatctaagtttgtcagcaagtacttgttctttaatacaatggaaattgttttaagtgaattcttctgacagtgtgattgcataattcctttacctgtctttttaaaatagttaaagggaagagaaggggagaaggaagaagttgtggtgacattgctacatagtatgctactctagcaggccacgcagaatttcacccagtgggcagttgtggttatctgagtcagtaggctctttagggttgtgcctt

SEQ ID NO: 105479 - DNA, 1027 bp, Homo sapiens
gagtttttaatgaatattcaaactaatatgggtggatatttgtacttttgtttctcctgtacacttttttgcacttcgcctttttcagttaatcttggttgacaagattaatttggtccttgttcttttcagtgtgttgatttaactagtctcctttgcatgaaaagcctgccacaatgtacacccttgtgcttacctccttaggtgggtgaacatttcaagggtctagactccaactgagaataggagagttacaggacatgcatattttcaaactgatcacaaatgccaagttgctttccatggtggttgcagaagggtaccaccagtagtgcatgtgcatacctagttttctaatggctttttagaggaactaattcactaaggaaatgtttgtaaatatataatgcgtgtaattcttctatgtcacagatagagcaccaccccagagttgcaaagtatgctatggaaaatcattccctcagggaggagaatagaagactgagattattagagcctgtgaaaagagctcaagaaatggatgcccagaccattgcaaaactagaaaaagctttctctgaaataagtggcatggagaaaagtgacaaaagtaagaaatgattgttgtatatacgtgccatgtaggaaggggctgttttaaagagcatttttagtgccttgtgactagggtcttcattttagcctccaggcctgctatgctaatgtcttatacacatattcttttatattatagaaaggtatttactaaacttttctttttctcaaaaatcacagagcataaactacgtaagctaatagatataacgagaaaatactcattgtatttgttttattgataaaaagattgattcagatactatgttaaatttttactaaattttcctgtttaaagtatttgaaatgaaaagtctttaactaatcaaacgtgaataaaaatagagttgaaatgtttatcaatctaattagtcctgtgcagtataagagatatagaaaggtcagactcata

SEQ ID NO: 105480 - DNA, 2583 bp, Homo sapiens
gtgagccccaacgcctgacttaggttttctgttttatttaaactacttttccctacagtgccctttattttgttggccattttgttgtggcctccataataccttgacttactcccttcagaagatactaatgtctggatctcatcagtttctaaacattgatcattctctaaacaacttttacatgatcttttcccacactgaaactcagtggactctcttcaacatattcagtgttctaggcatttcctgaaaattaatattttctacctgatagatgataccgggttcttacaacctgctgcccttgctatttgtttccttttctaaataattccttggctgttaacattagctgctagcactaattcctacaagattcactggctgctgtttctctgtctagcattaggcgtgccacactttcgtcattgtttgttctttctcctaatgggaaaggtgttgccttaactacacttctccatcctgtggcatctgcttcttaaacatgacttctaatcccctttggcacactgtgtcacatcctgtgccttctgctgagttataagcttttgtattttagggctcgctttccaacccatttctcacttttcctccttgtggcccaaaattgatacctgacagagaacttagaaaatgtgtcctgttatttttgcttgtcaaacactgaagttgtaaagctaggcatggtggcatgcacctgtagtcccaactatttgggaggctaaagcagggggttcacttgagaccagaatttggggctttagtacactatgatcatgcttgtgaatagccactgcactctagcctgggcaacatagtgaggccctgtctcagaaaaaaaaaaaaaaagactgagattgttttcttattaacagatcagcaaggattttcacctaaagctcagaaagagccatgtttgtttgcaaacactgagaagttaaaagcacaactcctgcaaattcagacagagctgaataattcaaagcaagaatatgaagaattcaaagaacttactaggtaaagtctaaatacacatgcatgcacacttattttctttcagtgttcatttgctgtagtgttaatatcgataattcaattgggcattttactttaaatattaaactctcatagcagcaactactttgacatgaagagaaagagcatgcttctagctctttactaatatattcaatgaactaggtaatacaggtgttttaagcagttttttcctgttgagagtctattgaacttgcatagtaaattatttaaatttaaatttgataatcagagttgttaagacttttaggaagtataggtttgttaatattcctacttgattctcactatgtaaaaacaaagataaatcacattcatattataactaagatcaatcttaccctaaaatataaacaaatgtttggttcaaaaatgacatatcacatatggtataatcatggactatttgtttgggcttttgaatttgagccctaccatttactagttgaatcccttaaacagtctctgagctgtagtttactgaactggagaatgatgggaataatctgagagaatagagaatatctctgatttagagataactataaagttatgtgagagcataaactgtaaagtattctataaatgtttgacattacttattacctgaaatactccgttttacaatatctattaggaaaaggcagctagaattggaatcagagcttcagtctttgcaaaaagcgaaccttaatcttgaaaaccttttggaagcaacaaaagcctgcaagcggcaagaagtttctcagctgaataaaattcatgctgaaacacttaaggtaggtcatctgaacaatacctccaccttaaatcagtgcaatgtcattttattaataatggagagagtctgcatggtctatctccagatgcagatgacatcccatgcaggtaattaacaccggtgtcacactggtctttgggttactgctagcaatcccactgatgtatccccccagtggtagggtggggtaggaaagaattcagcatttgcaatcaaattcgaatgtgccattaactttagtcagggtttcctaacttctgagccttatctttcttttctctaaattggaaatgaaggtaatttacttgcagagttttagagtactaaatgagatagataagctgcctggtaccttgtagatatcagtaaaatggcagctattactacaatataacatgtcctcaaagttttcagtagaatagaaaccctaatgggcaaagaccgctaagggatcacaggtgccactggaaataacatgagagggttttgtcctaaataaccacatccctcataaaagaaaaaaaaatgtgtgaacaactgagaatgaggagagagaaaggaagtacacaaggaaaacaaaaggttgaggaggtgatactgatttcagcttttgtatccaattttttgaaggttaaaaaattttttccttagctgggtgtggtggtgcaggcctgtagtcccggctgtttgggaggttgaggcaagaggattgcttgagccca

SEQ ID NO: 105481 - DNA, 1028 bp, Homo sapiens
ttgtctcttcttgtacatttattctttgtatgaaaatagatatcagctcattaagtttatttttaaaaattgtattagaattttgcttgggactgcattgaattgataaatttatttccacttgggcatttttgtactgtgtctcaagggtactttttcctttcttttcatgaatagtatttcaattttatcctctctattcacaaaattattaaatatgccctttttaaatatgtgctaatgttttccataatcattttttgctgcagattataactacaccaaccaaggcctaccaacttcattcccgaccagtaccaaaattaagccctgaaatgggaagctttggctctctatacactcagaattctagcatattagataatgatatattaaatgagccagttcctcctgagatgaatgaacaagcttttgaggccatttctgaagagcttagaacagtgcaggtaatgttttgttctagaaaaaataaataactggacatccatttaaatacatttgctttgttattttaattccctataagttacagtgttcaaaagtgcttagtattaaaatcatatctttttaagtgtgggtttataatcattcctagattggaaatcagcccactcttgctttttgtctctactttacaatctttagcaagtcattctccatgggtttttgttccttagtgtataaaatgaccagttggccactagctccaagttccagaactggtttatatagcaaagtgctgtatctgctaaaaaaagttaaaagaggccgggtgcggtggctcacgcctgtaatcccagcactttgggaggctgaggcaggcatatcacgtgagatcaagagtttgagactagcctgaccaacatggtgaaaccccgtctctactaaatagacaaaattagccgggtgtggtggtacatgcctgtaatcccagctactcgggaggctgaggcaggagaattgcttgaacccgggaggcggaggttgcagtgagccgagatcgcgcc

SEQ ID NO: 105482 - DNA, 1337 bp, Homo sapiens
ggttttctactgtccagtaaaagttggagtgggccagaccaccccaaaccccagtattttgtcctttccaggccatggaggtaaccgcttgcagccctgaggaagcttcttagaagtctcaagatggctctgtcatgtaatccaggattttaattttaatcacttctttcctttgtatttcaaagtgtctactttaatggaccacaagtgtaaatctgaaacattagcaatcatttagtatataaccttttgatgatgttttctggctccaaacaggcctttgatacctttgttcatatgaggttttgaatttgttttgttttgttttgttgtctctttaatgcagacgaaatggtggaatgtttgagaattccattaaaataaattttgatgactgaagtttttgtgttgcaggaacaaatgagtgctcttcaagccaaactggatgaagaagagcataaaaacctaaagcttcagcagcatgttgacaaactggaacatcattctacccaaatgcaggaggtgagaccaagagcacagcctcagaaaatgtatgaagtaccctcaaatgttaccttgaggaaacatcctcaaggatcctcaaacatccttgagtatgcatgaaacatattcagagagtatcacagaaagaaaatgttgtcacatggccttagtgaaggcttatttgagctgtattctctaccttgttacttagcatgctgctctgataatgagacaggcatgcatagtctaaacctggctgacttagtcaataatgcaaatggatcccttgctatgtgtttagaagaaaccaagatggactgtccatggcttcatagttgttaatcatctttactgtagttcatggggacagccaattttcttctggtcagagacgttaaagctagactttaaaaacagggacaggttaatggggccaggcacagtggctaacacctgtaatcccagcactttgggaagccaaggcaggtggatcgtctgaggtcaagagatcaagaccagcctggccaaggtggcgaaaccccgtctctactaaaaatacaaaacttagctggacgtggtggcgtgggtctgtagtcacagctactcaggaggctgaggcaggagaatcacttgaacccaggaggcggaggttgaagtgagccgaggtcgcatcactgcactccagcctgggtgacagagcaagactctgtctcaaaaaaaaaaaaagaaacaggttaatgatttggagtgcatcttagcatgccagtattccttttccagtaaatttatcttttttcccaaagcttttctcatcagaaagaattgattggacc

SEQ ID NO: 105483 - DNA, 1826 bp, Homo sapiens
tatatatattatagatgtatatatattatagatgtatatatattatagatgtatatattatatatgtatatattatagatgtatatatattatagatgtatatatataatatatgcatatataatatatgtatatatattatatatataaattgatactaatgtgacatacgatcttttactaaaataaaattgacttatattgccattaggaaagataagtgatttaccatttaaaaattttcttctccttaatgtcattgggtatgaagatattatttctgtcctcatcagaaagttgtagctgacctcatgaaccagatccaggagctaagaacatcggtctgtgagaaaacagaaactatagacaccctgaaacaagaactgaaggacataaatgtaagttcggtcaccaacaagatgttaaatttgagcatgggacacttcacagacttttcaagagtttaacagatgctccaccagaaaaaagattctgtggtcaaataagtttggaaattctagttaaataaagctcaacaggtttgtgtgtttgtaggacttgcagagtcattatggaagtgtgtagtatgtatctctgggggacaatgtaggctgcagtgtttctcaggtttcactgatctgggacaatgttctctgtgcactgtttgggaatgccggtataaactgaataagaaacaggctggttgctggccgtaacagttaaggcaaatgtggtgttttttagtggctttgaggaaaaagtaacacagtagcacattgcagttaagttcagagacattaattagaaagtgagttcgtttccgcaatattggacataatatcatttcctaaagttaactacttattttgtcagcatgtatctgagttcagtgttgatgcttttctcctctgggtcgaggcgaaggcttttgtcactcctcctcactcctctgctctacagggagcttgctgcactccatgtttatttctgaaggcagtagatgacaaaccctgtgtttttttcactgatacttagaggacttttccatttctcttcaccattcatgcacttattcttctattccttcagtcagcaagtatttattgaattatcttgtgttaatcttgtcatcaccttggaacccagactcattcttgttattttaatctagaaacaggaaataaaatggctcttatagcatgactttcttttctacagtgcaaatacaactctgctttggttgacagagaagagagcagagtgttgatcaagaagcaggaagtggatattctggatctgaaagaaacccttaggctgagaatactttctgaggacatagaggtaggtattaacgcatcacagcttctttgtttgccttattacttgtcaatatgtgtatttgtgtgtggaagttattaatgaataaatacaggatttttaaagaaataattcttatacagctgatgtgcctcaagacgcttcactacacaggctcattctacctctacctcactgcctgcacctcatgctgccaccctgactgcttgctgtgcctgagatactccacacacgttcacgctgccaagcttcctcctctggcagtcttatacatatactgtctcctttgaggagatagtatttgtatactactaatgtattattgtatagtgtataataatacaaatagtcatgtataataatttcaccaaaattattatattttatctagctaatctattttccgtcatttttgctgacaccacgttaacttcctataactgacccctgtaaggggagcagagtggaaactgcatttaattggatgc

SEQ ID NO: 105484 - DNA, 1086 bp, Homo sapiens
tttgatggtctatgacaatgaatcacaatctggtgcaaactgcccaggccctcctcaactggctgatggaggctcatcttcacagctgtttactttccagtatataaaggactagagtcaattggtgagacaacaacaagtaaccaagagacctttgagtcctccccaggagagggagattggcttgagatcctgggggtgaggagagaatgcaattagacctcaaacctagagtacagttaaacctcaattgggatacctatatatgtttactgtaataatgttaatctctagacctgttcatctaaatattaactgattactttgtcttagaatggattagcacacaagcaaaagaaataggtttttacataaaacttccttagtctgttaaaagttgtacatagtaatgatttgggaatccttattggaataccataattaagaaactgtgatgattgtctcctaacagagggatatgctctgtgaggacctggctcatgccactgagcagctgaacatgctcacagaggcctcaaaaaaacactcggggctgctgcagtctgcccaggaagaactgaccaagaaggaagccctgattcaggaacttcagcacaaggtgagaaacacacaggtgtcactcaagatgggagacaagagaccaagtgtagtggctcactcctgtaatcccagcactttgagaggccaagggggtggaccacttgaagtcaggagttcaagagcagtctggccaacatggtgaactgaaaccctgtctctactaaaaatagaaaagttagccgggcgtggtggcgctcacctgtaatcccagctacttgggaggctgaggcacaagaattgcttgaacctgggaggtggaggttgcaatgagccaagattgcaccactgcactccagcctgggtgacagagtgagaccctgtctcaaaaaaaaaaaaaaaaaaaatgggggacaggaggaatccacagttgaggttgtcatgacattcctgcattggccaacttctccatgtacaaaggggaggctaatggagtatccttacctggactgagacttgctcagctgc

SEQ ID NO: 105485 - DNA, 1624 bp, Homo sapiens
aatggctgtgctaatttacattcccaacagtatacaaggatcccttttctccacaacctcaccaacacttaactttcatctttttgatgatagccatccctatcaggtgcgaagtgatatctcattgtggttttcatttgcatttccctgatgattggtgatgggaagtttgtcttttctatttggaccatgtaccccatattactaagttgtaaccttgtatctgttcaattttcccagctaaaccaaaagaaagaggaagtagaacagaagaagaatgaatataacttcaaaatgaggcaactagaacatgtgatggattctgctgctgaggatccccaggtacttttcagaaaaagattatttcaggaggaagaaacagttttgtaaatgataaaaatttggaaattaggaagaacatacctttgtctttttaaagaaaaagattttcactaataccctctgtctgctttttacttgatgaaagtagcagtcttttatttccttggaaaagaattagaataataagctaagcagcggatttttttttttttttttttttttttttttggcagatggagtcttgctctgtcacccaggctggagtgcagtggcatgatctcggctcactgcagcctccgtctcccaggttcaagcaattctcctgcctcagcttcccaagtagctgggactacaggtgcacactgccacgcctggctaatttttttttctgtattttagtagcgacagggtttcactgtgttgcctaggctggtcttgaacttctgagcttaggcagtccgcccacctcggcctcccaaagtgctaggattacaggtgtgagccaccatgcccagccgtagctagaatattttttatgtacttgacatttacgtttaaaagaaatctttataatatcacttaattggatatttggatgagatgtgattttattttagagtcctaagacaccacctcactttcaaacacatttggcaaaactcctggaaacacaagaacaagagatagaagatggaagagcctctaagacttctttggaacaccttgtaacaaagctaaatgaagacagagaagtcaaaaatgctgaaatcctcagaatgaaggtaattggattttttttccagtaaatttaattatttttaaagagaccaagtctcgctatgttgcccaggctgggctcaagtgatccatttgcctcagccacccagtatctggcactataggtatatgccaccatgcccagccagtaaatttaatttttttttttttgttttttttttgagacggagtctgcctctgtcgcccagggtggagtgcagtggtgtgatcttggctcactgcaagctccgcctcccaggttcacagcgttctcctgcctcagcctcccgagtagctgggactacaggcgcccgccaccacactcggctaattttttgtattttctagtagagacggagtttcactgtgttagccaggatggtcttgatctcctgacctcatgatccgcctacctcagcctcccaaagtgctgggattacaggtgtgagccaccgcgcctggccaatttaattttttaaactaagcagcatcctcatggttactg

SEQ ID NO: 105486 - DNA, 1009 bp, Homo sapiens
actgggtcaggtgaaacgaaatcagataataggcaagtaaatccaaaaggatattccttgcagacaagtatttatttcttccagatagctatgctcatgattttcaagttaggatgcaattgagtattttgagggatgagctgtgacgtcaattttttgttttaattagaatctacgtaataaatagaatcgaatagttgagaacatttttcaatatagagatttttgtcatctttattcacaaaggaattttaatttttaatgaattctgtgatattgattttaaaaatctgtgttcaagacactgtggatgtgatcatgaatcaccattctaggcctccaatagcttgtcacagtctgcttttcatgcagcaatacccagtgcagtgtctctgcataggaacttaaaagaggaatacctgtctcagtggtggccttggggagctaaatgaagcctactgtaatgtgttttttgaaaagatacgatttgatgttattaggagcagttgcgtgaaatggaaaacctacgcctggaaagtcagcagttaatagagaaaaactggctcctgcaaggtcagctggatgatattaaaagacaaaaggaaaacaggtgagaaagaaccacgagaactctatgggctaaatcttggcctgcctgtgtggagttaaatgaggttggaattggtttcacaggtttcccaaggtgtacaatgtttcccactaatccaggagatggtcttttggttgattttgaatcaagtctgatctgttcacctttgcattgctctgcagtgcgtttttggcattgttgcatttgttttaaagtgattgaaatgaatttaaaacatgtgagatacttaaaacaaattacttatatttaaaaaaatttttttaaggtatatataatatcgacaaggttcaagaagccttgcagagaaagggagaattccctactagttggctttgcttcgtaactcatggtccagggaaagcccctgggcaggacaag

SEQ ID NO: 105487 - DNA, 1651 bp, Homo sapiens
acaacctgttttgtaaataaaattttattgagacatagtcacaccctgtcattttaatattgttgtggctacttttgcactacaatagctaagttgaatagctgtggcagagaccgcatggctcccaaagcctgaaatatttactgtctcgttcttgacagaagacgtttgccaatccttggattagtggacagaaaacatatctttccctaatgatttggggtatttcttcattgaggactcattaccatttttgtctgggctgccagatttgttaagggaaagaaacctcactgtagcttctgttttccttcaagaaatggtcttttactcaccagtgagagagatattcctagagaagcctacaacattcaggaaggttctccaaggagggagggagggatgtctctctggtccaggggctgcacacagaaactcaacttattatcctcacctggtcaggctcacagagatagatgtattatctagaatgtaattttcttactttatatattggaacattccttttccatgaagacatatctggtgcttgggacatctggccctggtgtccacatacacggaaaggcagagtggttatcagaaaatgccaactgactatggaacctgagcaaaagagagtcaaggactccactagcctgaggccagagcgaccctgcctacccaaaatgtgccccctcccagctgatcacattcataccaggctcttggctctttctttcagcccccttttgttcacattcgatcttcagatgttaccacttttaactaagtttctactgtattttactttcaaccaatccttgattatatttcccacctcatctcatcttgcttttgtactgggaggaatcctgagttctggggaagtgccttatttcatccccatgtgtcaatcacatttatcaactgtactgacttgacccaatcacaatagagttagcctttctttgtacaccttggcattgctgcatataatggatttgaatttgaaattgatacttgaatatacttagcagtgttttcctatgcctcctcccacccctgttaatctatgcagtgatcagaatcatccagataatcaacagctgaagaatgaacaagaagaaagtatcaaagaaagacttgcaaaagtaagatttttttttatgtaatagtttcttcttgtctgagcaatgcttttatagttagtatttatggtagtatattttagaaatcattttactattgaaattcctgtcttttctgcatttccactgtttagcatgatatttaccattagtatttagacacagctgagaattaagaatttgtcttcatgcctacatggcaagcctactgctcagcatgcacacatataattctccatttagaagcaagtaccaaggcctgtttgaagccttagagggcatagtgcatgaagtcttggaaataggtacttactttatgtatgtgtagctggcactgtggaaaaggatattggtttgattttattcacatgaaggagaatgggctggttcctttctatcttttttaagcaatgttatttaagaacctaagcaatctttttattttctttttttaatcttcttatagagtaaaatagttgaagaaatgctgaaaatgaaag

SEQ ID NO: 105488 - DNA, 1061 bp, Homo sapiens
attaatcagtgtgccttaaatttactggaaatttttataagtaattattatacttagggaaaattttagtggaaatgcatctcttaatgtattttaacctaatgctttttcttcagtcagctcatttttctgttgtacttctcaaatgagacaggattcagcatcaactctattcgtattttctgcttttatagatataaatgctgagaaatcttgttcacatagttaagtaaatggcaatgaaggagttttgatagggtactgtattccagttatttgaactttatgcaagtaaatatgtcaaaaattacatggtgatttaccatcaaaaattctttttaatgatcagctgacaaagaccacccaatttatgaaagatttgttacccaatcattgattcatttgcttcatagaatcagagtatacataggaaaacagccttttcacctgtgtatgagccattcagagtccggctcctagctaattagtggtaaagctaagtcagaaacccagattatttacaggatttttgagaatccagctagttggttgaattacagctattttagaactaatatctatttgaggtcttctagcaaaaagagtaaaagctatttaacttggtgtatagtttatttcatagtctagtaaccaagagtcttcatgatatgctgtctctggaacatacagcaggccaaacttcactgcgggcaagtgaagcacacttcagcaaacggcatgcactgttttatcaatcccagcctacaacagcaattttaaacgttacgttacccatatatttgtgaagatgcttttaaaagtaatggggaaccaatacaaagccaacaatgaattgggagagcatcagtgcccttctccccagactgtccttctgagatccacagaatgtagtccaaaaacaacttgcctagaaattagctggccctttgtgtattaaattttatgtattatatcatcttagcaatcaaccgctagaaattagctggctttgagtggtgtattaaattttgtgtattatatcatttcagtaatcaacagct

SEQ ID NO: 105489 - DNA, 1370 bp, Homo sapiens
aagattcagtacgtagtgcgactaaagaaggaaaatgtcaggcttgctgaggtaaacctaaaaattattctgaataaattctgtctggtttaaaaatgattattttattgaaaccaaattaaaacttaattattgaatcagttaactgcttacttcagggagcttcctgaattaaaaaaaaaaaaaaagttggtcgttgctattctgagcctaattcaatcagtggcatttcatagacagcagattcttgtttaacgtttagtttgcacattgaaaattccagtcttaatttgaaatatacacctaataaatgcaaaaaaaaaccacttcctgtaagaattagagccttattttttttctttttgtttttttaaaattacttaggagacagaaaagttgcgtgccgaaaatgtatttttaaaagaaaagaaaagaagtgaatcttgaggattccggtcagctacctaggcatcaccttgtttgaagatgtttcttctcttttacaagtaagacctactcctggccacttaggagagctgaatttatggaccttaattattaaatgtttataaggtggtggtaaccacctcaagtttctgatgaacattctgcatccatatacaccctgtgacagtcagcagtctgctattaagtggcctacttcaaggctttgaatcaacttaagggaaaaccttttgtctttgtaaaaataaaagcctgtagctaaggtttacagtggacattagccagatcattttcttcttagattatgccataatctcctttgattcttatggaagttctaacaatatatggtggttccaacacctgcagtgagtttaatgactgacttagtagcaggtacaagaagcaaacttgttaatatagattatttttgtattcttactttaggtattttcttgagcattttccatgactgtaaataaagccattttttaagataataattaaagtgacttacattgttcattctgttgttcattgaacacatacttaatgaacacctgcaatatgccaggcactaatcatcagtgaacaaagcaaatcttgccctcaaggaacttctgtgtattgggccttctttcttttttattgagacaaatattccattttatggatatgctacactgtccatccaacagctgatggatacttgaattgtttccagtttaggactattataaataatggagctataaatgttcatgtgtaagtcatggtgtggacatatatttcatatctcttgagcacatgcctaggagtagaattactgggttatctgaaaagcatgtctttactttttaagacattgcctgttttccaaatttaccatttaggtataccatttt

SEQ ID NO: 105490 - DNA, 1042 bp, Homo sapiens
cacaggagagagtcaattaatgtaagaaatattcaacctcacaaataatcagatgcaaagtaaagcaatgagattacttaaccactagattggcaagaatcaaaaagatctgtcggtagagcataaattgatgcaatcttttctcaaagtaatttggcactagcaaaatgtatctacattttgaccctgtgaccccatactgggaattcacttctcaggaatatgcacacatgtgcaagatatatgtccagaagcatatttctaagaatacctcaggcagactcacccatggtcagaggtctgtagtgaggagatgcccaggctttccaaagagaacttgacgtcagtcaaagggatggccagggtattcttgaagatacaattgcagacaagtagctggccaattctgcctgtgttaggcaactgtagtagggtggggaggagagatggggagagaagatatgcatgagccaaccaaggaccctcagggttcttaggggccccgtcacactccatggccaacttccaggcagaaggagccctttatggcctgcaggaagctcacctctatagagaactcagggtactggaaagacgtgaatacttcagaggccatgatttccttagactccacaatttccgcaatgatgaaacctctgataactggctcatcatctaatatagccaggctgttgatgtaggtcttggagtccaaggtcagagtcacttctgatactgccaaagagtcagggtggaggggagaggtcattcatcatacccccccagtatgagttctcctcatcaagcacagaattagattaactttgtgtgaattgaactggataactttggacatgtcccatactctctttagaaaacaagacgttgggctcaagatggaataataattggccaagttctccaagcttacatcctgagtccatgacagacattacccgttgtcatcaggacatcccacttgttcccaacactgtgccttgggtactcataatcattgatctgactgggcatctgagattaa

SEQ ID NO: 105491 - DNA, 1067 bp, Homo sapiens
aacttgacgataaatttcttgggtccagtttttattggggtgcattttatttgggattggatggtctcaccaggctgcaccgtcctggaaaattcaaagacatacggacatacaatcagccaaggatgttatgggaagagggagaagatgagttgggtgagaagccaggaaactgagccttagctcagcctctttgaaaagtcctggccattccagggcatggcacagtgtacctgcaccctgggtgctgctatcagttttctcagatgtaaagcaagacgggtgaaccagctggtttccagaagctcttccaactctgacatttcacaaatcttccctggagtcttgcctgactttactacagatgttcttgtttcatgagtattagcaacagtcatctattacataaaatctaagaggaacatgtattttatgttgaatccacatgcaaggaattggctagcccctcactactcaaagtgtgttctggggcttcgcaatactagctgagcttgtaggaaacacagaatctgaggctccaccctaaacctgctgaatcagaatctacactgtaacaatactccccaggtaatttgtgtgcacattaaaatgtgataaatcgtggtctaaggaaaataggagtctactcatttttacttggaagattcagacatcctgtaagaaacagaccatcagaaacctctcagaaacaaaacattagagttcagtaaagttttttgctggatatatcagcatgccaaaaatcaatttccatatagtccagcaaacaattagaaaatacaatgaaaaatattccattcataaaagctataatattgatgcatcttggaattaacccaactaataacgtgcaagtggtatataaagaaaacaatatagcttttctaaaggtgataaaaaagactggaaaaaaatgggaaaatctcatattcctagatggcaagacacaatattgtcatttggcataattctcccccaaataaataggtaaattcaatgcagtatcaatctaaatcccagctgttttaaaattatatgacaagatg

SEQ ID NO: 105492 - DNA, 1089 bp, Homo sapiens
ttaatgcattcacaatgttttgtaaccaccaggtctgtctggttccaaaatcttttcatcaatctttgacccttttgaagattgtagggcaggtattctgtaggctgtccttcagattgtgtttttgatgtttttctcatgattagattgaggttaggcatttggggcaggagcactgctgaagcaatgtgtcctcgttgcaccgtatcaggaggcatatggtgttgatacgtttcattattgtgatgttaactttgatcattgggtgaaggtggtacgtgcaatgtttcttccctgctattaaggtactgtttttccctttgtaattgataagtatcttatgaggatatacttttgagatccaatttttttaacttagaatttattcaaaagtcaagaatcttaaatctctgaaatggcgtgggaagaaaaagtgctagatacacagagatctttcttgagtcatgtgaaggagcagtgcccaagcccagcaaacccacagcaaattcccttggcttccagaagagatggagaaagcagtgcccccagtggagggtcaaaggcctctgtgcagggtgttgtgggcctggagagctggcctggccatgtctttacctcctctgggcatctccccaccccaacaccctttctgtggcctggtggctgagttgcagccgacacccagaggcaggtgagttgacagcttggaagaggctgcagggtggatctgctgcatgagcaggcctgagcccagccttacctccccacagtggtcctgtgtgccctccggctgcctaatgcatgttggcacttgctgtacgagcacccgcttcttcacctcgcatgctgtttgtgtcctgcactccttccttaaccccatcgtccttctgctgtgtttgcagcccctatctaccctggtgggagtggccaaaaatatttaggaggggatcaccagtttgtagtggcctcagaggatgtgtggtcccccttatgcctcagccactcatcagcctagcccctgcccatcatctggcattgcacttgtggaaggaaagaaggggagggctgggtggtgggtggagaacacgt

SEQ ID NO: 105493 - DNA, 1052 bp, Homo sapiens
aatatgtatctggcttaggatcacctcatagaagagaaagaattcacagtgaagcagaaacaagccactgaccagcgtactcccaacctgaaccttctttttctcaccctctccctcaagtaaacatcttgctgacttgagcagtgtgattgccgtagcaaagcagagtggcccccagggatcccgctctgttgggcccacaggaggagccgatgaagctgatccaaggagtgaggacaagcgctgcagagggacgttcgctaaaagccttctaggggccgcacatgctctaacacggacataaggatgccctgaatttctgcagctgaggccatatagtctggtgaccaagtatttgggtcctggcttcagtctttggttgaaatgtctgcttggctacttattaccgcacctactaccaaaatatgaccttgagcagtaacttctttaagcctcagttttttcatctgaaaacgggaatgataatctaaatcacaaagttaatggaaggattaaatgagggtgatgaataggaatgtatagcgtctggccctggtatggctttataaatgttagctgtgttggagctgtgcttttcaaaccattggtcacagccattcatggtttgcaaccagcatgtttttcaagaaaaatgtttaatgcattacatattgcaggataagtattgttttatgaagcttagggagttgtgtgtatatgtgttctggaatgcaacagaaaaatgtttcctcttgtgggttacaatatagaggtatgaaatctctgatgaggagagacagtgttatctggcccgctatgaagagacacatttgcataggctgctccctgaggctctggctttctacatctgatgatacagggagcagggaacagcctgttctcgttctgtggggctcagctgagtctgttctgcacagactcttccttcctcgggagccttagtcctaatacattcattttggagtgttggtgagtttgttcacagatcacagctcatgtgtcacccagactgacctgggccaaaaggccca

SEQ ID NO: 105494 - DNA, 1011 bp, Homo sapiens
ttttgccaagagcacaatgactgaggaatgtagccatcatttgcagggtagtgattggttcccagcctggcttccacacaggacaggaagggaaagcatccctgagctctcctcagtatttccggatgtaatgaaagaggacatctttctacacaaagtcagccccaacttttggcttggtcacaggagttctgatagtactgtttggtgcactcatgggaaattgaaccagtcgtagccacagtctttcagagcctgggctctggggagtggaagtgaaaaataaagatgtggcttgttggattgtgatccccagcttgctttccttctgtcaactctgtcaggtttgtgttcatagcaactagactgaatatgcaaaaggcttagatccaagcaaatctataatctatgcatatttgcatgggcttggtaatatcatgtacacaaaacacatttgggtagaagtgcatgtgctaaatctccttttagtcccaccattttgtcttcttcatactgtacttcctcttttttgtttgagacaaggtcttgctctgtcacccaggctggaatgcagtggcacaattagagctcactgcagccttgaactcctgggctcaagtgattcttgtgccttggcctcctgaatatccagggctacaggcacgtactaccatgcctggctaatttttttgttttttaatagagtcagggtctcactgtgttgccctagctagtctcaaatgcccggcctccagcaattttcctgccttagcctcccaaagtcctgggattacaggcgtgagccactgggcccagccctgtacttcttgaaaaagccccaagtattagcttttgctcatctggctaggccacttaaatagttagaatccaccgtcccctaatgcagaaaccgtttaggtgaggtaaattaacaaacattttaagccgggcgcggacacttctcactgtggacatccctcacgcctgtaatcccagcactttgggaggccg

SEQ ID NO: 105495 - DNA, 2469 bp, Homo sapiens
aaagctggagggccctgccccacctgggaaggggtgtcttccctttggcctgtgcccttcccaggtccctaggctgtgaagaaagacccagactcagctgtcctcccagcacccctttactagagaccacagcagacagacccctggccaggcttctgccaggctgctcctgtcctttccctctgggcaggggccccgttctcaagccctgccctttgaccagctccatctgaagaagagagagagggaggaagcagctctttccccagccccagttttttcctgagacttagcaggggaagcagcgctggctccgtgacagctgctgcataggtctgcgccatgcttctccccaaaggagccactaggaggacctttgccatgccatgctggctggcctggccatgccaccctctaacctgtactaatccctcctccttcctcctctggtgacttctcccctcattcgtggtctgtcactcctattcaaccttctcagtttgtgtctcaccaggcccactaagcggggtgctgcttgatcccccaggctggtgagacacacaacgccagagcagtcatttgatttgttactttttttttgtctgcaaggtggtcatggtagcttcaaacttcctaggaacctatcccaaattaatggccatcattggttatgatgattgcgagctccccaacagctctgaggcctctcacgccaaagccttcatagtactccatccacagcccagcacagagtttctgaagagtgcctctgcagagctcaacaaggggccagggctggagagacgcgctccttatcttagcgacacaccccggcctggcatacttacaagcagcagtttctgcgctgctgatagtgcttctttttccctcccttcttggagggacttgtgaatgagtgcccaccaaaaaaaggagaaatttttttagtaacactttttatgagaaagatatattaggtagatagctttgttgctttaaaaaggaaacatttactccattcacctgtcgctgcggacatccctccccagaaaccacagcaatgcagtgcttgactgaaagtatgattgttcttgttttcagggaatagaacaattgaaaaaggaagagagaagatgggctaaaaaaacaaaatggatgaacatgaaagccgtttttggccaccccttctctctaggctgggccagcccctttgccacgccagaccaagggaaggcagacccgtaccagtatgtggtctgaaggaccccgaccggcatggccactcagacacaagtccacaccacagcactaccgtcccatccgttctcatgaatgtttaaatcgaaaaagcaaaacaactactcttaaaactttttttatgtctcaagtaaaatggctgagcattgcagagaaaaaaaaaagtccccacattttattttttaaaaaccatcctttcgatttcttttggtgaccgaagctgctctcttttccttttaaaatcacttctctggcctctggtttctctctgctgtctgtctggcatgactaatgtagagggcgctgtctcgcgctgtgcccattctactaactgagtgagacatgacgctgtgcgtggatggaatagtctggacacctggtgggggatgcatgggaaagccaggagggccctgacctcccactgcccaggaggcagtggcgggctccccgatgggacataaaacctcaccgaagatggatgcttaccccttgaggcctgagaagggcaggatcagaagggaccttggcacagcgacctcatcccccaagtggacacggtttgcctgctaactcgcaaagcaattgcctgccttgtactttatgggcttggggtgtgtagaatgattttgcgggggagtggggagaaagatgaaagaggtcttatttgtattctgaatcagcaattatattccctgtgattatttggaagagtgtgtaggaaagacgtttttccagttcaaaatgccttatacaatcaagaggaaaaaaaattacacaatttcaggcaagctacgttttcctttgtttcatctgcttcctctctcaccaccccatctccctctcttccccagcaagatgtcaattaagcagtgtgaattctgactgcaataggcaccagtgcccaacacatacagccccaccatcatccccttctcattttataaacctcaaagtggattcactttctgatagttaacccccataaatgtgcacgtacctgtgtcttatctatattttaacctgggagactgttgtcctggcatggagatgaccatgatgctggggttacctcacagtccccaccctttcaaagttgacatatggccatcccattggccagaatccacagacacacctaagcctgtggcactgggacagaatagattttccatttgagaggcacttcctgtgtcagtcttgtttgaaggaggt

SEQ ID NO: 105496 - DNA, 1057 bp, Homo sapiens
gccaccttgcttcagggccttcccctccctgctcacccccaccatctccacagcacctttgcctttctcttccatgcgctgggtttctgacttagactttgttcagacaaaagattctgcttaaaagcaaaccatacctctagtcaaatctcactgcttcacagtgcagtgggtggaggcctgaagatggcaggactggcctcaggtccccggggctggaggccaggacagtgaaagtgcctactctgggcccatgcctctttggtcgactccctggcctttggcactgttggcctcggtgctgcaaatgtccctgggagcgggggcagtgcattacctcacactgtggtcaaggctgagacccagtagttcagctgcccctgccaagcttaaaatcccaaagccaccaagtgatcctccacagctgcctgtgagctgatggggcacagaggggcagcacgtcatacaggaatgcccagaaaacctatggccatagcaggactggacaggcctctccacctgtgtacctgcattgtgctctctgaggagagcagggtcccctgtggtgtcgtcaggcgttcatgcctcacttcagaggccttcctgggcccttccatgtgtcaggcactgtgcttggcactgggggcagtgaacaaggaatgatttgtgttagggaagggaagccctggctggggcctggcctgttgaggaggcctccctgagggattgagagatagccagtgtgggccaggatgattctcaccgtagcctggaggccagagacctatggcacccaggaggaatgaaggcctgcaagcaggaggcagagtgggcgcctagtggggcagtgagcctgggcagcaggcagtgggtgacagtaccaatccctgtgtgctgcttctctttcagagtgcagctccttctctccacccaccacagtgattctccttatcctgctgtgctttgagggcctgctcttcctcattttcacatcagtgatgtttgggacccaggtgcactccatctgcacagatgagacggtaagcaggtggctctg

SEQ ID NO: 105497 - DNA, 2554 bp, Homo sapiens
cctggccaacatggtgaaaccccatctctactaaaaatacaaaaaattagctgggcgtggtggcgagcacctataatccaagctactcgggaggctgaagcaggaaaatcgcttgaacccaggaggcagaggttgcagcaagccgagattacaccacaccactgcactccagcctgggcgacagagcaagactctgtctaaaaaaaacaaaaaacaaaacaaaacaaaaaaacaaagaaaagaaaagaaatcaaagaattaatgtggcctaatggcatctcctcagaaaaatttttggtcaataaatattccttaatgttggcataattctgaacacagagtccacatgttgttggtatcaaagtgtcctgtccatgtgtgtgtgtggttgctgctttcaaataactatccccactgtagaatgttagagctgatagaacccccagcccaaccctgatacctttcatctttcctacagggggcagtgcccaaaggaaatgccactaaagaattcatcgagagtttacagttgaagcctgggcaggtggtgtacaagtgccccaaatgctgcagcatcaagcccgaccgagcccaccactgcaggtacactcactggggctcgcctcctctcttctcccactgtcctgcctccctccatccccgccaacacctgcctcctggagtagcacacacttccccaacaggggccaagtcagcatcgggattccaaatgtcccctgctctgggcagagagtgatcactgtgagtctccttcctggtccctgtgagccctctagattgcaaagagcatttggtttggcctcaggacacctgtcccgggacttggctctgccacacctgacataggacctgggcagggcctttgtttttatatatgtaaaatggaggggattcctgcttttcctacctcacagctttattacaagggtaccatgagaaaaagctttagaaaatcattctgtgaatgtctgggacttgaaatgaagcggttgtccttgaatgaagactttcttttaaaacttctaaaggttatgatagttgcagaattaaaccaaaaaagaaagccatttccccatcttatctgtggtcagttttctgttttgttttcaggtttctttattaagtttttctgatgagaagacatctagctaaaagttgtactttattggctgggcacagtgacttacacctgtaatcccagcactttgggaagccaaggcaggaggatcactggagcctaggagttcaagaccagcctgggcaacaaagcgagactctatctctacaaaaaaatttaaaaattaggccgggcgcagtggctcacgcctgtaatcccagcactttaggaggctgaggcgggcggatcacctgaggtcaggagttcgagaccagcctgaccaacatggagaaactctgtctttactaaagatacaaaattagccgggcgtggtggcacatgcctgtaatcccagctattcgggaggccgaagcagaatcgcttgaacccgggaggcagaggttgcggtgagccgagattgtgccattgcagtccagcctgggcaacaagagtgaaactccatctcaaaaaaaaaaaatttttttttaattagctgggtgtggtggcacacatctgcagccccagctgctcaggaggctgagggcagagcatcgcttgatcccaggagtccgaggctgcagtgagccaaggttgcaccactgcactccagcctgtgcaacaaagtgagaccctgtctctaaaaaaattttatttatttattttgagactgggtctcactctgtcatgcaagctcatagctcactgcggcttcagactcccaggctcaagcaatcctcctgcctcagcctccagagcagctgggactacaggcatgcaccaccacacacaaagggagacacagtctcactttgttgcccaggctggtctcgaactcctgggctcaagtgatcctcccacctcagcctcccaaagtgttgggattacaggtgtgagccacctcgactgacatacaaggaaactttacatgctgaattacagaaatacaaaaatatcacttggtccccttttcagagggtatgtgtttgggtggggaggggttatagaggactgaatctgctccaggtgttggacatcttccttgtcaggcttagcctgcggagacatttgggtgtgtgagagatctgaacggcgatttctgcctggccttgctgcctgtctttcagaggagagtggccagtctccagcactcagattccggagtcagctccccagtacctgtgtgctgtgcccacggcacctcagcctgccctgcctcagcgtcagtcatctattttcatcttcctactcacccctggaaatcgggattgctgcagggatggcctccctagataaagaaattaaggttcaaaggggttgagtgctccacggtcacacagcagtgagtactagagacaggtttgggtcccggcagttctggctccaggtccagacagggctctttccacaggaactcca

SEQ ID NO: 105498 - DNA, 1075 bp, Homo sapiens
ccactcgcaaatgtagagctcagatttaaagcaaggccaggggacttccaagccagctctaaccctttgtgctatgccactgactgatcttctctcttacttcttggacctatattcccagctaccttcctgggtgtccctcaggcacttcagactcagcataccctaactgaactgatcagctcttctcagaacttccttctgctctcttaatggttttgacgtgccaccacttaccagctgctaaaaatggaaaccctactggggctcatctcctccctttttgttaccctctccaccacccaataacaagttggttccctaccatcatttgtagattcagatctcagaatttcctctccacttctcccgctccatcctcgtaattcagtttttccttactggaccatcaacaataacctcctacgtggtgtctggaattttcatctctccctcttcttatatgatccacataacacaggcaactgagctctcttcctgaagcaccagtgttacctaatggctctaggctacctataaagaaaaatcccatcccaacctggtattcagcgcaccacatgggctggccccggcccatcggtccggcctccccgctgacactgcatacgcacagttcagcacactgatattctccctgtctcccagatatgccatgctcaccctcacctctttgtcattactcatgccctcctctgctggaatcccttttctcccacaggtctacctagccagcctctatacattcctcgagacaacccttgaacatcactacttaaaactcctctgattcccctgattaattggctgctggctcctctgtgctccctcaacacaaataccttccacagcatgtaacctcttttactagaatcgtttgtcagcctccaaaacactataagtcttggaagcagggacctcctgtgattcctgagtccatagcagtgagcatgagagcacagggctcagcaccaagcaggctcttggtgaaggttggttattaagaccctacttaggcctgtgcactgcctgttttccttctgtttggatgggtgca

SEQ ID NO: 105499 - DNA, 2093 bp, Homo sapiens
ttataaatcccaacaggaaaagctttctggcttcagagggaggaaagcagcccatttggggaccaactagctaccttttacttttctgtggaggagacacatggccagtgatgcaggcctggggttggttaccatgctcctgggagagctgttggagtttctacccagactggtgggtgtgcacgggctttgatcccatggccctgaaacaatttaagcaggttttcattcttgttgcttgaaatggatggaatgttgagtccttgaaattattggcatttctttagaacctgtctccactactttccattgtttctttttatattatcatattatcctagatacttattgaaacagccttagtatcctaggcctgtttcaatcttaatactagtgtgctgaggtagttggtggtggtagaatgatgttgtgacatcaggcaattaaaataaagttttttccaagtcacttaacagaaatacctggtaatgatatgtttgtcttctgatagtgacataggttctagacttggattgtctgggtcagaaccctacttctgccacttattagctgtgttaccttgggaagatgcttgacttccctgcctttgttacctcatgtttaaaatggggaataccacaatctctacctcataggtttgttgtcagaagtaactaacacatacagttttgtcacaaagcatttggaactatgcctggcctgtaagtgctcaataaatgtatcattattcagcttgagttattgaatacattcttcgtgccaggccctaagcagtttgctgagctacaagttgacagatgttgtcttgtcctccaggaatgtcttgtgatgtaggagagatggtgtgtaattaaatgacgtgttccatactatacatacaagctgtggtagcacaaaggctaagtaatgggttctgccttggatgtggcctggggccatgaggaagtagcagagaaggtgatccctgggtgcattttaatttgggtgctagaagcaaggaggtgcctggcaagttggagcgggtgagggtttggttggtgcttaaatggagcccctgagggtagaaaggaaaacttagaatgttgcctttgggaaactccaaatagaccacagggagggactgtttacggagggaggtggcactggattggtagtccagagctgagatatggtggcctcaagagccctgcccaggagcttggactctggtccatggtccctagggagccagtgaaggttttaggccaggggaataatgtgatcagatttccatttaagaaagtttactctggaaattagttgggagaaaggatagaagtgggttgcaggatttgagggagagactagaggcaggaagacctgggagatgctctaatagtctggggcagatgatgatgggctgaactaaggcatgatgatggcatggaggggagagcatgggattcaaggcacagtctgaggcagaattaacctggtggagtgaatgggatgtggggaagaggattagaggaattggtggtggttactggatttctaccccaggtgacagggtacatggatatgccatgggccaggaaagggagacttgagggaacagtttggggagaaagcagcaggttccgttttagctgtgcacagtgcctttgggacagccaaatagagagatctgcagattcaagaggtctgagttggagcttgtgattggagcattatcaccgagtgatggtggaagtagagttgaagattgttcaggagagagtgcagaatgagcagggaaggaaggagtcttggggtgaaaccctgaaccctgaggaacaccagtagcctggatgggcgggattccaagaggaggggagaggcacagccccacagacagggagaaggacagtgaggagaccccaaggaagacaagggctaagaattgacttttggatttggccacagtgagttgctcagtgacctggtgcgaacagttccctggtatggaggggacaggtgcatgaacagtaagggagaggtcagcagagacatcaggtgcacaaggcttcaagcagcttagctatgaaagggca

SEQ ID NO: 105500 - DNA, 1008 bp, Homo sapiens
catagagcttgaaaagaaaagggaagtgggaaatgactcacagatttgtaaacagcccccttggaagtgagacagccgtttgagaaatagggcaaaagggacaggtctctaaacagagggaggaggacaaatggacagaggagcagggcaggtgcctcacttgacaggcaggctggcctggaggcagcatgggtgtgggcaggagcacaagtcaggctcatgtttggtctcctgacgccttctccttgcccactctgaggttgtgtaatgtcattataggggctttctgtgttctggaaacactttagacgtttataagtctagaatggctccatgtgtcctgaggaggcagcctcttgaagacaaactggactcagaaacccttatcttactacccttctctctcttttcctcatttcttggtttcaccaccttttcttttccaaattcctcattctctgagctccctcaggaatcctgaggggcttctttatttctgagacaatgtctgtctcccagaagatgcttaaacgtgacagatgtagattgtttctttttgtcctggctgccaggaagctcaaagccaagtgttacacaatgacagtaattgtataaacccttatgatcagtatatttttgcccctccttttttggatcttatcgtttattaacttcataaattatttcaaatctgagacttgagaaaaggaggaatatacagtcatgtgtcacttgatggggataagttctgagaaatgtgttgttaggcaatttgaccattgtgcaaacatcatagactgtacttacacaaacctagatggtacagcctactgcacacctacgccgtattgaatagcctcttgttcctaggctacaaacccatgcaacgtgttactgtactgaatactgactgtgggcaactgtaacacgataatatttgtatatctaaacatagaaatggtacagtaaaaacatagtattataatcttgagggacttgtcattgact

SEQ ID NO: 105501 - DNA, 1049 bp, Homo sapiens
aggcatttaccctttagaggctccctttttattatctgtcatgtgaaggccctgtttcaagaaggctaaattgactctcagaatcagggaagagaactcatgttttaaatgaacaaggtgattaggtggctttgcacacaggggttgcagataagtaatcacaactcactatgggagcaattttgtcaaacctccttgatgacaagacaacaccaagtttctggattctttcctctctctttcagatgccagtatggacagaatagcttatgatgcttatccccacccaccacttccgaaacattgagcggaaaccagaatacctccagccagagaagtgtgtcccacccccctaccctggtcctgtgggaaccatgtggtttatccgtgacggctgtggcatcgcctgtgccatcgttacctggtttctggtcctctatgcggagttcgtggtcctctttgtcatgctgattccatctcgagactacgtgtatagcatcatcaacggaattgtgttcaacctgctggccttcttggccctggcctcccactgccgggccatgctgacggaccccgtgagtatgtctgggcttgttttgaccagcccacactctcctcctctggctctggcatggccacagcctgcatgttccccctggaccttgggaacttggaggataggagggccaggggagggtgaggaagtagatctctgccttgttcagagttctgtggaattctggccagggaagaggggtcaacacctgtaccacagcctatctgtcttggttaaatgatactataagtacatggatatatacattcattgggcctgctctgggaggggtttggtctgggggaaacctggcctctggttaaaaagacacagataaccttgaagactggggccagatgatcagagcagaaagcatgctggagggttgggtcaggattgggcttcccagtgaagacagtgctggagctaggtggacttgaaattaaagccacatccaattccaggaacctgcacggaaatggccttcactttg

SEQ ID NO: 105502 - DNA, 1073 bp, Homo sapiens
gtcatgggaaaacagagctcctctgtacactctttggtcccacgttgtttgaagatagaacattccggttacttgagtaagagtcagtccacttacctcatggtcctacttgacacactctccaccatgcagaatatggtcacagtcctgaaactaagcagacagtgcctctaagaagtgggcctgggatcacaaatctcatgcattcatttaatcaacacatgtattaagtggctactctgtgccagccactgggctaataagtcctcctctcaaggactatatggtgaagagcttagcagttgttccctgaaggcctattacccaaaatgactacccttttgcaaataaatctaacaagacttagtttatttgcttttctagcccacagccaattagcagtagtaaatagaggatatgtgggtatgactggtgaccgtagacacagaaatgagtaggcaggaatggaggaggaagacaaaggatcatatacagagatgccagaacggcaattataacagtctgagcaagccagttgatgtgaagccgagacccagtgaatttcagtagccctgaggacatcattacctaacacactccagtaggtgatgttcctggtaataactctaaataaatcattccagaagaaatggttgattattgtgcttaagggacaaacagctataatacccctcccctccccttccttccttccttccttccttccttccttccttccttccttccttctctctccctttctgttttaagatttccatcttaaccatccaaatgattaaagtgtgtttctacttggaaacaagtcacatttatctgggaagttacttacgtggaagggcttattcctcaacaaaaccatgcacatgaaacataactcttgtttagtcgaatcattgtcataaatacaatcaagaatgaggaattgtcattcttgattgtatgaatgcaaccactctgaatattctgtgaatataatttaatcactggaagtctctaaggagaattgctctaaaatttattttcagtgattatccatttatgaaaaccatacc

SEQ ID NO: 105503 - DNA, 1031 bp, Homo sapiens
acccagtccctggggctcatggagccccagactccacttcactaagtatatttgtgtctgtcagtgtgggttagtggaagagcacacttatgataaggtataatgaagcacgtgtgttatgtatggatctggaggcaattctctggaccacaggcagtttttgttgttgcttttagaatagcactaatttcaggcatttcttggttttggtttctagaactctatgaaggaatactagctgatttcctttgacttcccacacactgcccctcacagagctcagatcatcattttgacaccacatcttatcaggattgctggcactagggagctccagaacacctctgggcctgtggatccgtttcccctgtgacttccttacccccgcccctccccaggcttagttcctttgcctttctgggcttcagtgaactcttctatcaggtgaaaataataattactttgaacatggaatactaatatatggaggcgctaactctttttaatgctataaaacccttagccaaaaaacttcaatatagattactataattcaagttacaaaatgatcattgttctagatcttccttggaaaactattagccacttagaggaacagaaaacctaataccaccaaaatgagactcaggcctgttgcccttgtgcctccctggacttgtcggcctctggacgcagacctctcatctgtcttgcctgtcacttctagagtggtcttgccacagcatgagtactattcctgcacaactttcctcagaaactttatggctcaccagtacctttcaggatgaaatcccatctcattatgaagtttagaggctttctaaaacacaactttctcctacctataaagcctcatctcgaatcacctcctctctttcctacaaagcctgcatctgtccacagacacgcacacagccctggtcatcctgcccctcctcttccccactagtaccaccaattttcctgccaggcccacccggccccccttgcctttttgtaagcagtatgct

SEQ ID NO: 105504 - DNA, 1163 bp, Homo sapiens
aaggtgctgggggaaggatgggctgcacaggaccttccacctgatttgtgatgtttattttctgtcattgaaaagttaaacgggtgaaagacctgaagcaagtatggcagagggtgatcattggtactgtgtggtgctgcagtgttttgcttttttctgtttaatttctcaaaaaagtcagtcacatatgcagttagccaggcagtttaaagataaactgtcagtcacatactttagagcagtgttttattttattttttatgtttctgggaagcatcaactccttggagaatctgattaagctaatgattctttttctgaaaaaaactgcttttgaaaaatgtttacaaagaatgagaaggagctccatgagccaacgtggaatgatttcctgcatatatatagttaagtgttaaaaaaaaaaaaaaaagtaagagtatctatagtattccacccttcatataagaaacaaggagatattaaaaaattcatgtatttgcttatttgtgcagagaaaatacaagaaagataaacctgaaactgaagagaaacctagggtgaatgggaagaaaggggcatgaaaatagcataatacggaggagagtgacatttctctgagcatacttttctgagttttctctcagaactatagtgatagctcacaaactcagaaagtaaataagtaattaaaagtaaccatgatgtgggggaacccaaaatggaaaacaaaaatttacaaatgaaaattagccaggcatggtgatgtgcctgtaattccagctacttcagaggctgaggcgggagaagcgcttgaacgcaggtggcggaggttgcagtgagctgtgccacactgcactccagcctgggcgacagagccatagtctaaaaaaaaagttacaagttacaaatgagcctgtgttacaagtgagtaatgtaaccacactgaagggcacgtagaagaaaagaactgaagtaactggaaaacagtattttgcctggatactctgaggctaaagacagaactttacacaaatactgtgtgctattagtaaatttgtttctcacaggggtatgggttagaagttcagaaactgtgtatactaagattgaacaaatacagaaatacatgttagataataagagccagctttctccttctttga

SEQ ID NO: 105505 - DNA, 1141 bp, Homo sapiens
tttggaacactttgagcagcaaaataactaatgatagtagtggattataaccatagcataaaagataccaatgagttgtactgatacaagtaattgaaggagtaaataaatgggcagaaggaacaggcagcgcgtagaccaccctgaaaaccatcttctgccaaaagagtcagcaaacttcctgtaaaggactggatagtaaagatttggggccttatgggtcatatctctggcccaaccactcagctctgcttttgtagtgcagaaacaatcatagacattacctaaacaagtgggcatggctatgttccagtaaaacttatttacaaaaacaagggaccttagtttgttgaccctgttctagagactgcctctttagaagattaggtgtctttcactatttacacagtagatcttgttgagttttaggggtaggagggcttcagttgagatgattgtactctgtagctctgacaacatatacttcttggtgcaatttaagaattgcagatttagagagaggtggcttattttgtctcttgttcagatcttgtttttgtgtgcatattctatatagtggtatgtagtatagattttgcaatcagacacaactggcatggaaaactagctttgttttcactagctgtaggaccttggacaagtcgctcaacttctctgagtctccatttcctcatatgtaaaatagtaatgttgttgttagctacaaggacagaattttagatgatccactaagaggaaaagagatattctgcatatatcttctctagggggaaaatgggtgagtccgtttaggagttattgttgatctggggtgactataggactgtggttgttaacacctaggaagacctccgtgtggatggccgtggctgtgaggactaccgatgtgtcgaagtggaaactgatgtggtgtccaacactagtgggtccgccagggtcaagctggtgagtactgtgaccatggttcaagcccaggtggagaaatgagtaggccctaaggaatgagctgctgacgctgtctggcttttggaatgcaaattgctcttggggaaatcgaagatccgagccaaactcagggagggggggtctatccagatctgaaaagactgctcacctcctc

SEQ ID NO: 105506 - DNA, 1035 bp, Homo sapiens
tggcacactttaccttctttaagtggctcagctaatgtaatcagccgggcaagtagaatcaccatgagagagtcacaaaaccccatttcctacagagatgggagaggttaccaagcactgatcgctgccacctgtatcagaacctcaattgagtcttcaaggagcataattattttaattgcataaacaagtgtgtccttttattctgaatcagtgaataggaatggcttctggacacccgtggatgtgcccagcaataagggtgccacacacccactcccacctggactccaggcatagggcctctgctggagagctcaaggcatttgcctatccacaggctgaaacatagttgctgcccagtggaaggaaataaattggtggtgatggtggtggtgatggtggtgagggtttcttctgctgctctgagtctagtttgatttaacttcttgttagcaacttccagttttaattaaattgccaggggtagagaggtctcagaaaactaattgattttctgccaacccatttcacttggttttgtctacttgggatgataatacatggagccaagatagacactgtcgccacctccataatttaccctgtttcttgggaatgacgaaaaatctttgatatagccctcacagccctttggaaagactgctgcactgaccctgagccctgttccagagatgcctggcagcactgtcactaaactgggagcaaaatctgaccttttcatgtctttggtttgctggttgtagctgagagtaggctattttaaatgagaatttggaaactttaggaaaaggtggtttctatctaaagcccaaaggaagggaagattttagtgagctggtgtgtcaccctgcgctgccactaggcggcgagccatcaagttgcttctcagttctccgaccattgtgttgatgggtttaggactgtggtttaacctcttagagaggcttgggtttttaactaggggagtttaggagaacatttttcattcataaatgtttcagaatactccgc

SEQ ID NO: 105507 - DNA, 1021 bp, Homo sapiens
ctagatcactttttctgctgtgggcctggcctgacctggacgtaagacttcatagatttgtaggctagattgattgccaggcaagcaacagtgggcccagtgtctagagtccctttccaggtaggcatggccttgatctcagcctaccccagttaaaccagagatgttccaagcaggagggtagaggtgatgagtcagaaggggtggagagctgggaggggtagcattcccaggatcttaattagtttatccagctcagtaaacaatttcccacaactctggaagagggactggtcatgctttatgaagggtcagaattggttttggtaaatgcagaaagcatttggttttatgcccaaaagaccaagtgtgtacaccccccactgaaggagtagattgtgatgcatatgagcaggcagctacaattaccagcctgtgttttctttctctctctaacagagcagagcagctttttatttagggcttccttggtcaacattccttgactccaacatttgttgtctagtgataagttccaagaccaaagcatacattcatttccctgaggcaaaaggtaaaaccaaggaaagtgaacctgactaatgttagactataaaccaagcttgccaaattacagattcaaggagagtacagggaagcatagaagataagggccaggctgcctgggttagaattttagcttaccaggcacagtcatcatgtggccttggacaaattacataacctctctgtgactcagttttcttgtttctagaatggaatccatacctcctagggttgttgtgaacattaaatgagttaatacacctaaagtactaagagtggtgtctagctcatgctaaacattaaaaaaaaaaaaaaaaagataaggtctcccttcttgtaaaatgagagagttagaccatctggggtttcacagtgtcatcccacaggtcagatcccacctgggagatttttgtttcatgtagggattttttttttttttaaggtggaccttaaa

SEQ ID NO: 105508 - DNA, 1036 bp, Homo sapiens
gcagtggtgcgatctcagctcactgcaacctctgcctcaggttcaagtgattcttgtgcctcagcctcctaagtagctgggattacaggcatgtgccaccacgcccagataatttttgtattattagtagagacggggtttctacatgttggtcaggctggtctcgaacccccgacctcaggtgatccacccgccttggcctccgaaagtgctgggattgcaggcgtgagccaccacgcctggccaggggcatgcatggttttataggtagattaatttagacagttggacctgggaagctctataaatcatctcccaaggctgtagaagagttagtgcattaatcccaaagaaattagtcacacccaggaggatgtgcccactacattcagggaaaggtaaacattttgagtgtaagcatctctggctggatttgtgtacacagaaatctctgtagatgtatttttaagcacttaagacctgggacttaatattgattgcttagtgtttaaattagaaacaggttgtgttttgctggctgtgcaaagtaaaaacctggtccctgttgacttgattatttcaccataaatgagctgcttttcttggctcagtgcctgagtccagcaaaggcagggaacagcgaggttgctatggcagtaatgaagtctctcttggggactttaaaggggattctgctggctcacagtggtaaaggaggagtacataattagagaggcaaaattttatgtaacaacatagtctgattaatttgggattcattcttccacctatattactaagtgagatttcttttagtgttacacaaatagggtgggcactgccatgggcgttcacacaggttttgctttgcctggaatcttcctgcctctctggcctgaccagctctgctcatcccaggtttgaggtcgcctttaaacctgaatgctaattgacactcctgtgcccctactcccgcttctacctcactgtttgctccctatggtgaaactcccctacctcactggaactgctggct

SEQ ID NO: 105509 - DNA, 1048 bp, Homo sapiens
gtagtattttatctccccagattatatttttagtttttaaatgatgtcttctgatatacagaagttcatgatgttataattgaatatgtaacttttttctctttctgtatcctgttcaagaaatagttgtctactccaaggtcatgcagatgtttttttctaaatgctttattgtcttgtcttttattttttatatctatggtctatttggtatggcttcgtgtgtgtggtgtgaggtagggattgagattcttttttttccattgggatatctgattgacccagcatcattttctaaaagatgcctttcctcattgcactgcggcgcctcctgtgtgcttttgacagggatgacagggatgaggatgataaagaataggcatagcgtgtctttctcttgtgagacacagggattccaactcctattctcaatcttaaaaagaagttatttttcctcctccaagtgggaattttactagtgcttctgcttccaggataccaagggttcgagttttggaggatgaagaggggtcgaaggacattgaattgtcagatgacccttatgactgcatacgactaagtgtggagaatgtcccctgcattgtcactctgtgcaaggtataacttgtattttatggtttttgtcttccctgtgggtgtgggtctcctctaatcccaacctgctgaggttacttaataagttaagaagttgtaataccacacaccatatagaagtagcttttacccaaatccaataatttggttatactagaaaccactaccacgagtagctctttcttttctttttaattggaagatatgatgtggtcctgggagccatgagtgtgtttgtagtaatagtagccagagtttgttaagctccttccacataccatgtgcttcactaaagcaccatgtcttttaattacctcaactctatggggtctagggtggttgagtagtggcagggtggcgaacactgtcccccctatgaaatgggaggttggagcaggtcttgggtatcatgagtggttttcacatagagggc

SEQ ID NO: 105510 - DNA, 1027 bp, Homo sapiens
tcaagcattccattttcctcagcttcccaaagtgctgggaggcatgagccgctgcgcccagcctttggcttgttcttgagtgtgtcccttagcatggaccctcttgattcccccttgccatcagtgaaacgtccatgtggccttgtgtgtgaatttctcccttgtgcccctctgttggaaagccttggtggcctttgtcttggttggtctctgaattctagttttaaaccaccttgccctgtttttccatatcgtgtttttattgtaccacccacacagtggcctgtgagaattgttgaacaatccctcagctgttttcctcgtgagcagaatctaaaataagacctggaatgaccagtgcaaatacttttgcctggtgtagagattcccaccacgaggccatcaggggtgggactctggggcctgcgtgacccaccgtgtgccacgcaccctgcctttgcagattggctatcggcatgtggtggatgctactcttcaggaggaggcctgctcgctggccagcttgctggtgtcggtgaccagcaagggagttgtgacgtgcatgaggaaagtggggaagggcagcctggacccagagagcatcttcgagatgatggaggtgaggccttagttctgaggaaggtgcagggacctggccggggtgcctgctgcttcctgctcccttggtcataccgtggggattctccccattcacagccttgaccccaaacttggagatttgggaacagctggtttgagccaggggtctgctgacctaatcaaggggggttgtgggggtggatactctggactgggaggtaaggagcctaccagtaaccattaattgtcctcagtaagtaccccccatctcatttctatgtgtctaaataagactgttggactttcataatgtaaagagccactcgtaactccaaaagtgcaggcctttgtgacttgatgagggaatagaattcttggctcactgcttcctgtccctagaagtgggtgagtaaaggtggaagcacgg

SEQ ID NO: 105511 - DNA, 2702 bp, Homo sapiens
agtaaacaaatagctggagtttattgtgtgcgtactatgtgccagatactgttttcactgctttaaatatatcatttagtcctcaacaacctgtgaggtaactattattattgtcctcatttttacagatgaggaaactgaggcacacagaggataagcagcttgcctacaggcctccctgctcataaatactggagctaggatttaagccaagactgtgtgcgtccagagcccctgctcccagccactgtgcaatgtcagccttataaaccagatctgccctggctgtcatagatggcagaaccagagctctgttcagtgagctgagctttgtcctcccctcaggtttggggagtgaggtctgctaactctggacaggggactatagctctgtggccctgtcttactgtttatctcacacagggatgcagcaatctggaaaatgacttggtggagctgagagccttgggggtagttgtgcaggctgccacccctagcctctgcagttgctttcctgcatctggattcagaggcgtcaaggccctctcaagtcctggcatcctgtccatctcatctcctcttgttgtcctctctccccaccctcatgtatatgaataatcagtacccctgtttgacagattcagacttttttttctttttctaatgttatgggaaaatctttccaaaggccctttttttttttgagatggagtctcacactatcgcccaggctggagtgcagtggtgcgatctcagctcactgcaacctccgcctccctggttcaagtgattctgcctcagcttcccgagtagctgggattgcaggtgcccgccaccactcccagttaatttttttgtatttttagtagagacggggtttcagtatgtttgccaggctggtcttgaactcctgaccttgtgatctgcctgcctcagcctcccaaagtgttgagattacaggcatcagccaccacatccagcccccgaaggcctttttgacctttaaccctgactttgcatttcatagaggtgatcacttcccagccttttagatcgaaatcatcttttcataagagttttagtcatacttgggatctcatcccatgttacagttaggggccaggggagaagacacacaagtcattactctggggaggatacacctgtaactgaagagattgaggcagggatttaggcatggatgtttttatctcaacattgttgagaatggaaccagtggcagagttgaatccacactgctatgggaatgtgaaagacctgataaggtagagatttgtggttggttctttgtattcttaaaatgattcttgggcccagagacagaataacagtttcataaagaaaaatatatttttttatattggggtggtggttgttttttgagacagggtcttgctctgttatccaggctggagtacagtggcacagtcacagctcactgcagccgtgaactcctgggctcaaacaatcctcccatctcagccccctgagtagctgggtctacaggcgcataccaccatgcacagctaatttttagttttttgtagagatggggtttcactctgttgcccagtctggtcttgatctcctggcctcaagcaaaatcctcttgccttggcctccaaaagtgctgggattacaagcatgagccactactcccagccatattgagtttttttgttttgttttgtttttgtttttgttttttttacctctcgtgtctgctctgtagggactgattattaattttgtgggttgtccctcttgatgtgtttcgattctaacatttcactgcctttagcatctcagcatggcagtaaacaccaaagatcccatccaggtactgactttggtcacacctgagcagttctgcttagaggcttcatgggaggtgaatgagaagctgcttactaaaatgtccttggcatcatctgtttcttctccagacagactctggattccctgtggtctccctatagtacagtgtcacctggctgtacccaagcccagatttgattgacaactttgttgcttgttgcagtggcagcaggatagtgaagcatgagctaatggccagggcaggctttgctgctctctgtttgttgcctggtgggggctggtgtttgtctctcttttttatttttttgatatgacgatttttacaaaatttattatgttgttggggtctgtggtttttgttttaatttgctttaattaaataaaagtcctctaaggcagatggaatgtgtacaatgtcagaaagactagctggcagaaaggaatgcttttctggtcagagtgtgtgtgccttacaagggggtgtgtgctctctcccgtcccttctccacagactggcaagcgtgtgggcaaggtactgcatgcctccttgcagagtgttgtgcacaaggaagaaagcctggggcccaagagacagaaagttggattcctgggatgatttgcacatcaactgctcaactgtggattgttttttacttttccttttaaaccggttcgtatatatttttcttcgctgttacgaatttacagcagcatttgtacatgtaaaattaaaggctattttctggtctggtttggtatgtctagagttcttcagttgaagccaaggcaccattcagtgacccatctgggtctggcccttatctagtgagtggcagacaaat

SEQ ID NO: 105512 - DNA, 1033 bp, Homo sapiens
gacaaagaatggggcaaatctggctgctgataaaaaaatcatcttcaagattcagtttacaaagtgaaaaaagaaacattcaaaagagaatgagtatgatgctgacatttgctttgaaaaagggatttatataataatacatttttacttgtatgtgcataagttctttctggaaggatccacaagagtgagtaacagtgattacctctgggaagaaaaaccaggggctgggcgcagtctcaactgggaaagaaaccagctttttgaactgtttggattttaaaaaattatgtgtgtatattaccttccacaaaatgttcatttaaaaagagaagacaataccgtgcatagttacgtctatgagcattagccaaaatcgccaccaagggagagcctttgtaaaagatgcagctccaaaggcaaatcatagaatttttgaatgtggaaaaccatcgccagcttctcaagtttaccaaagattcagtattaatataattatgtaaatctttttaaactcatgttaaaaaaaaaagggtcagagcacgtgatgccttggttctctccagctgtcacacttgaaccctggccctatgtggtctccatagaaggggcccctggagttccagggctacaggccaacagaacagccacccaggccctgcctctcgctgaaacccatggcagtctcccgcccaccaacatggcaggcacttatagagctctttctccacgtaggcaccagtctatatgctggacacacagcagagaaacaccgtctctgctcttaagacatgaaccatggtggttctcactcaggcatcaacatcatctgggagatacattagaatccaggtgccttggccaggcgtggtggctcaagcctgtaatctcagcactttaggaggccaaggtgggaggatcgcttgaggccaggagttcaagacaagtctggccaacatggtgaaaccctgtctctactaaaaatacaaaaattagctgagtgtgatggtgtacacgtgtagtcccagctact

SEQ ID NO: 105513 - DNA, 1049 bp, Homo sapiens
tgcgatgaggatgacagtcaagtctgtgagcagagacataaagagacagatgaagaggcagctggggtgagctctgcaatgaacttgaggcatctccaaaagcagctgccatctctccaaaggtggagcgccatacatgtggctccttgtgtgcacatggggctcctcatatcacaaagtgtttatttcctttcctcttggatctgggtcagccaatataaggcaactgtgccagttctgggcctaacttttaagaggatgtcagcttgcactttctctctgagagaaagccagctactatgtaagaagtctgactatgctgagaccaccatgctgtgagaaagcccaagctagccatgtagagattccaccggggaaaaaaatcaacccagtgagaaccaaaggccatagacatatgtctccagttgaattctccaagccatcctctctacttgttcaaggcttctggttggggccccagatatcctggagcacagataagatacactgctgtgccctgtctgaattcctgatccataaatcgtgggtaaacaaaatagctattgccaaagccaccaaattttggggtagtttgtatatagcaatgaacaattgaaacaaactgagggacctaccagatcaacttcaaaggctactcctggcctacaacaggtgtgttccactgattgccacagcctgtcttggagaagagaagagcagaggagggtaggagaaagcagggagtcaaaagtcagaagtgaggcagctaaagggagggttgtttcctttgtgctgtccttttcctgcagctgcacaaaggaaaaagaaaataaatcagagggggaaccctgtaccaaacagcgaattagaatgtcttgcttattcaccaagaaaacaaaaggtgagatccaaaggaaagaggaatggaaagaaatgacagaaaatgaatctaagagaggaagaaaacccaggatataatctatgagtgtggagaggttttcacttgtggcatttggctcccaccagttctcttgaggctaaccagttgt

SEQ ID NO: 105514 - DNA, 1061 bp, Homo sapiens
aaacgaactaagacactttgattatttgagtcaggtccaagaagaacatttagatattcaataggcagacaacctgggccaaaattataggctatcatagtctgtataaccaggtctctagtgggagacagtaagattatttttgacttttgttacctacacattgtgctttggttactgtcccagtgcagtcgactttggggacgtgtaaggatatctgtggaagaaattcctagaagtgaagctgctcagtgaaaagccgtatgaagttattctaaaagacactagaacaagtttttaaaaaatgttctgtgagcaagtgcctgcacacacatgaatttcctggtagccaaggaactgactggaccagttttataacaacttaattgtcatgctcagttacatttgagatgggaatgagaacaccccagtggtctcctggggattgcagctatcttcatgaccgggtgttattagccaagactgggctgcagtttgccagtctgtgaaactagagctagatctccatggagggaaacctggcagggccctggcctttaatccctgctgagagatggaggattactctggaactggcttggaagtttctgacagtcttatcaggtacttcagccttgggctacatctgtcagagctaagtccttatcttcacggaacatagaagactttttttttttttttctgttgcccaggctggagtgcagtggcatgatctcgactcactgcagcctctgcctcccaggttccggcaattctgctacctcagcctcccatgtacctgggattacaggcacgtgccaccatgcctggctaattttttttttttttttttgtatttttaatagagatggggtttcaccatgttggccaggctggtcttgaactcctgatctcaggtgatctgcccaccttggcctcccaaagtgctgggattacaggtatgaaccactgcacccagcctagcagacatttttcaagttgtaaacaatgcttggatcatcttgcagaagcccaccacaacccgaatggtgccaaaccct

SEQ ID NO: 105515 - DNA, 1027 bp, Homo sapiens
agggaaatgaatgactcccttctcaaggcatcactgtgggctctgacggctccagcattcagcagcccgtcagctctgcgtcccagcgcctcttccgtgaaagggaagcccctgtgactgcatgatgcacaagaaggaaggcggtcttgggaccacggcctagagggcggccagggcactccctcctgcctgtgcagggcccttcctattctcaaaaaccttcaccttaagctccaactgagattgaggtcagggttgattctaaagaggggtggagtagtgggaattgattctttggaaggttgtggaagaagagaagagtcttcttatcttagaagaagattctgagcatctaaggacggaactggaggagcccgagctaaggaagtaaagggccaagttgatcataaatataagacatgagccacacctttcacatcgtcttattctcacagccgtctaataaaatggctgctcctcgctgtcaataagaggcagtccatcagggctttggtggaggggtacttggagtggccaagaacaaggcctgggaagtaagggaaaggaatagggctgaaccctaggaagttgtgtaatgaatcatagccatgaatactgactatatgttgattcttatgagtccccttatggaattagaacctgagtggggtcttagggactcctaacttcaaaggatatgaactattcttaaaaaggtcctaacacaggttatcagattgccccccaccccccaaaaaaaggtggaatcagtttacattcccaccagcagttgtttaaaaaatgcatatttcttttcatttgccaatctggaaactaaactttcattgttttaatttgcatttatttgattagttgtaaagttgatctttttcatattaactatatgtcctctttattaaccatttatatgtcatctttgctgttttcctttgcccatttttatttttatttttatttatttattttttttgagacggagtcttgccccgtcgcccaggctggagtg

SEQ ID NO: 105516 - DNA, 1028 bp, Homo sapiens
gtccttgaatagaatggtatcgaagtaactaattttgtgttggtaatctctgcttgagaaaaattatcttttctaaggaatctctggttccttgggagaggtgactgaaattgtttctttttcctagaggagatatctgttctctccagattactgacattatttctgcctaaagtgtaactcacttatagaaatgaacagggaagttcagagtcatgtttatttggtcagggttatctcttgctagcatgaaacagcagcacttaaagatggtacatctggcaggatttgagcccagcctctatgttgaactaacctggaaagtaggatggaagaggtagggtgagggatgggagcaggtagtgggagcagtgattctcaaacttgagcacacatcagagtcccctggtggccttgttaaatcacagcctggcccccacccccaccccagggatactgatttagtagtcccaggtgagaccccaaaatttacacttctaacgagtttccagatactgctgctaatgctgctggtccagggaacacattttgagaatcaagggcttagaaccttgccacttaatgtctggtccctggaccagcagtactggcatcacgtgtcttagatcccaccctagtctaataagatccctatatgatttgtatgcacattagaagtttgagaatactggcttagagcactcttaaacttaactgcacattggaaacacctgagagttttaaaataatactgatgcctgggtctcactccagatactccgatttgatggttattggtggtgaggggggcatggatcagacatcaatagtgttcagagctccctagttgattctgatgtgcagcagagtctgggaactactgacttaacatagtgatgccacacctggccatggctctgaatcacctgggaggtgcttacaggtcccatcttggctgatcttgattcagtgagacctgaagatccaagtttttcaggtttgtgactatctggctatatttatatcta

SEQ ID NO: 105517 - DNA, 1050 bp, Homo sapiens
tatatatatttttgtttgtttgtttgtttgtttgtttgtctgttttgtttttgagacagagtctcaccctgttgcccaggctggagtgcaatggcacgatcttggctcactgcaacctctgcctcccgggttcaagtggttctcctgcctcagcctcctgagtagttgggattacaggtgcccaccactacaactggctaatttttgtatttttagtagagatggggtttcgccatgttgggcaggctggtctcgaactcctgacctcaggtgagccacctgcctcggcctcccaaactgctgggatgacaggcatgagccaccgcgcccggccttctcttatattttaaaaaaatcattgttattccctgatacggttcatttcagggcatatgcatattacaataggcctgtttaatttacacaattgtggcaaagcaggtttttaaaaatgcctccatctcttttttacagcccttttaacacagcagtggccgattactggatgcctgtggatttgtacattggagggaaagaacatgccgtcatgcacttgttctatgcaagattctttagtcatttttgccatgatcaaaaaatggttaaacataggtaagcacttatactgctttgcaaaataattgagttccatgaatagcaactttaagcaggtgtcagttcttctgaagcaaggtaaatgcatgtagtagaatactagttttctagtatgctttagaggttgtcaaccttaatcatttgaggtccatttatattgcgtagtcagttctggcatgtgatgttgcatgcttgcatagaacctagccttcagtgcttctctgtttaactgagttaagtaattaagaattgtacctgtgaggcagagaggagtggcccatagtgttttatagcatctcatgtgaggtcatgcttatcacccagtccttccatgtcagctcttgttcctaagcttggctgaatcccaccttgatgcatccctctaaaaaatgtatagagtggatttgaaatagagaatcacattgtaaaaacatc

SEQ ID NO: 105518 - DNA, 1696 bp, Homo sapiens
aacaagctcagcggtgattccagtgcacactctacgaggaccatgctttgagagtggtttccttggagacagactggcttctgagctactcctaggcctgctatagtccaaagaggccagttccctctttcttgatgtaccctgcaaggttttttctagaacagtgtcattctccctcaccaatccagaaagccccgggaggggtctgggcctgttgttacctatggcctcttagtcacccacagcacccttcatctccccacttaggggagatttgtctctccagagttgtttagtactaaaatgacatgaagtaaaataatcttgagtatctggctattctagaataaacccgtccaacagtcattcatttttacttcatgtgatcagccctaagtgttgttgtgggaagaggaagtcagatgcctggaaacttgagccttgtgtgaagtatccatgtcatttgagaaatcactgtttattttgatttccaactagctgtggctagtgggaagtgtggtctggaacagtggtcacagatgccagtcctagaactagctgcctcagaatcactggggggcttgcaaagcacagacaggtggaggttctggctcccacccctaacccaggggacaggctccaggaatctttctaagaagcctcccagaaggttctgctgtgcattcaggcttgagaatgcctagcctagtggccagacagtacaaggacctggactgaccctaatttggctactggtataacccagggccaccaggtaaagccattcagctttaccagaagatcagaccagcagctggattggatgagcttgtgtaaaatatggaaaacacacatacctgcaaggacagggattgtgccaatgcacttcacactctacagcagtgtggctgcaagcacagtcatgctatccacaaggtaagagcttgcaccagcaggagtcagcactgtctccaaagcaccatgttaactccatggcatttttgtcccagcaagcttgcttaatcaaggcggcggggcaccagggctcatcttgaccaagcttctgagctcatgaccgttggtgggtggcactttgagtggccctgccatccagtgctctgaatctgggcactaaaatgagatagaattggtcctggtctgaattctcagacactgaaggccagggaggatccttcagcctgccctcagaggaatccatcagggtgcagtgaagtgtcacatcaattcacaggtgtttttctctgcttagttataccaagtcaatcacccttatgttgcacgctctctctttctcatttactgatgctgaattcagctgatgctctccctggggtgctgagatggcaacaacgactgtggaccttgacaactcggtttattgaggccagggcttctgggaagtctccccagcctcagctgctgagtaacaaggagaaagctgaggccaggaagctctgggagtacaagaactccgtcatctctcaggtcagaaactctccaattccaggggttaactctgtaaccaagcactctttgggaacctttgcctgtggtctttgctgccctccctgccttgggttgggccactgtgggtcttccttcctggcaatggcggtccttcttgctttgattgattggccctactgttttgggtactttaccaaggtggatcaac

SEQ ID NO: 105519 - DNA, 1505 bp, Homo sapiens
ccctcggtgttctccagccaggcctgggggcaggaggcccagccacgctgccgggtgcaggcctgcccctgggcgcccgcccgcgcgccgtccccgcccctcggccgccccctccgccccggcgcgggctcgggacgtgcagagccggcgagcgagcagcagggactgcgcctggcgcactcacttccgcgtcccgccgccctccggcccgcgcgcgccgatccgccgccgccatcggacaatgggccgccagccccagctgccgtgaacttcctgccgctgctcggccgcccgtgcgtcccggacggcgttcctgccaggcgccggccgggatcgcagctccggggaagcagcggaggacccagcgcctggaacgtacctgcgcctcagccgccgcgcgtttgctccggcccgactcgcggcctcggcgccctcccggccgattcagcttcacccggcccagtcggctgctgccttgctgtgagtttccgtgtttggttgcctaaggaggatgtgattttacttttttgctgttttctttttccttttataatttgaagaggagaaaagaactccgctgagcaggcccgggacggcgaagtgccaccagctaccccaacaaggacgtctccaggggaaagggagttggaagcaaacttggtccagctggcgttgaggtctcaacttcggctggactcttaaatcctggggtcatgcccttcacgctaggcaggtggaagtctttacttgtactgggccggacttgagccccgacccttcgccagcatctccccgctgccctcaacacacacacacacacacacacacacacacacacacacacacacacacacacacacacacacacacggcacctgggctaggcccggacacctgtctgcagcatggataagtatgacgacctgggcctggaggccagtaaattcatcgaggacctgaacatgtatgaggcctctaaggatgggctcttccgagtggacaagggtgcaggcaacaaccccgagtttgaggaaactcgcagggtgttcgccaccaagatggccaaaatccacctccagcagcagcagcagcagctcctgcaggaggagactctgcccagggggagtagaggccctgtcaatggagggggccgcctgggcccacaggcccgttgggaagttgtgggcagcaagctgactgtggatggtgctgccaagcctcctcttgctgcctcgacaggggcacctggggcagtcaccaccctcgctgctgggcagcccccgtacccaccgcaggagcagagatccaggccatacctgcatggcacgaggcatggcagccaggactgtggttccagggagagcctggcgacttctgagatgtctgctttccaccagccaggcccctgtgaggatccttcctgcctcactcatggagactattatgacaacctctccttggcaagcccaaagtggggtgacaaaccaggagtgtcccccagcatc

SEQ ID NO: 105520 - DNA, 1049 bp, Homo sapiens
ctgcctcagcctcccaaagtgctgggattacaggtgtgagccactgtgcccggcctactggtttattttttaaagcacatggcaccatcttactgtgaactatcttttctcctcagcacattcccacatttgggagtaatagttagctggaaatactgtgggtcttttaatttaaacttttgtttagttgtaaatttcaagctcattggacaacacaaacagcagttttatcttgagatgcaagtttatgctgtgcatcagagcaacggtattagctgacgctactcatccattcagcatatattaaaatttattgagcacctatcttgaggccatgctctattccaggtcttggggatacatagtgaacaggacagacaggaacctctgcctccctggagcagacaatgtagtagaaggaggcagggagtgaatgaagtaaataagcaagtactagggagagaatcaaggtagagaaagggaatggagccctggggctgggggtggcagagagatttccagttttaaattgggtgatcagggaatgtcccacctagaagatgcatttgagcaaaggcaggcaggagactggaccatgtgttttcccagggaaatggtgttcttggcagagcagacagcaagcacagagtccctgtaggcctggtctgtgctgggcactgtactgaacacttgatgctgactattgaattgactggtcacagcatccttggaagctggttctgccattatgcccattttactgatgagaaaacggaagctcagggagattaaattacttactggcggtgtcacaggtcatattgggtactgctgggacttgaacctgacagttcagttcagcctcagggcccatgtgtctaaccagcattgccaaacagtctcccaagcagagatttggaagcctattttatttatttatttttatggtttttttttaattgagatgaaattcacataatgtaaaattaaccattttgaagtgaacaattcagtggtgtttaatattaatacattcacaacgttgtaca

SEQ ID NO: 105521 - DNA, 1048 bp, Homo sapiens
cccgggtagctgggactgcaggcgcccgccaccacgcccagctaattttttatatatatgtttttagtagagatggggtttcactgtgttagccaggatggtctcgatctcctgaccttgtgatccaccctccttggcctcccaaagtgctgggattataggcgtgagccactgcgcccggcctgggctgtggacttttgtgtcccctggacctgaagcccctgtgctcaccctccctgctgtgggtgggcctggggatctgtcacggctaaagctaaccaggagagagccacattctgctcgctgttaggaccagaggggtgggaaaggcaagaataagcaggttccagggtctcctgtacccaggaagtggatggacaggcctgctcctcaccagcatggagaaaggaagggttggcattgtgtttggtttttctgtctttggtggatgtcctttcagcagtatcctaacccagaaaactgcagtgacagaccccccttagcctgggatcctgaaagcaggtgtgactcctcctgagaatggccctgccctgaccggggccagggagcctgtcttacttgattttactttcctggcaatgcacagggttaaacgagcagtccaagcaaggaacatgtggatgtcctatctatgtacctacatgtcctatttgcatgactacagatgccctatctgcatgtctacatgactacagatgcccttccatctgacagtctgttgcacactgagctgctcctcgttttcatgactttttttttttttttttaaattgagacggaggctcactccgtcacccaggctggagtgcagtggtgcgatcttggctcactgcggccaccgcctccccgggttcaagcgattctcctgcctcagcctcctggatagctgggattacaggcgcgcaccaccatgcccggctaatttttgtattttcagtagagacagggtttcgccatgttggccaggctggtcttgagctcctgacctcaggtgatctgcccgccttggcctcccaaagtgctggga

SEQ ID NO: 105522 - DNA, 1038 bp, Homo sapiens
aaagtagtggctgagcccactggtgatacagaatgtatcaggcactgtgattcttggatctctggccaaatgtagaatcatttactgagctaaaggccaatttgcttggaagagtgcatctaattaaagtgagattagaaaggacgaaaggtgtcctttaggaaataaccacacatggcaagccactggtatgatgatgatcaccaaccctgcaggccttttgaggcgctcattccaattaaacttgtcatccttagtgcagggggcagctgggagctctggtttgtggcgttcactgtccttgtttgtaccggcatgacccagtcctctccgtgggctcctgtggcgccctgggtgttgttgggtctcaggcctgatcatttgtcataggacagtgggctcaggcccagcagtgtctgggccagtctcccttctttgtcccagtgccccacatgctgtgggctccgtggatgcctgttgaaggagcggagggacttccattaggccgtgaaggtggaataagggatttttagctggggttatggctctgagacagttttactaaaattggtctagcagtttctctgccagacacttttctaagcacttcttatgctttactcacctgtattacgttgttcaatcctcccaacaaccctactttattaaccccatttcacagatggagaaactgagctacacagaagttaagtggcccgcctagtacttttatgaagtatctttgctgagtctggctgctgagttggagattttgaccactgtgttgtgatgcctcttagctcttggaagtttctcctttctaacaaagaagaaacttcaggggctactgtggctagggtaggtcaaggctgaggtctttttgtactctggtggagccagggccattccaggagcagcaaagaaggcagagtgtggaggcatgcctgagctgactggaggagttgggtcccactcttgcaacgagaggctgtctccagctttctcttctgtccaggagcctgtgcctgcacaagtgcc

SEQ ID NO: 105523 - DNA, 1341 bp, Homo sapiens
ttactggcataagccaccacacctgacccttgagcatttttttcatgtttgttggctgcttgtatcagatctttgtttacaatttatctttgacctttgactcctacaacagtttctcaatacttgctctatttttcaggaaaaagaaaataaatattaaggagaggctgttttccacctcaagcagttaccatttgaattagggaagctgttggtgagggaaaaccaattgatgagcgtcttagtctgtttggactgttataacaaagtaccatacactggttggcttataaacaatagaaatgtatttctcacagttctagatgctggaaagtccaagatcaaggtgctggcagatgaggtgtctgttgagggcccacttcccgggcactcatatggtagaaggggagctctctgggatctcctttataagggcactaatcccattcctgagcgttccacctcatgagaatcacctcccaaaggccctaccccctaatcccgtcaccttggaggttaggattttttttctttttttgagatggagttttgctcttattgcccaggctggagtgcagtggcgcagtctcggcttaccgcaacctccgcctcctgggttcaagcgattctcctgcctcagcctcccaagtagctgggattacagccatgcgccaccaaacctggctaatttttgtatttttagtagagacagggtttcttcatgttggtcaggctggtctcgaagtcctgacctcaggtgatctacccgcctcagcttcccaaaatgctgggattacaggcgtgagccaccatgcccggccagaggttaggattttaacataggaattttagggggacatagacattcagcccattgcagatgagtctgtgggttccacccaaggctgctagagtggctgtctatttcttaatggattgagtttctctttcttcaaattgtgacaagcacagacacttaaggaagacagacctggtttgggtttttgattggtctagcattgaaggcctttgtggtcttgtccctgtcttatcacttcctgtttcctattccagtcaaactgaatttctctttttcacttccatgcctctgatcacattgttatctagaatagcctctccccattcacttaatacatttctctgtccagtcttatgactcagctcaaatgcctcctcttccaggaagccttccctgtttccttagcaggaagagacttctcctgaatttggtgcactctgctttcttgttgttttttgttgttgttgttgttttgttttgtttttaagacggatctcactctgttgcccaggctggagtgc

SEQ ID NO: 105524 - DNA, 1035 bp, Homo sapiens
caggagccggtgtgtgcactctgcctcctcaccttgcacccagagcaagaggactgggtgctgggctgcagaggccggtcagtggagcccctagcacgtgtgaactcaggcttttcattgggcccggctccacttctaggccatgttttgactcatttggtaaccattgcctgtaagcagcacagaattggtgccatggattatcttttccatgttgatggaattcattctgttggaatcctttggccagatgtcacttcagccagggtgtgcatcatcattggttctttttcacaggctgagcctcctgaaaacccatgaacgctggggctggggaagtgaaccctgaggtggggaccctctcttcccatcaaatcatccagctcagtgtggggcgtggcaggggggtaaatgaagccagccaatgtgttaacctgtctctgtcaacctaagaatgttggccttactgacacacctttgctccatgttcaagaccagaagtagctgggatttgtttgcaaattgggtaattagtttaaaaatctgtgattacatttttaaatgaaattttcaaagtggcctagattgaggtgattcagataggtttgcgaatataccattttatattgttgagaaagaacaaaaagggaatttccagatgtcctagaaatcctagcaacagatttctctggttgtcagtttccctggagaaggcgccagataggaatctccaatcagttgtttttctcttcgcttcaggcccttacacaaaagccatgaagagatgttcacctacccggtattttaaatgttctgtaaattattagccaaatagaactgtaatggggttgtatttatgggcgcctagaaagaaaacacaaggacttggtaggccaggaagaaaagattttaaaatttagaatgaatagcccttctgggttttctttttgacaattcttggacttgaggtaaaacaaggaggattgtggccggatttcagatcccaaagccagcctccatcttaggcctttgcct

SEQ ID NO: 105525 - DNA, 1043 bp, Homo sapiens
aagcttatctatccctgtatatgagctaaaataccttggcagttaggcatagataccgcatttcttttgcagggaaatgacaccaaaatgtggtttgggcacttaagctcctcagacctcaacctcactagtaactttctgaaaggttcagtggaaagttagaggtgcaaaattcagagaggtcatctattccacattgtatgtgttgcaaaaaagatgattgctttttctacagtgcaccccctgtgggtgccatttctgtttactgtaatgttctttgaaaaccctagctgcacacttccctccacattttcctctccacctttccctattttctcccagttcccctttgcaaagtgctcacctcgtctttggtgaaagagttgaaggaagtgtcttccactgcgtttctggccaggccactgtcacatgtgctctgctagctaattaggttattgtgtatctgataggcactgaagggtttaatgtgatcctacaccaggtctcaaatgtgtttaagccatatggagccatggcttcatgcagcttagcgtggcaaagattgaataggatggagaacttgagaattatgatgattgtttttcagctgccagaacactaaatttaaccagttcagaccttaaaacaaacccaaatcctcgcatacataaaagagaaaggaaatttgtccctgaagtagtaagaatgatgtttttgtattgatttttgtgagaagtggaaactcttaaattatttgggtgataaagtcaaactggggttatgtgaaagtcattctctcatttgtcagtcctagctttttttccccctgaaaaaaaagtttagagtgtttctgtaaatgtgaaggtacaacttttttgcacctttttctttaccaaggggtttatgagttagagtttccatttttattccttccttttggcccttcctgctctgaggctgctgttgaaggttttcaaatgtggctcctgccctaaggagtattcttttttggatgcatttagaagtgaaattggtttctgtgt

SEQ ID NO: 105526 - DNA, 1024 bp, Homo sapiens
ggctggagtgcagtggtgtgagctcagctcactgcagcctcagcctcccaggctcaagtgatcctctcacctcagcccccaaagcatctgggactacaggtgcacatcaccatgtctggctgattttttctgtttttcagtttcgccatgttgctgaaacttgaactcctcgtcttaagtgatccatgcaccctggcctcccaaagtgctggaattactggcatgagccaccatgcctggcccaaagagagtttagatgaagtacttagtgtacctcataggtaccttctttgagaaatgttttctttccatgtcttttccttcactgagttctggtaacagtttttaaagccaaaaatgaaaaattattgtaacagggttagacaccaaatgtttacatgatttatgtattctgtctcttaggatcagtttacagtgcatttactttctcatggacaagaggatggaaagctagaatggtcaatccatagtactgtttgaaccactcattttgtcacttagaaatgaaatcattatgtacaccgttatgtgactcttactgacagagatacattctgagaaatatgttagaaatatgttaggcaacttctttgtacaaacatcagagtataattacacaaacctagatggtacagcctactacacacctaggctatatggaatagccagttgttcctaggctacaaacctgtacagcaggttactgtactgaatactgtaggcagttgcaacacaatggtaaagatttgtgtatgtatacatacataaacaagaaaaggtacagtaaatatacggtattataagcttataggaccaccatcatatgtgtagtctgtcgttgaccaaagcattgttacatggcacatggctgtactttgtttctccaaccagtttacaccttaacattttcttctctagtcctcctcagtacctaacatagagccttgtgcagagcagctcctcagtgaatcaactgagtaaatgaaaggaactttccagtata

SEQ ID NO: 105527 - DNA, 1004 bp, Homo sapiens
acaaccaccacctcccaggttcaagtgattcttgtgcctcagcctcccttgtagctgggactacaggcatgcaccaccaggcccggctaatttttgtattgttagtagagacagagtttcaccatgttggccaggctggtcttgatctcctgacctcaagtgatccacctgcctcggcctcccaaagtgttgggattacaggcatgagccactgcacccagccaaattctttacgtaagatttttgagggaatatgttcttgctacagttttatgacatatcactgtggctcctatgcaaaatagtggtttcattatttttaaaaattgtggtaaaataaaacattaaatttaccatctcaaccatttttaagtatacagttcaggggcaataagcacattcatgttgtacaaccgttatcaccatccatcaccagaaccgttttcatcttgcaaaaataaactctgtacccattaaacaactccccatttctgtatcctcccagcccctggcaaccaccgttctactttctgtctctataaatttgacttctctagatgcctcatgaagtggcagtatttgtccttttatgactggtttatttcacttagcataatgtccttaaggttcatccattgtgtagcatgtgtcagaatttccttttttttttttttttttgagatggagtctcgctctgttgcctatgctggagtacagtggtgcgatctcggcccactgcaacctctgcctcctgggttcaagcaattctcctgccttagcctcctaagtagctgggatttcaggtgcctgccaccacgcccagctactgttttgtatttttagtagagacaaggtttcactgcatttgccaggatggtctccatctcctgacctcgtgatccgcctgcctcgtcctccctgagtgttgggattccaggcctgagccactgtgcctggcccagaatttcctttctaaggctgaataatattccattatatgtatg

SEQ ID NO: 105528 - DNA, 1034 bp, Homo sapiens
aagattcagttcttaaattatgcaatttcatatggagagaagggaaaacagaaatgcacgggtactcaacaccagatttaacttcatatcctctttgtaaagaaataaaatataaatacctttgaagttctactcctcttaactcattcccttctttcccagagaggttttctctatttttaccacatgtgaatgtaagtgtgtgtgtgtgtttatgaaatgtgtatatattctttcaggcagttttccttttgcactattcctgtatgcacagatttcagtaaccatagtttagttaacaccagtacccaaacagcatggcttaaatttcagttactccagtttattaactgaagaattaacccaccaaagatgaaggtgcaaaaaaacaaaaagcaacaactctggaagagaaattgaaattgaacataaatggagcatagaagaagtagctgaccatgggaatgctgacactattcaccattcaagggacagtaggtatgcagccagaggtcctggtgcaggcgaactgaccgacattaatgatggagtggctgtgacgaaagggatgacagtatcccagagaaagtgatgcctgcaacagacttcccattaaaggaaaccttggagatatttcccaacattgaaagtgcaaaggataaaatgtcagaagttggtttagacttaggaaggtgtatgacagttcaccagggatagaagaaatattctgtatcttaatctatatgacaagaaggcggcaagcactgttcaagtctcttgataaatttttttacaaagaaaatattttttattctcggtgtttctaatgttttaaattatagtgtgctaaatattagttttacaatttgttcatttatgcttataatttactatatataacttacaagttacatctacaacgtaactatataagttaatatctataactaatatctataacttacaatagagtttttaatgttttgacaaaaaaaatttttaaaggtcatgaaacagtcatagtttttacaatt

SEQ ID NO: 105529 - DNA, 1040 bp, Homo sapiens
ttttttttattttgctttttttttttttctttgagacagagtctcactctgtcacctaggctgtagtgcagtggtgcgatctcagctcactgcaacctctgcctcctgggttcaagcaattctcatgtctcagccttgtaggtagctgcaattacaggcgtgtgctaacacgcttggctagtttttagtagagatggggtttcgccatgttgcccaggctggccttgaactcctggcctcaagtgatccacccacctcatcctcccaaagtgctgggattacaggcgtgagccactgtgcctgcccagtctgccttttttttttttttttttaatatacagtgaatatatctttaaaattaggtttcatatgatctcaacttaaagtttcttttgttcaggaacctggatgattgctacctgaatttttttttgacacaccttagaagtgtttaatgagaagacagaatttaaaaggtcgctccatcttacttattaggttggacaatgtgaagtcgccagtaattgaccatttttgaccaataaaaatggttatttcatgtggttcaacctaaattaatattttagttgactggcttttttgggtgagattttcaactctaatttggtaaaattgtatgtaggcttagatggaagtttaggtgcaggctaagcattcaagaaacttggcttttaactacaaagagacttgcttttaaaagcagttgctacattctccatttgtttatgaaacatctctacaacgtcagccatgtaccaggaactatactagcccctggggacccagaatgaagctgtggaccctgtcttgtgggagcctacagtctgctggggaagtggtagtcaaagaatggttgctataatggtgatatgtaccaaagtgaggtgggatcctgaaggaatgagggtctttgcctgaggttgtcagggacaactttataaagtaaggtatctacagaggacagtaactttacacagaaaggtaacttttgagctgagacttgatgaagatttgttggt

SEQ ID NO: 105530 - DNA, 2557 bp, Homo sapiens
aatgtgatggggccaggcatagtggcgcatgtctgtaatctcagtgccttgggaggctgaagcaggaggatcctttgaggccaggagttcaagaccagcctggagaacatagtgagaccctgtctctacaaaaattttttaaaaattaggcatggtagcatgtgcctgtagtcccacctgctcaggaggctgagtcaggaggatcacttgaccccattttgaagcttcagtgagctatgatcacaccactgtgttctagcctgggtgacagcgcaagacctctactcaaaagattttggagaaggggaaaattggtgaaggtgcatgctagagtgatatccaagaatgtgtgaggtgggtgggggtcagcgcacaggtagagggcctggtgtgggctgctcacctaccactgtagaagggaagcagatagatggatgtggttgctgatgggtgtgtaaatgtgatcggggcctgtggagggcttttatttttacagcaccatataaagtgtcataatgggccatgagggggatgagggagaaatgttgcatgttgaggggagtatgtgaaatgccatcctggagagaaggcatggatggccctgggagtaactgattgatgaaagactagaagtaaatacactcacattttaaaagttatgctgatgggattcagtttttattttactcttgttccttccatgctttctggattctctaaagtgtgtagatgtttttgtcttgtaatcagaggaacatgattcataaagcagtcagtcatattctctgctagatttagctctctaagagcaggcttatctgccctgctcatttttgtgccctggctcgaaatagataatttgggtaagggagcaaatattacattggagtcttctctagtgctatgggcttcaaaggaaagtgaattgggagctcaagaggagcccttatcaagtctgatgataccaggtaatagagatgagtcattagcagctcaactcattgctgatgtcattaggtaccattttgaaaagcatttggtgttctcttgtgaatttgccagcacttctccaatgcatacccaatacattcataccaggaggtctttccagaatgttcacagtaccacgttagagcaataccatgaacgtcacaagggcttgaagtttataaatagcgtagtttcatttttacaaaaaagcaagctgcgtgtttctaagtatggttgcatgtgatgaaactaaaaagataggagaatggtctccatgaacctgagaatagttacttctaggtgagaacacaattggataaaatagggaaggagcagataaatagattcagggttttggtactgttttgaagttggatggtaggttcacaaatatttattttattatgctgttatactttataatggatgcatcaaattatattaagaaaaagtgttacatatagaaaataccataaccaaacctaaacaaatgtggaaggagaaaaagtaaggccattgaaacaataaaacctttctgtcatacccccctgctccccagccacagtgtggcatacattaaaaagcagacaataaattagccagacatggtggcatgtgcctgtagtcccagctacctgggaggccaaggtgagaggatggcttgggcccaagagtttgaggctgcggtgagccatgatggtgccactgcactccagcctggttagcaaagcaagagcctctctctcaaataaatacataaataattttttttaaaaaagcagacaacatcaaatgttggtaaaggtgagaagccaaagtaattcttgaagcaatatggaatttcctaataagatcagatgaggagtatactctgtaacccagcagtactgctccttagagccatttctgcttatttgtacagagatgtttattgcaacactgttcataatagtaaaactggaaacagctggcatgtccatggacagtagaatggataagtaactgtaatctagtcatatagtggaatattatacagccatagcagcagcaaatgaacctcatgactataatgagcaaataaagaaaactgaaagaatacatacagattaattcctgttatgttaaaaaaaaaaaaaagtcaaaagctgttcagactaaacaagaatttgtttagtggcaaaactagaaagacaagggaataatgaactgagtggatagtagttacttcttagagggcagtaagggagccacagggaaaggtgcttcagagatgctagtgggtacaaaggggtgtgtgtatgtgtaatttttaaaattatgatcaaatatacctcataaacaatttgcctttttggtcatttttagatgtgtaattcagtgagtggcattaatttcattcacagtgttgtgcaaccagcatcctgtttccatcactccagtaagaaattcttacccatttaatatcaactccccatactaaatgggtatttaactattgtaaatagttacacacattatactttactgtttattatatttcataataaaaacatttaatgtaagaggt

SEQ ID NO: 105531 - DNA, 1031 bp, Homo sapiens
agttttcagtaacctaacttagaaagtattttcttgtattgcttttaggttttttgcatgcatgaagctagtcatttggctttgtgccttcaactttgtaaacatttacattttgagcatttattttctaggctttgtactagcaacatgcttattttgctaaactaaactttaaaaatctgtattaaagcttactgtcattatgaaaagaagtttctccaacctttgtattttttttaaccagaatatatcagcatattttatggctgtgagccattaaataaattgtagcttggggccagaaagttgtagaaattatttgcttaatctctctcatagcagaggaagaataacattgagtgagtgacctggcaaagatcacaaaccaaaattaaagttagcaactctgttgtaactagattttcttggatggaaacatagtttttgattaaatttttgaacaggtagtgcatttacatatttcaaatatcaaaaagtatttttttaatgcaataaaaaatatttcccatttctgacctcatctgcttggttcttacccccttcccagctaatcagatgttagtttcttgtttatccttccagataatttttatgctaatacagatatgtgcccttctcttcctccttttttagacagtgataatattctgtgcacatttttctgcaccttgtttcctttttttccttcatatcttttgcaaatcttttcataaagatctttctttcatacacacaaacacacatactgtctctcagtctgactctgacttttaaaaataattggatgttgttccttagtgggaattacgaagggaagcaaggatagcctgtgcctctgacaagtaatctcataaagtattgaggagtcatgtcattgctgatttggctcaataattttggccccttctggtgatatggtaactaaaacagtgatacttcacatatacctgcaaatgttatatgtaagaaatatgtcagaaaggatgttaggaaatacttggcacagttaa

SEQ ID NO: 105532 - DNA, 1001 bp, Homo sapiens
atcaatctggtatgtttcttatgtttcttggggggaaaaaaaagccttaactttttcttgacagaaaatttactattttaaccattttttaagtgtacagttcagtggcattaagtagttcataatgtgcagccatcatcactgttcatttccacaacatttcatcataccagacagaaactctacccattaaacaattaacttcctattatatccctccccacagcccctggtaattctattttactttctgtctctctgaatttgtctattctaagtaccctcatgtaagtggaataatacaatgtttttcttttttaatgtttttaaggttcatccatcttgtagcatgtatagaatttcattctttttttaagactgaggaatattccattgtgtatgtgtatgcatatatgcacacacacacacagacacacacacacacacacatatacatgcataccacattttgtttatccattaatctattgatggacatttgggttgttttcattttttggctattatgaataatgttgctatgaacattggtggtgtgcaagtatctgattgagtccctgttttcagttcttttaggcttatacttagaagtagaattgctagatcatatggtgattctatgtttaactctttgaggaaccaccatactgtttgccatagcggctgcaccattttgtattcccaccaacaatacaccagagttccagtttcttcatatccttgctgacaattgttgttttctggtgtgtgtgtgtgtgtgtgtgtgtgtgtgtgtgtgtttaatgatagccatcccaatgggtgtggagtggtgttgagttgatttacatttctctaatgatttgtgtgattttgagcatctttgcatgtgctcattggccatttgtgtatcttctttggagaaatgtctatgtaaatcctttcgctatttttaatcaggttgttttttgtttgagttgtagtcattctttatgaagtct

SEQ ID NO: 105533 - DNA, 1079 bp, Homo sapiens
aagtgatcctcccactttagccttctgactacaggtaggcaccaccatgcctggctacgtttttgttcttttagaggcagggactcgttatgttgtccaggctggtctcgaacttctgagctcaagtaatccttccacctcagcctcccaagtagctgggattacaggcacgcaccaccacgcccagctaaaagtatttttaatgcaaaatattcaatccttgcctcagagattctgattcagttgatctcaaggccaggaatcttttttcacaagcaacccagaggattctaaagatagtatatgaatcataaagccctgacatctagggatatagttggaataattatgttagaggaaaccctcatctggctttgggaaacatgattgatttgcacagcaacctttttaatactcttaactttactttttcacatctttggggtgagatgatctctaatcttcagccattttttggatggagggctgtcttgcctcagccatttagacttctttttggtctaggataatcacatatgcctgaccacacattcctgtctgaccttttaatttacagtttttaataatgtcactgaaatgagacccatgttataagagttaagtccttagtaaatctgacctactttggtatgagagtgtttatacaaatatgttttagttattttctagtggactctgctggccaggtggtggcaaaccaggaaggcgtgttccgaagcaattgcatggattgtctagatagaaccaatgtgatccagagtttgttagctcgtcgttcacttcaggcccaacttcaggtgcgaatgctttttttttttttaattgaaaaacaacacagcaaaaaattaaacatctttaaaacccagtaacaaaaaatattcacattgcccacaccctaacccagctctttttatttttgtgtcttgcccatggatgtcacattttccataactagggtcagtctgtgtatgcacagttttcacttttgccattttcccttagcatttatgtaatcacagtttctggtggttgtattgttgtgccgtaatttactaagc

SEQ ID NO: 105534 - DNA, 1302 bp, Homo sapiens
cgctccacagtgctcctcagaccttaccgtgtacctgaagcaccagtcttgagatgtgctctaaaaagcacccaggtgatgctgatgctgctttcaaagactgcactgagtaatgaggacattaatgagaacattttgaatgtattatgcatgcagtggctctttttctgctatgtgggttccctgggagcagaataagatttctagtctgtttgctttgctgtgtcctaccacttaacctgggctatgtatttctcttcatatttcttgtctttgcaactggaattagtgtgtttctttgtgcctcctttggtaatattttagaaagaaaataggtatttcttggacctacaagtgatttcttttgtgaagtatctgtattttcagggatagtttttaaaatctgtcactcacttatttctataccttatgcttattggccataaaacagtgtgagaattcagtgtacaaacctgtaacttaaaatttaacctctttaaccagaactggaaagagaactcatttgggacttataatggatggctggaactcaatgatacgatattataagaacaacttttccgatggatttagacaagtaagtttgtatttgatgctttcctggcattacgtggttgtatctttgcattgttcatcactaatgttatctcacactgagtttacgaatttcttcctttctgttctaggattccatagacttatttcttggaaactattcagtggatgaattagaatctcatagtcctttaagtgttccaagggactggaaattcctggctgtaagaaaccattttgtatttttcaagtttttaaaagcattgtgtctgaaggtatagatggtttcagtctcaatttaaaacgttatatgtggttttatatttcattacatgaaatataaatacttaagttttccaaagaggtcaggctgaggagtacagtaactgtggagcatttgttttcttttcctcagactctcacacatccttttcatgtgaagtaacataagcaaagggaatgtggaagctttctcatttcaggaaaacttcaattctcttacattgagggaattgccagagacaaacgtgttacatggaaggcaaagtttatttttgatgcttctctcctttttgactcctctgttcaccagaccctgcaagagccgctctggattttctttccagtgtgtcaagtgctctggaatggaagggaggcctagtgttctaggtcctcatctgggcatcctccttccatttagcaccctttggcttggagcaaaagcat

SEQ ID NO: 105535 - DNA, 2349 bp, Homo sapiens
gctagaatgcagattcctggggcccaacagttgatgctttatcaagccctgcagaagattctggtactagccagggtttgagaaccactggtttaaaccttaattaagaggttcttatatttttcctgtgaatgtgctagtaaactttaatgttgccaaaatgtgctaaacagctgaaaactgggtctgatatcaacaaacgacttatttagctttttgtttcttaatatcaacaggtgacacttggacagaaacactggcctatgtgctcttctggggagttgcaagcattggaacattttttatcattctttacaatggcaaagattttgtcgatgctcccagactggtccagaaagaaaagatagactgaatttgtatttgtggaaagcggcttggcttggaagattccattgtgcagaactggagtctttactgacccgctttccacatcagcccaaggtctttttaatgcctttatccaaaagcacatcttgtgctccatgcaggatgatgacagaattgatctgatgttactgccttgatggtctctttactattgggacagttagatttataatttgaagctattctgtaattaaaatataacctgaattcagcttgcagaatggaagctgaatctgttcattgtattctattgattgtcaatttaattagctgttgcagaataagtaatatattttaaaaacctagctcctttcattatttaaaacagcaaaattatttttgtagctcagtttcattattgtcattgtagaagcggtcactattagcaggcatacttttccacacatctttggacttttcttaaaagttcagtaataagctaactgtgtttataaaatgtaagtctcttacagacatcaagtagtttgatgagacagtctgtgacttcatgataggaaagaggaggatgaggtctggggttctttaaagtctctggtgggctgcctcatgactttaatcagcttgaactgccagtgcaccagcagtttaggtgtgatgagagaattcagatatactttatctttttaaaaaagtgtaaataaaatcaaagaatgtaaagtctatctcttacgctagaggtccaaagctgcctctgttttaaagattatcccaatgtggaagatgcccatgactggtcagctacttcctcctatacattttggtttctttgagggtcactcattgagacacgcaggcctctgagagggtcttgttctagatttcatattgcacttggagggtaacagctgctttttcacgcatggtactcttgatgtttttcactctgtcaaggattttgttggctatcaatgaatgtgtctaaaacttagtgcttccaggtagttatagtactccaaatcaaggaccaacttaaacgttaatttttgtgcaaaaacaaacctgaaaaatatgcttcggaaactgtgcatagttctaattgtaagtcagattgtatattcaaattgtaattaagagatttaaatattagaacggtatgtaaggtagtataattaccactattttaaataattcagttaaacactgctgcaatatttcagtgttgtgcttgaaaatatgtacagtttttttccaatattaataccttatgttgtccttaaatatttctaaaagcgcctttatttcagcattacctttttttcatcactatcttttataaaacattaatataagtcgttacttttagaaactaaaggaaataatagctggaaaaccctctgtagtttaaaatcagtcattaaactcacaatagggtaagtaaatatagccacctgttaacatgtaaataagcataatttgttccaaagatggaatattgaaacttagttcatgtctgctgtaaaatattatttaaatgctgctgggcatttcacttaaagaacttaatgtcaacagctacaacaaagaccaaatctgaactgctaatgtggctgctttgtagggaatggactaatatcagtgtgttagatcttaaggtatcagtatttcagaatcctgcgacgattttatttctaaattcatgtactgtatgtccataagtgaaaataaaatgtcatattcttttctattattggtatcattcatgtactttgaaagtgatgtttttctttttgatcttagaatgctaaaaatcatgcaaaatgatagacggtttggctctgtgtccccacccacccaaatctcatctcaaattgtaatccctacgtgttgagggaggtacctggtgggaggtggttggatcatgggggatggtttcccccatgctgttttcatgagtttgcacgaggtctgatggtttaaaag

SEQ ID NO: 105536 - DNA, 1031 bp, Homo sapiens
acaaaatttgatcattgtatgtcctattatgctaagtgctcacaacacgctaacgtgccctcatccctgccaggcagatgttgacatgccccaggccctccagcaactggtggtggtgtagggagtccaaatgtgagccctggattgaggactccaaaactggtgcactttgccccagcccttgcccaggcgacccttcagctcagagctcagggaggcctgggactcggtgggacagcccaggcttacttcttcaagcagttttcataattgaaggtggccttgaagccatagatggagaaggtgacaatgctggcaaatatggaggtgaagctgttgatgagggacacgatgatggcgtgcttctggcagttgttggatggctcattgtagctggcgaaggcgatcaggctgccgaagcccaggccaagtgagaagaagatctgggtggctgcattgatccaggccttggggttggccagctgctctatctggaaggccagcagggacagggctgatgatccctgggtggaatcccaaatgctcagacccgcaacaggagagtagcccagagaggggaaggagctcacctacagcacgcagccatcaggggcacccctagggctggagaccagctctcctggccccatccactccctggcagatgaaacacacacctcaagctgcacacctcccagggctaaggtgctgtggagaatacaggtgctatgtggaggacataaggtgctacgtatcctccatagcacctcagccataggaggtgtgtaaccagaagcagctatgctcaccactatacgccagtgcggaggtgtgcaatggaatactgcagggtaaaataattaaaacacaaatggggccctgattcataggcagttactgcacaggtctgggcattcagagatggagggggtgtggcctggcaggggaggtctaggtgtgggttgactctcggcactgacatcggtggcgtctggaatggggaaggggaaggatgacacagtcattttatt

SEQ ID NO: 105537 - DNA, 2108 bp, Homo sapiens
caagaccagcctggccaacatagcaagacccccatctctataaaaaaattaaaaattttttcatataaaaaatgggaaaaaagaatatgggagctaaaatttaactaaattaaaaatcattttgctaaaatacactactatgggacttgggaaaaaagtgtgcttattttacaggaaaattagtttaatatttcaaatagatttatcatatccagggcttgagttatttaccaacactgtacttgggaaaatgttactattttatggcttctcatttgaaagaatatatttttaaagtttggatagtcttagttttatataaatgtgtcctttaaggaaattagaaaatcattagcaaaatactagtaaaattcaagcaaaaaaaactacatatttttatcgcatttgttatctctttccttaactatttttttagtaatgggctgacattttttactaagcaggaattagaaaagaaatttcagcaaacagcagcttatcgaaacatgaaagagattcttaccaagaagaatgaccaaatcaaagatctgaggaaaagactggcacagtaagccacactgatcccgcctttggatttctctctctggattgatgtttgttctctgttaaatctaagcttgttccagagaggtcaagccggtggtagttgctggatcatttagtccagaagccttcatttgaggaaagtggaggagctctggcctgaccttatctataatgcccaccagggcttctttttaggttcatctaggcctttagactcacacaggcctacagtaagctgctcttggcaatggattcacttagcaggatgtcagacaggaaacacagcaagctcgcagggcagcattaggtagttctcttctccttggtggtatactctaagcagtccaagaactggtcttactgttcccctaaatgacagtttaagttggagagaatgagattcatgcagatgggtgtcatagccagcttggcttagaagtccgtgttctacataggattagtatctctcttagcagtcacatgatacccagttaagggtatgtccagttaaaagaactcatcgcacagggggaaacctaaagtggtggctcccaccatgtatttatagttcattcatagtcctccaggtccagatgtggtcatcagatgttttgcctggaaactgagttgacattttacctttatcagagttccaggggagcagagctagaaagggaattcaaggtgagatttgtccttagagaagtagatttgctagccctttactcatatagtcgtatcaactgttcttgtcaacatgatgattgaggtaattatatgaagttatcacaggtctaaatgccaaatatacagacttggagccttagcagtgatctggcctatcctcctacctgatgtaaaaatcccctctgagtcaccatcaaaacaaagttgaatgtgtccaacttctaccgtaacagtaatttgaagtgagaaatatagtgccactgcttcaagtaaacttatttggtaataacaacaacaaaaggtatcctgacattgtgttcttaatttatatctccagatatgaacctgaagattaaaactgaagatttcctctggaagctaccacatgcaaacatacaagcagtctcacctcaggcatgtattttgaaaagcattttgtcatatcccctctccttatttttctaatatttagactttgaatatttagaactagagttcctattttcagctagttgaaaacagagaaaacctagtgattctgtctggtcatcccacacacctctctactgagtgctccagagtcttagctcacatgcactgagaattctttacagcaaagaagagatttttagagtgggaagaagaggcttatccttctgcattagtataaagagtctgtatttttaataaatgttaaataagctaacaatgtttgtacttatgcattccccatgggtaaaaataaataatagcattgttaaagatagttattaccaaaaaaagagagttattacaaataaatatgtctctttatttttaaaaatgaaatcttaattcatttactctatttgatg

SEQ ID NO: 105538 - DNA, 2339 bp, Homo sapiens
taatgagaatgattagaaagagaggtagataactactagtattgtctccatttgtcagatgagtaaaatgaagctcagctacctcagataacctgctcaaggtaacacagccaggaagtgacagagccaggatgtatacccaggtgtggctgaccctacagcctgcgctctgaatcttctgagtagagtatttatgagtgggattgagactgaacttagggatcatgtgtatgtgtaagccatcacagacaaaagcagtttttcacagttacttccaaaacattttttcttttgcctgaaaatatgatagacaatttctgaattttactcttgaattgaatgcttttccttaagagttctcagttttgatctctgaattctttgagcaacttgaggattttaaatactggctattaagatatggatttagaatgaccaaaaagttacctttttgtttgaagatgtaatctctgctttttcaaattctgcaacttgttctaataattctcttgaagaagaaagcaaagataaaaattattcatttaaaatagatttatatcacacgcaagaagagtaaaatcactggtaccaacccattacatgccagagagaacagagcaagatggaccaaacttcaccatatcaaaaatgttagttgcaaatggttgagaacctaaaccacatggactcaaatgtaatcatccacagtacctggcattttgtatctactaggtatgcaatatctactgctagaaataaaccataatgttaatacaaatatgaggaaaatttatagtcaactttgtattcttgaggtgctatgaggagactgttttattacataatgtgtattgttagctagtaggtgttcaaaaaagattcttaataaagtagtctcagaaaaatgaaaatagtccatagtatctactgaaaaagagtaccacaaattcctaggaaagacagatagtgggggtgtgccatctgaagatttgcaaaggccaatgagaagtgactacacacaagcttagagtgttaacagcagtcagcttctaagcttcttaaagcaccaccttctcagagttttctcaccagtcatctactgacagtggcagaagttcaatgattttcctccccagctcataggttgtcctcagcgttgttcaacactctgcatgtgaactgatgtgctgtgactgtgcttagagtagttcacggggcttggcggtcagtccttcctgatttctggcatgctttttcttaaaatgagtttcaacttcaccaattttaccatattttttgaatttgagctcttagatgtccatattataagcttttttgtatatttcctatttcaaagttaataaatgtatacttttaaattccattatttagaaaacttccaatgctactggattgaattgatggtatttattatatttgaattgacttttcaactgtctcataatctctatttcttagttgaccaatctataaagactgatggtaatactgaccaagctaacaaaaatgctgtaagaaataattaatgatagcctgaaaagcaatttcataaatctcgatggcctttgtaatacctaggaacagtagaaacagagaacttttaaaagggtgcttagtggtacccaagagatcactcagtgactcaatgctttgctgttaccctacccaaatttcctcacacactagccccaagaaaatatgcagccaaagatgttcactaacttttaagattatgcttgggccattattgtcacagttgcaagttcaaattttattaccggttttcaagttcagagatgtctgtctgtagcttaagataccacttctcagcttgtgcaaacagctgtcgcagaagtaacacattggtataggcagtgttgatgagctcagattccacctcactatgaaccacagcttgtaatccattgaggacttcagagacttcatctatggtgaaggtgtcctccaccagcctgaaaaacaaccatgatccaaaacttatagaaaaacaacaagaaaaatctacaaaatacagcaaaattaagaaacccacattcatgtaatctaagaaattcaaagattacagtgaaaatctctctgggaactatcttctttattaataaacattgaaaataatttaaactcaattaatttttgacatctattcaaatgattaaattgtgcacatcctttaatacaagtaaatgctcaaacacattcccaaaaccatcatctacttttttaactttttagtattaaatgtcttatttcaaactccactgaaatcagtcttattacatttaataatttcaaaagtc

SEQ ID NO: 105539 - DNA, 1036 bp, Homo sapiens
tcagtgagagggtcagtgcctctccatgaggtagagacgtggggccctttcatcttgcggctcccccagcctctagggcattgatgttgtctgcatgattcagtcaagtcgccacctcttccaggtttcagagaaacagggaggggcagaggtacaccccatatcttaagaccaggtctttggaagtagaccacaacattcattgctgagaagtagtcagcagtgacttgattgcaaggagggcaaggaagtgtcatctaggtgggcagccatgcagccaggaagaagggaagaatagaatttgatggagatctagcagtctcgaccacaggatatcttatgcattttcattgttggctctttgatcagatcttcaaaactaacaattaaattacctctttctttttcaggcagagttgggcctaaatgagcaccatcaaaatgaagttattaattatatgcgttttgctcgttcaaagagaggcttgagactcaaaactgtagattcctgcttccaagacctcaaggagagcaggtatcagaggaggactctaagcaaaccaaataggaacatggattctttctggtagccagtatgggggtgccatagcagaggccagacaatttctgggattcatcatgatcaattatttgctaagagcagctacactaagcctcatggatacaggaaacaaaagaagttgtattgtggtgaaagcaatgaatctattgtcagaaatgcatgtgataattgtaggataattgtaggatggcagagtttgagaaggaagttgccaagggtttgtggattaatgattggcttgttgtattgaagattccagaactttaattacttgagttattaattaaatggttagagctataagacatggcaattagtgagaaaacacttctgtgtttcatactgaataattagtagagaggaaaacagcaggaaatcataatgctgactagtaccaaaattgttagttgatttctagcatgagatgataatggttggaccgtagctgatttg

SEQ ID NO: 105540 - DNA, 1055 bp, Homo sapiens
ccaagaaactgtccttggctcagaggtgttgggaattaaagcagagagaagccattcgtgatgcttagaaccaaggatggtcatgtacacaaagaccatcgagacggccattcttgtttacaaaacacttaccaagaaagcactttgtaggggaactttagtaagttcttctcatttcattatgtttcttccaaggaaacaggagagactgaattaataattctctctttcctcttaagcacttttaaaataataaagtacatcttgaaatttggggaggcatctctgatttaaaaaaagaaaaaggctgcttgatgtatgttatgcagagacactctgcctctggtggctgcagagcaatacccaagcctcatttggaaggctcaacatttggaattgcactttaattgattaatcctcaattcatgtggccttacgggatggtgggtctgggaccccaattcattcttatctgccaaagaattatctagaagcacatcaaataccagcaccccacctgctcaatgggggtggaaaacttttgtatccctaagcatattattttatagtgtctgccatgccatgtggaaatactttatttttaacctcaggatttaaataaagtaaacactatgacatttagacatttgtctctcatttttttgggacataaagtgcaccacgaagttatacagagctgagttggggttgagctgtgctgctgggaaatagagcatcttttatggtggcttttcaggaggacttgagccagcagatgttctgggaagtttccaggtggcctggcacctggctgcttcctggcctgctgtgagggtggtgtttagacctgcctgagacagcctgtctttcaatccatgctgttgtgccctatgggcttctagcctcagctcaaatgtccagatctcccagggcacccacagagcatgttgagcaaagagcagacttctgagtttaccggaacaatggggctggggagaagcatcatggatggcctaaaaccatgattggtcaatatgaggtacaaagctgggcaa

SEQ ID NO: 105541 - DNA, 1016 bp, Homo sapiens
tgtgattcttaaccttttttgaccataaactcctttgagaatctcctaaaaactgcagaccttttctcagaaataatgtatatatatatacacacacacacacacacacagacacacacgcacacacacaaacacccctacaattctgggagtccatgaaccccttgaatccttctgccatgtattctgtgggccctcacataagagttcatgataaactatgtgattttaactgaccgtacttttagaaacctggaaaaaatgatcacattttattaacagttggcctccagctggtggaattatgggtgacttatttcttcctttttttaaaatagttttcaaagtttctacagtagtatgttgatttatattgaaaaaagaacataaatgataatctgataaaacagcctgtcttatgcaaaagaaatgaaaacagagattattcattgagcaaatatagacaataactagattctccttatctccctgggtgggtctgactatgccattactagcagtaccatcagcctgcaagcactaactgtgtgcctggaaacatgttcagtagttttcatgtttctccagtttaacccacacagcagcaaatggcagtgatggaatttgaacgaagagcagctgagctccatagcctggcattttgcactgtaccctactacagacaggaatctgagaataccaacaatacctggggttagtcctccctgtcttcttttcaatataaagagtaaaacaaatgactcaccagcagagatgctttgccagtttgttccagagatgagcttgctcatgaagcaaggtctgcctctacttctgtgatgtggttcatgtttccgctgaacattttttaagagccctcagctggttactataagagacccaccccctactcccgtccttcagatcagaatccatatgaccaacccgcccctgtgtaacgcgtgggtcagagatggatgggtgactgataccccacactcccttcattctgcttt

SEQ ID NO: 105542 - DNA, 1061 bp, Homo sapiens
cagtcggacacaaggcccctggttggaaacccagtgcctgctgcaagcccttgagcactgggaggttctttcccacgcatcagtggattaagggaaaatgcaggtcagacagactcctgctttcaaaaatacatgaataagtactgcctgtgtcttacagagcaaggatttagtggcatagaagtgtgttttctgttattaggttctttcttaataagatttttccttctaaataagggacctcagagaatatgcaagaggttgaaacctctctaagcccctgactttgagaagtctcttaggttgtacattccatttcgtctgtaagccttcctctacttttttggaatgttccagcaaccaaccatttctctcaactctggacagaatagctgtcagttgagtgaccacttaaattgtgcctcagcagcttgttctgcatagctgcactctctcactttcccaagggcccttacccagcctatgcataacagtgtgttgtgtctcttctctcctgatctgcctctgctgcccaggagcaaatacagactacaggccaccggacgacgctgtgtttgatatcatcacagatgaggaattgtgccagatacaggagtccggctcctctttgcctgaaacacccactgaaactgattctctcgacccaaatgcggctgaacagtgagtagaggtcacccccatttcctgagtgctcattacaggcctggcccctgtgctttcttatcaaaggatgaggaaagtgagacactggaagcaggattgactgtccttgcctaagggaacagtgcttgcgatggccttgaagagcatcggcgctcgggaagttgtcagtgttgagccttgcagagagttcctgagagatgtcagtggccccaggtttcagcatcactattaaggcctgtctttcttggcttgagcgactatattagtttgcttgggtgctatataaaataccgcagaccgggtggcttaaataacagaaatttaccttctcacagctctggaggctggaagtgcaaggtcaggtgctggcagggctg

SEQ ID NO: 105543 - DNA, 1031 bp, Homo sapiens
atggagttagggggccccgcagggatggggcatacccagagactagcagttcttctaccattcctatagggaccagaggggagcagcattactggaagccagcaagagctggcctgaaacctcactagaggaacacaggcagtgccaggggcatgaaggccagagaaggatggataaagatgaatctcgggctgggctgggggcaggtgcagaataatcagcagagctgtgaaggtctgtggtctcttagagccttagcttctgagatatgggaggcatacctacaacttggtgccagggaaggtgggctcagccacactttgtctccctgcctcccaggaccttaggaagtaaaccatgctttcaccaagctgacaagaaggctttgttggaatcttatgaaatgagctcatggccacatcctaacttgggggcagagccaggtctgatgagagtcacatggcatccagagcccagtttgggtgctgagcagatcacacaagatcatagtgtgtcatcctcacagcctgggcttgttttgttcccaggatatgtggccgcatcttctgttactactgctgcaacaactacgtcctgagcaagcacggtggcaaaaaggagcgctgctgccgagcctgtttccagaagctcagtgaaggccctggctcccctgatagcagtggctcaggcactagccagggagagcccagccctgcactgtcaccagcctcacctgggccccaggccacaggaggccaaggtcagtctcctgctactactgcctactatgttctctaggtgccacttcctcccctaccgatgttgtggctagttagtgctaataagctgaattcagtgttttctaaacttaggtattaaagaggtgctaaaatatattaccaccaacttgagactttcattttgatatattaggattgaaagagaattgaaaaaggaataactttgccctgataagattcagtgtgatttaacctgaagtctatgtacctgttaatgcacattcatgaaat

SEQ ID NO: 105544 - DNA, 1091 bp, Homo sapiens
gttggaggtgcgggagaagcagctacgggagcgcatgcagcagctggacagagagaaccaggagctgagggcagctgtcagccagcaaggggagcaactgcagacagagagggagagggggcgcactgcagcggaggacaacgttcgcctcacttgcttggtagctgagctccagaagcagtgggaggtcacccaggccacccagaacactgtgaaggagctgcagacatgcctgcagggcctggagctaggagcagcagagaaggaggaggactaccacacagccctgcggcggctggagtccatgctgcagcccttggcacaggagcttgaggccacacgggactcactggacaagaaaaaccagcatttagccagcttcccaggctggctagccatggctcagcagaaggcagatacggcatcagacacaaagggccggcaagaacctattcccagtgatgcggcccaggagatgcaggagctaggggagaagcttcaagccctagaaagggagagaaccaaggtcgaggaggtcaacagacagcagagtgcccaactggaacagctggtcaaggagcttcagctgaaagaggatgcccgggccagcctggagcgcctggtgaaggagatggccccactccaggaggagttgtctgggaagggacaggaggcagaccagctctggcgacggctgcaggagttgctggcccacacgagctcctgggaggaggagctagcagagttgaggcgggagaaaaaacagcaacaggaggagaaggagctgctggagcaggaggtcaggtctctgacccggcagctgcagttcctggagacccagctggcacaggtgagccaacatgtgagtgacctggaggagcagaagaagcagctcattcaggacaaagaccacctcagccagcaggtgggtatgctcgagcggcttgctgggccgcctggcccagaactgccagtggcaggtgagaagaatgaggccctggtccctgtgaactccagtctgcaagaggcctgggggaagccagaggaggagcagaggggcctgcaggaggcacagttagacgataccaagg

SEQ ID NO: 105545 - DNA, 1023 bp, Homo sapiens
cactcagttaacagaagcaggtgcggttgtcattgttggaattgtgattgtcactactattatttgcacatactgggtattctgatcctgcgcttacctataatgagcagtaggattatagtgaagaacctgaaatgtggctagaataaaggtaaagctttctggaagtcagtattcagggactgaattgattcatccacacagcaaacatttgttgtccagctactatatgcaaattactagccctgggtggtggacagacaagggtgaacaagaaatgtgcccagtcaacaagcattgtaaagtatctgtgagctctcaggacatttcaacactccctgacttggagttatatctcatggatacttacatacccttttatgtttcagaggtgctttgtatcactgaccacttgctcctcatgcttcctggattatttctgcttctctgtctgagtttagtcactatctggttacatgttcctatttgttgtcttaaagatgctgtgacagaactaagcaaagaatttcaggaagcaggggaacccatcacggatgacagcaccagcttgcataaattttcttataaacttgagtatctcctgcaagtaagtgatgcctgtaatgtgttgatttttgcactggtatctcttttctccctcttgggtgactcatcagcattcaagatatggttcagaaagcccaaggagccagtaagccctcgtggttagattgaaggtcagagcagtccccagtgccagctcaatcctccaagtgtgatcctttggggaattgcaatgttgccccttaggatggctttgagaatcaagaacatcctttagagatttaggtcattgtaaggtaggtcagaaggttactgtatggcaaagatcttaactttgggacagttacatacccctttgggagtttagtgaaagctatagagtcttcccaaaaagacattcgtgtatgtatacacacaatcacgcatttttgcaggcagattctaagagtgtgtggaccc

SEQ ID NO: 105546 - DNA, 1027 bp, Homo sapiens
cactgattccgtgtagcctttggtataaggggatggagagagccactaggtggctttttaaaggaaagtaaggcagtcctatctaaggtgaatggaaagtgagctcaaaaagataggctgcaatatgattgatctaatttcttgtttagccccaaaccaggtcactgtgtctgaatagaagtgtgtcagaaacaaaccagagagtgcccacagaacaaggcccacacagaaaggtcaagccctcctgttgagggaatacacccagatagggtgacctttgtgcccagagcagagttctctaatattgtcgttaaattgtgtctgtatctgcttcctccatggcctccccttcctctgtgcaggtgccaccatggagtctgaccactgctgagcagacagccaccgagggccgaaattctgagccttcctctggacccaggcaggagacatacagacaagaaaggcaaactcaccatggcctccaccaatgcagagagccagctccagagaatcatccgagacttgcaaggtatggtaggttgctgggcaggctgagtttggttttgagggacttgtggcagggctttttgctgttgccagttgaaattcaaccctttcatttttgttcacacaacgagtaattggagtcctcaggtcacatcatattgaaatatttgggtctcaaatatccaccttgtgtaaggcttggaaagcttgcctggtttcctttcagagaactgtaaagccagtttgtaaacaaaatcatacacccggctccaggactgggtctgatttccattagtgcacacatgtgtgttttgaagctgcctgttaagtctttggctaaatcccaaacttctgggctctgatgaagttggcttctttggaaaagaatgttctttctcccactgagcaggaaggacagagacccacctatcttgttttgctgcccaactgggtcctggctggcggatggcccattgcctgggatgcactgtaggtccagtcctgctgcctcccagacttc

SEQ ID NO: 105547 - DNA, 1603 bp, Homo sapiens
aggaaacattttttaaaagccctatagaaaaaaagaagaagaaagaaagaaagaattgggttcagctgcaaataacaggaaaaaaaaatagtggcttaaaccagtgcctctcaaaccatcctgtacacagaaatcacccggggatcttgttaaaatgcagaccgtgattcagaagccctggggctggccctgacgttcagcatgtctaatgggctcctgtgcgatgcccaagctgctggtccacagagctcactccatagggagggcttcagcaagacaggagtgtattcctcagccacaagaaacctggagtctggccctccagactatatccatcgctggtgatgggaccattggtacaccaaacctcagcaacattcaatttacccatctaacaaatctgcatgtgtaccctcagaacctaaaataaaagttgagatagaggaaaaaaaagagtttgttgctttcagcctcttgattagtgagatggaaacaaaccatcaatacacaatgctgtctggcttcctctgtgtggaaagtgcggatagggattgagagggtcctacttgccaaggccacaagtttgggatgagtcagctgcatcatacatcagcagatgagctgtgaggcagggatgctccaatgggcacagagcagccagacccacaacctgccctgaagccactcagagatcacagttcagttacagggtacatggtgggcggcctaagaatggggagaaactggggacctaggacccaggacctggccacactgagtggacgagatcagcttcaggtcccgggaaagttcttcccagaaggcaaaaatgattcctgaagcatatggtcattgtgataccttggctggcaatataatctgtagtccaaaccagggacagtgttgagaatagaaagccaaaatcacttaataggccttaactgatctgtggtatgcattaaccagttgtcggcaagtccagaactgtggaccttctcctaaccctgtgagtggacatctgccaggtaagctggccacaagcagactgcactggaacacttagggtctccattttggcctagatgatcctcaggtcaggattcagacatgttgggcagcatcagaaggacagggtgggtgattgtggtccttgatagcaggcatagggcttcaataaggagtgaaagctcctgtaaagcaactactgactgttgacagtgaacggattcatcagaaactcaactcaggctgggcgcggtggctcaagcctgtaatcccagcacttcgggaggctgaggtggttggatcacgaggtcaggagatggagaccatcccggctaacacggtgaaaccctgtctctactaaaaatacaaaaaattagccaggcgtggtggcaggagcctgtagtcccagctactccagaggctgaggcaggagaatagtgtgaaccagggaggcagggcttgcagtgagccccactgcactccagcctgggcatcagagcgagactccgtctcagaaaaaaaaaaagaaagaaagaaagaaactcaactcaaaccagctttagcaaaaaagggaatctgtgggctgtgtaaccaaatc

SEQ ID NO: 105548 - DNA, 1016 bp, Homo sapiens
agttatattttggcaagtgtagactcccaggagagacttgtaggtacaatctaggccttgaagaaacaaaggctggaatatctgcccatgctttgggcatgagatgctcagatggtgcgtgggtagatctagttgaggaagtgtgggcctggctgttcatgggaagtcttcagtggccttcatggatggccatccagtcctgagtggtcaccctgggggtcctgggacacacctcagtaaagagcaaaggcaacgccctcagggtcccttcctccaagatggccatgtagggtaatggagatgaccagtccacactgataaggagttcctagcaaggcttccttgtgggtaccacaggacaactctgcccatagcaaagatgcttcagtccagagggagcccatgggctgtttgaatttgggagaggtgggattcattacaagactttgggctcttatgtcacatcacatgatttggagaaattagacacaatctcttatttttataccactgtcttgggctaaaataaacaggttgtggctgatggtgttgaagataaataagcttaaacaaataactttggccgggcacggtggctcacacctataatcccagcactatgggaggctgaggcaagcaggttgtttgagcccaggaatttgagaacaggattttgagaacagcttggacatcatgacgaaaccccatctccacaaaaaaattcaaaaaattagccaggtgtggtggcatgtgcctgtggtcccagctactcaggaggctgaggtgggaaaatcacttgagcccaggaggtcgaggctgcagtgtgctgtgattgtgacactgccctccagcctgggtgacagagtgagaccctgtctcaaaagcaaaacaaacagcaataacaatattattattgttataactaaaaaaaaaaaaacaaaaacaagcagcttttgtgactaagaaggaaaatatgcatatagtggcatatttttatatgaatcatctcctctgtg

SEQ ID NO: 105549 - DNA, 1069 bp, Homo sapiens
ccgcctcagcctcccaaagtgctgggattacaggagtgagccactgtgcccagccatgtcctatcttttaaatacacattttgtggggattttccttgagtcctttgtaatttggacacgtcattttaaagttggatgtcccttactgggagtaacatcaaacattgcatgacgacatgcagctgtgaggatctgcctgagaggaggtgttagtgtccactccatggcctcctgtactctctgcctatgactagggagctctcatttccccatcaggcctctgaaaagtctatactttaaaactggctctatattactgttggattattccacactggaattccactggtgatgctgatatcatgtggtcaaatgtgacttttaaaggtaagccagaacttgggataacagaggttattttatgtgaggaattttgcagtttaaaacgcacaggtgataatgtgatacttcccatgctttctcgaatagatttgtaagccttatggacaatcctattgataatgcccaatgtgaagatggcaatgaaataatggaaagtgaacgggatcgccaacattttgataaagaagttatgaaagcctatattgaagaccttaaagaaagaggtgggttactcatatttaaaattatttaaaattagtgtacagacgtccacttatgtaatacatttgttaatagaagtcaaattgacaaaaagtttattggttgaggggcacgttacttcgtaaattatttttccatttaccctccaacacactccaaatgatacatttccttaaaatatcaaattgtgctagtccatttgaatgcttgatgaatcatccactgtttgacagagaggctgggaaacgtgcacttaaaatgttagggttgcgttactaaccatacgtgagtttttaactaaacgatattgacaaaatagtatcctaagttactagaaaaataagatgtcgtttcaaaatccgtttacattcaacttttgaaaaagttatctcacataaatcaagaacacatataaaaatcacaaaagggaaagcacaggatggcc

SEQ ID NO: 105550 - DNA, 1032 bp, Homo sapiens
gtgggcagactgcttgagcccaggagttcaagaccagcctgggcactatggcaagaccctctgtctctacaaaaaataattagccgggcatgatggcgtgtgcctgtagtcctagttactcaggaaggagtctgaggtgggaggatcatttgagcccaggaagttgaggctgcagtgagccgagattgtaccactgcactccaacctgggcaacataataacaccttgtctcaaaaaaaaaaacgaagaacaaaacttagaataagttggttctcataaaggtcacatgtataaaataaagtagggacttcctgttagaatttatttgtaattcatgttggttttcttagctatgatgctaagtccagtgctatgattgtttttacctcttcttaggctagaggagctgcagagctttctcttgtataaaaacaagttgacctaccttccctattccatgctgaacctgaagaagctcactctgttagtcgtcagtggggaccatttggtggagctcccaactgccctttgtgactcatccacacctttaaagtgagtagcccggaaatcccagtagacacactcagacacaggtaaggagtgagaagtaccagagcctgggcagctgtctcaagacccggattagatggctctcgtactctgagaacctgatcccaactcacagaagttctggtgactttttacaggattttggagtttgtggcatatgacacgaggaagaggcatagggttcagaggatttctgcacaaatgcatgctggttgatggtgttgcgggacatatgtccagggcctgtgatctcttgctcagtgctcacatcgctgctggcctggaggggtcagcagatgttgaaaggaccctccctggttgcttcacccttctttaggtttccttaagtgaacctataaaccacccacaactaagaaaaaccatccatgcaaatgtactccaaacagcctccaatctggggatgtggaagtggaattgaaaagtcctggctccgccctcccc

SEQ ID NO: 105551 - DNA, 1154 bp, Homo sapiens
tcaaatattgtaagatatggtaattccttaagctgctccttgggctctagaaaccaggagccgctatagacactgtgctccagttgcaattatcttccccttactggaaattaggtctgagggctttgggagaacagggagtaggtaggcagcttcatttcagttggaaaagatccctgggcatttcaagaaagaatagacaaatcagttatttaaaaatatgacacactgaaggcatgagccttaaaagttttgtttcagattctgtaatgttggacgcttatcacactgaaaaactctgtgatttccagaacctcggggtcatgatgctacaagataatgttcattagatacaccccccaaaacccaaatactaaattatgtttagttccttccccatcattatttacagagctgtttacttcttagttttgctttttgttcttaaaagaccttaaacgacctattcaatggatgttaactttttctgctgacaggttgtttgaagaacctgaaagaactcaatgtgggtttcaactatctgaagagcattcctccagaattgggagattgtgaaaatctagagagactggattgttctggaaatctagaattaatggagctgccctttgaagtaagagataaacatttctgtactacgattcacttttatttggtttatgacatagaatggtctataatatggcaagaagttttaacatatgaaatctatctttattatatcaccttttcctgacatttcaatcaccgtatactggtctttaaaaacttctttttttttgaggtggagtcttgctctgtcacccaggctgcagtgcagtggtgtgatctcagctcactgcaggttttgcctcctgggttcaagcaattctcctgcctcagcctcctgagtagctggttctgcaggtgcacaccaccacgtctggctaatttttgtatttttagtagaggtggggtttcactatgttggccaggctggtctctaactcctgacttcaggtgatccacctgccttggcctcccagagtcctgggattacaggtgtgagccaccgcacctgcccttctttaaaaacattttatactatgtcagaacccgaatttaagttcagaaatgctatcaaaggaaaacca

SEQ ID NO: 105552 - DNA, 1022 bp, Homo sapiens
gaagcacaaattttgaaatcgaatgtatagacagaccttaggggatgttaagttggtatgttgcaaataaataatacacattgtggctctaagtgtgagtctggttttttgtgttcactaggatttaattttaataacatcatgaattcacggcagttttgaaatagggctaatatactgttgtgaagttgacgacaactgcggtgtctttggtttctttttgaaatggctggagtgctggtggttaagttttatgctctcgtgtctgctttctcacttcctgttttaaaataaatgcttggttttacacggctttgtgcacacggaggagctagttctgattgatgtcattctttctattttaggagctcccagattcattgaaggagcagacacacctgagagaatggtacataagcaataccttgattcaaatcattcctacatatattcagttatttcaagcgatgagaattctggatctgccaaaaaaccaaatctcacatcttccagcagaaatcggtatgtcaacttagcaggggtcttcgggcctctggtgtgttaagcaggcagctgtcaggcaggtgacagacactgtgcagacaccgtgtttcctctccagcttccccaggaagtggttgggcagggccgtttggaggctccccagagctgcttgtttgcagcatccctttgggtggtgaggtcggcgtctcgcctgtataactcagcacacaggacacttgccaattgctcagaaaccagaagtttcatgagtgagcaatattttatttaggaactctgtgtttattttctttttgttttaaacctataaacgtgcagtatgcttattagaaatgtaatgtattgctcttatacattagtccattgataaatctagtttagcttatgttgtctttttttttcttttccttgagacggagtttcgctcttgttgccccagctggagtgcaatggcacaatctcggctcactgcaacctctgcctccctggttcaagtgatt

SEQ ID NO: 105553 - DNA, 4283 bp, Homo sapiens
gatcattttagcctgcaactaatgatagagatattagggctagttaaccacagttttacaagactcctcttcccgcgtgtgggccattgtcatgctggtgggcgtcccgcccacctgaaaggtctccccgccccgactggggtttgttgttgaagaaggagaatccccggaaaggctgagtctccagctcaaggtcaaaacgtccaaggccgaaagccctccagtttcccctggacgccttgctcctgcttctgctacgaccttctggggaaaacgaatttctcattttcttcttaaattgccattttcgctttaggagatgaatgttttcctttggctgttttggcaatgactctgaattaaagcgatgctaacgcctcttttccccctaattgttaaaagctatggactgcaggaagatggcccgcttctcttacaggtatgagctaatcttgaatgtgaactttttttgattgctagagattgccagcttaggaagtaatgttctacacctgtcatttgatttttctcttgctcaagccttaaaagagctgccaaccgcactgctgtttttcctgaaagacctggaatttcacatggttacttctaactttgccattggcttttaacattttcgtgttaatgttaattttcattttatgttaatgactctgcctatgaaatagtgtttctttattcttgtacaaataaaggtcagtactacaaccaaatttaaaatcttccgaaaagattaaaggtataagcagattcaatacttggcaaaactattaagataatagcaaaaaaaaaaaaaaaaacccacattttttacctaaaaaccttttaagtgattggttaaaatagtttggccgggtgcggtggctcacgcctgtaatcctagcactttgggaggcagaggcgggtggatcacctgaggtcaggagaccagcctggccaacatggcaaaaccccgtctctattaaaaatacaaaaattagccaagcatggtggcgggcacctgtaatcccagctactctggaggctgaggcaggagaattgcttgaactggggaggggaggcagtgagccgagatcgcaccattgcactccagcctgggtgaaaaaccgaaactccctctcaaaaataaataaataaatacagtagtttgtaaaatgattcatcggtaacatgggatgcagctattttttaatccttatatgaaaattgtatgcaggggaaaacatgtgaaatagaagataaaagacatatacctacttaaaattaggtacttatgtgaggacagggcctaagaaataataatatatattaaaaagacttggatattggtgactttttttcaacatttttctttgttacatgaattagccattaaaaaaagaaagatggtgctctacaatttcttttcagtgatctgtggtcttgtccttgtgatgagaggacctgggtgttaacttgtaaggttttatttcctttgtttggctaactcatgtctgacttcctcttcctagtgtgatttggatcatggccatttctaaagtctttgaactgggattagttgccggtgagagaccttttgttcttttgatcactctcaatttttatgtggcctaaaatacagactccatgaattgattttgtcgttaagggctgggccatcaggaatttgctcgtccatctcggggatacctggccttcagagatgacagcatttggccccaggaggagcctgcaattcggcctcggtcttcccagcgtgtgccgcccatggggatacagcacagtaagaactgcctgacttcgatgcttctgccctggcccttcatgtgtctcctgagtatctttccaacactctttcacctaaaagggcacctggttctggaactgtgcaggtgctggactgcttttggttttggaagtgagacaaggattgtgtattttacttccctagagtgcagttttcctcccctgagtccacttcacactggggaacccagaaccaccactggcctatgcatgaaaatgacttctctgctcaaaggcacagagacttactctgatacaacacattggtgttgtattaaccttcgcttacaggaattgcccttgcacttttccatccctacaccctcagtcatctgttcttacctttcaggtaaggagctaaacagaacctgctgcctgaatgggggaacctgcatgctggggtccttttgtgcctgccctccctccttctacggacggaactgtgagcacgatgtgcgcaaagagtaagcaattcagaggggcggggagccgtggagaggagagagaaagggaagtggaaatttcagacccaaggctatcgccttacctgttcattctcaggaactgtgggtctgtgccccatgacacctggctgcccaagaagtgttccctgtgtaaatgctggcacggtcagctccgctgctttcctcaggcatttctacccggctgtggtaagcggaggttctcctctttcttttgccctttgaagttacgtagttgccttggggggtgcttagttagcaggctctccttgtacctcttgtcttgctagagcctggcagccaaagttctgcttataaaagcatcgcagactcctgatgagatagttgccttggcctctttgatatttatttcctcgggaacctggctagtcctgctgcctttcagatagagatgtatttcaagtctatttgacattttatggtctgaacttctattgaggaaaataaacaagtctcggtctcttgttaaaccaagagatgttctctggtgttcctttcctttgggtagggggacccaaaccaggatgggcagctcatttagagcccaccctgacgacaaattctatcagaggcttggccccttgctagtcctttagaaacttccagagtcctaaaagtccctggtaaccccctccccataccttaccatgactggtcacagaacccttaccatgactggtcacagaaccctttcaccttcttgatttttactgatttgaggaatacaatgaaaagaagggcagcacctggagaggaaaagaggcgacagtcctctctccaccctagcctgagccaggtttctagggccccccaaattcagagacctattatagttctgggccttggagatgttagaaatggaaaatattcaagtccaggaagtaaatgaaagcaaacatttcactgagaacaggaaggaattccccaatccagacagggattgtgtctttgccatttgcatcctgggtgtcaggctcaggataggtgtttgataagtgtgggttgggtgattggatgtgtagggaacatgttctcttcctggaacatggggcccaatcagaatctaaccaggttgtgctcattcctgcaagtgaaggcatcaccactgggctaggttccaggtgtgagtgtcctgagaagagcaggttcacagtagcgtatagatatgccacatttgtgggcagcaggatgaactgccagagaggtttgctttaatgaccaagcatccctaccttccagatggccttgtgatggatgagcacctcgtggcttccaggactccagaactaccaccgtctgcacgtactaccacttttatgctagttggcatctgcctttctatacaaagctactattaatcgacattgacctatttccagaaatacaattttagatatcatgcaaatttcatgaccagtaaaggctgctgctacaatgtcctaactgaaagatgatcatttgtagttgccttaaaataatgaatacatttccaaaatggtctctaacatttccttacagaactacttcttacttctttgccctgccctctcccaaaaaactacttcttttttcaaaagaaagtcagccatatctccattgtgcctaagtccagtgtttctttttttttttttttttgagacggagtctcactctgtcacccaggctggactgcaatgacgcgatcttggttcactgcaacctccgcatccggggttcaagccattctcctgcctcagcctcccaagtaactgggattacaggcatgtgtcaccatgcccagctaatttttttgtatttttagtagagatgggggtttcaccatattggccagtctggtctcgaactcctgaccttgtgatccactcgcctcagcctctcgaagtgctgagattacacacgtgagcaactgtgcaaggcctggtgtttcttgatacatgtaattctaccaaggtcttc

SEQ ID NO: 105554 - DNA, 1020 bp, Homo sapiens
tgcctgcaggtacattgagtcctacacaagctgcatggtggtgcaggccttccagaaggcagcaaagaggagaaggtgagcacagggctggtgcactggcccctgacagggtgggagtgcctgagtgagggtggggtcggggaagccccctccccagagcagcaggtgtcacagcccacaactcatcctggaggactcctggctctacaaatctgcactgatccacactggaagagaaacagggaaggcccagtgaggccaggaacagaatccagacccgctctagctgggctggccttggggcggggaaggaggggaatcccttcagggtggatggttgtgatcagcaatcccttcatactctgagatattgctcttaaacctgtgagggcaactcaggtactgtgttgatctgatagggtagaggttttgggcctggggctggccctgggatctgaggggattagctggggcagggaggtggcggtgtgggtgcaggaatggaggaaggggtgaaggtggtgcgtggccctctctacacgcagcgagtactggcggggccagcggaaggcgctgcggcagctgctttcaggtgtgagctcagagggctcggtgggcgcatcgctgggccaggccctccaccagccactcgcccatcacgtgcaacagtacgtgctcctcctgctgagcctcggggacaccattggggaggtgggtaccaggggcagcagcatgtggggaagccgagggaagggagggatagggcccagactcagggggctcagcctatactcaggaaccctagtacaagaaggactcagccatgccggcaggtgggagagggttgaggaagtcacaggcctgtcctgtggttttcaggggacatgggggacgtggcccagccctgaggagggggtccgaagacatggttctgtcctagggaatcttagtgggtgaaagcactgcccttccctgcggtgtctgaggcacgtggccctgccctggtagagccagcagaga

SEQ ID NO: 105555 - DNA, 1044 bp, Homo sapiens
ctgtgctgtgtcttcaactgtcgtgtgccacggacccggaaggagatcgaagcccggtacctgcagcgaaaggcagccaagatgtacacagacaagctggagactgtgccacccctcaatgagctcacagaagtcccaggaggtgagttggccctggcttgagccctgctgcgccagccagttcctcagtcctgctgcctggagtcaccctgttcctctgctccaaccaaagcaggttcagggaggggccccagccctgcccctggagaccagagcacagaaattggttggcatgaggcaaatagaacgatgagcctattctccagtaggaagaaggaagaaaaaggcagagtgtaggaggttctggggctcttcccctcaggacagtcagaccccaggaccttgtctcaccactatcacatggtctcttccccctgccccacagaggataagaagaagaagaagaagaagaagaaggacagtgtggacacagtggccatcaaagtagaggaggatgagaagaatgaggccaagaagaagaaaggagagaaatgaagacatcctgggcagcttgggctggcgggccctggagctcaagccgtggccggggtccaggcatgttggactctgagctcatttggggaccacagaggctgtggtcagagagggaagctgaggcccatggccacatcctcatggcccatcaggggcaggaaccagacaatctcgtaggtgtcctgccccccagcctaggcttggctcctttcaccccatccacatgggtactgtctcggcagaggtggtctggtgccaccgtccctctgcagatacactgctctccccacccagacctgcctgtctcccaccctttctgccagggatggcagtggctgtgaaggagtaatgggatatggggttacttcagccaccctttctggcacgaaatggctgaagtgcatgggtcagggtgtgaggccacacccagagtagccatgaggaggcagagagggtcactgggggacactgtggcagcaggagggactc

SEQ ID NO: 105556 - DNA, 1054 bp, Homo sapiens
gaaatggaacccccagcccagcagacatcaagctcaaggcaatgggctaccctcatttcacacgttgtgatgaagctgaggctgctgccaggcccggcatgaggccccgaggctcgagctcggggctgggggctgcagggctgggtcaggggtacacagagctaaggccaatgggctagagggtgccggaaagagagctggagtctgggctcctcttgggaatcagagtatatttaagaagccaagggggacctcgggctgttctggtggccccttctatgcccagctgtgctgggaggtcccagggccctagaagatcacagcagggccttctgcctgctgaccataacagtgccagcttctttgcagcttcctcttctaccatttcccactacgggcacctaaaagaagcatctctgaccagaagacaaaggcccaaatagcacctgggggagggaagatgcacagaggcacttccagatggcatcgaacagactaaggctctgaaacctaggcctgaacactaaggtctcgagacaccagaggtttctgagccaggagagcctgctggaaaagcagcctgcagagatttgtgaataaagctgattgccttctcagagccaggcctagaaaatggcctcctgagatgacccctcaggatgcgctattcctggggcatttatgtggagggtgatgcagcagtcagtgacagatggctcaggccaggccaaagtcccctccctgactcttctgccagcctgaattaggatgagatagagggagaaatgggagccaagaggctgaggggcagctgcagtcacctgggcccatcccggaggcaggcacaggactcgggagggacgctgccagctctctgggtgctgagttcacaaggctgcattcatgattttcaatagacctgtgatggtctgtgcccagtgctggggacacagaagagtcaaacctggctcctgacctggacctggatcatcactgtacagggaggagagtgatccaggctgatgaggaaagcgcatgacatggggtcttagga

SEQ ID NO: 105557 - DNA, 1007 bp, Homo sapiens
gctattcaggaggctgaggtgggaagatcatttgagcctaggagtttgaggttacagtgaacaatgatcataccactgcactccagcctgggtgacagagcaagacctcatcagaggaggaggaaaagggaagagagaagaagaggaaagaagaagaagcagtctgcatttccctgcagactaagggcggagcagcttctgtggtcattggctactgggattttctccttggactatgcccatttttctgttggggcatccactttcctctcactgagccacagaaaggggttcccagaggagggagagagctctgccttggctgaagtaggggacatggtgagggtggaaccaggtggaaatgagaacaagttagtgaaggatctgattggagctgagagtgtgttggtgacggcagaggggccagtggtacactgggctggtcggctggggatgctctagggcccgggctgtgggaacagggagagagatatctgggcagtgcttggacccttctgaggcatgagactccagtccacatgtggacagcatcattccatggtgacaggtgaaaagggagcacccctggatgggtgcaggccagtggctggagaggcacgaggtcaggctgggggaggggagggacagggaaagatccatccctcatcaagctctcaccttcctcctcagcctgtggcttttcctacgagcaggaccccaccctcagggacccagaagccgtggctcggcggtggccctggatggtcagcgtgcgggccaatggcacacacatctgtgccggcaccatcattgcctcccagtgggtgctgactgtggcccactgcctgatctggtgagtcaaggctgaggtggggtgggtggagaggtatttggagctgctgtgggcccagtcatcccctccctgccagctgttctgggcccacagtcccagccccagcctcatctgggctccaagcaggtggaggctgagtcctgaaaattccttc

SEQ ID NO: 105558 - DNA, 1003 bp, Homo sapiens
gccgtggcgggtggcccctggggggcgccacgcaggcggggcactaggagcatccccacccagctcaccagaggccgcggcatgcggccaacagggggcgccgtcgtgggggcggcactgggagcgccttccggagagacgcagtcggctgccaccccgggatgggtcgctggtgccagaccgtcgcgcgcgggcagcgcccccggacgtctgccccctcccgcgccggtgccctgctgctgctgcttctgttgctgaggtctgcaggtgagtccctcccgatccctaccccacccgcctgacgcggccctcgccttccacctctaatccgctcgacgtcctccgcaggttgctggggcgcaggggaagccccgggggcgctgtccactgctgatcccgccgaccagagcgtccagtgtgtccccaaggccacctgtccttccagccggcctcgccttctctggcagaccccgaccacccagacactgccctcgaccaccatggagacccaattcccagtttctgaaggcaaagtcgacccataccgctgtgagtaccaggggtgtagactccgtggggcaaggagggtgacagaggagtcttaaggaccttggctggggctaggggagcagaagggacgggggcgagcaggatagaggagcgcctccttctacaggtgttcattgagcactaaacacctgtgggtcaggcctggtcctgtctggaggcccagagctctgggtgtcttgtcctcacaggcctcccctcctgctgaggtagggggcaggaaagtcagaggggcctggggccggctgtgtgttcccgcctcgcctgagctggctgtggggcaggtggcctctcaccctgctccaggccctgacacccatcatgcctctgacccaggctcccagccagggacctctgggatctccagcacagctttcagggccaggctgtgtgagccttcctgtggtgtctccagggtgcacacgtaagacgttct

SEQ ID NO: 105559 - DNA, 1367 bp, Homo sapiens
gaccctgtttttctgactgagatgattggtcagcagaggaggtttgggaaaggacacgcagaattctgcttgagttggagggtgtggggctgtctgagagtggaactgaaaatatggagggagctggctatgtaggttaggagttgtagagaaacttcaggctaaatatgaggatttagtgggctgccatgcagaggttcaagacgtttaacagccactatagtttggaaaatgagaagccatcattttctcagagcatattaaagttttcccattaactttttagttcccatgctcacatattcagttgtcatattcacagaaatctgggtggtggggcctttgaggtgccagaggaagccctatgtgtgcctgtctcctcaacaccttgtagtacagtcagtctgctctgatatagatcctattcaatttctgaagttcgtttctttctctttctctagggagattctgggggccgcttggcctgtgaatataatgacacatgggtccaggtagggattgtgagctggggcatcggctgtggtcgctgagggttgcctggagtttatacagaaattggtgtctacagtaagtggctgattgcagtggtggatcaggctacctgtttgtatccagcagtgttcctcatcttagtcctgcatttggtgctgcccctgggcatcctggtggcccagtgatcaccccagcccactccccttttgtttctgagtctcatactaggcctctcctccaacctcccactccttctcaatgccgtttctgaaaatcccagttggaatccacgggccctctggagatccatacaatagagcacagcagggagactggggcctggaaagtgcccctgcctggtgctctggtcacctgcctcagccatgcctgcaccagggctgtgctctggctagtgggaaggagggggtgaactaattccagctagaggaccagcctccctgccaggtgggccacagtgactcatcagtatctgggggaacatctatcaaagaagagacatcatcaacagtgaagcaagtgttagatgtggttctggtttcagggctcccacctaagactttgtgaaaccagccagctgggtgattgctcagcgtgaaggaggcgttaccaggtccctgcagaggtgtgaggcctgggacttccactctaggctcagttgtctggggctgggagaagttcccctgcagcccagtgtggatccatctgtgagtggacagcctctgccacactaactctcttggggctacccattcttggcacccccttcctcagtgccctagtggccactttcagagacactacaagttgtattgaggcagttatggagtgcagag

SEQ ID NO: 105560 - DNA, 1210 bp, Homo sapiens
cctaatcccttggccctgggcagggttctggctggacatagtctggagtgaggatctgagtgaaaccgcgagggcgacatttcccattcagacaaggaatctagcaggaccggggtccaacaagtcggctcggccatttccaccccctaggcaccggccctgccccctcgtccctcgcaggcgccctggttccagccaacccctggcaggggcgcgagctgtctggagaggggcagccggtatccatgacatgtcctctggcggcggctcccggggcctcctggcgtggcttctgctccttcagccctggcccgggcagaactgggcgggcatggcggcgccacgcctcccgtcccctctcctctcagaggagggcggcgagaaccccgaagcgagcccggctccaggacctgaagcgggccccccactcaatctgtttacgtcctttccaggtgactcactgcgtgggaggcccggaggcggaggttggggcgccaggctggggcaggtgctacctgggagcctgcggtccgcggcccggggaatctgaagcgtggctcgggagccccgggggacatggcctccttcttggctgtcgtcggggcgcccgggggagtcaactcctgtgtctttgagtgagttcttcatcctacactatcctcaccccagtgtgtggccgaacccctctgagaatcgtgggaggagtggacgcggaggaagggaggtggccctggcaggtgagcgtgaggaccaaaggcaggcacatctgcggcggcaccctggtcaccgccacgtgggtgctgacggcaggccactgcatttccaggtgaggagcggcacgcggggctgggggccggccccctcaagcacacacagttccattgccccggcaatttggcgacaaagaaacaaaactcacagtgaagccggagtgcatcggtcgtcttgctgtaggcatgtctaagtcgggcagacaaaccaagtttgagagtgatcaaggaagggtttttggtgatggcgatggggtggtagggacagtggcccgggaggttgaggccagtttcagaaacattggaaatgtatggaaaaggcacaaaggatgtttcccaggccttctcttagaggcatctcttccacagccgtttccattacagtgtcaagatgggagatcggagtgtctataatgaaaacacaagtgtggtggtctcag

SEQ ID NO: 105561 - DNA, 1007 bp, Homo sapiens
aggggctgtgttgtgtggggagtcctgagtgtgtgtgagagtgagtgtgtgtggatgggggctgctggcagtgtgtgggagagagtgcatgttaggggtgagtgtgtcgcaggagtctgttgcatcctcctttcattctctcagcatttactgagcaccgactgtgtgtcaggctctgttctaggtgctgggaacactgcagtggagaaggcagtggaaacctctgccctttgtgtagaactcacacaaaccagacaaatcctgacagtggagtatcgaatggtgctaaaggcagagaaggactgaaagcagggagggctgtggtgtgtgtgtgcatgtgtgtgtgtaagccgggaggtgggtgacatgttaaataatgaggtcaaggattatctgggcaggaaatagttgagcaaagatttaaaggagagaagataatatttagaatatataaagaacttctataactcaaaaaccaccccccaaacaacccaactaaaaaataggcaaaggacttgtatgtatacatttctctaaagaggatgtgcaggctgggcgtggtggctcacgcctgtaatcccagcactttgggaggctgaggcgggtggatcacatgaggccaggagttcaagaccagcctggccaacatggtgaaaccccacctctacaaaaatacaagaattagcccagcatgatggccggtgcctgtaatccaagctactcggaaggctgaggccaaagaatcatttgaacccgggaggcggaggttgcagtgagctgagattgcgccactgcactccagcctgggcaacagagcgagactccatctcaaaaaaacaaaacaaaacaaaacaaaacaaaacaccaaaggatatacagataaccaataagcacatgcaaagatgctgaacatcactaatcattacagaaatgcacattaaaaccataatgagataccacctcacacccattagaatggtttttataaaaaaacagcagaaaataac

SEQ ID NO: 105562 - DNA, 1048 bp, Homo sapiens
gtagattctgggtgtgtcggctgcctgtagccaaacaccctgttgtgaggatgggatttcacttggccttggagtttcccaggagtcccctattcccattttcattccgtgctgggtgtccaggggccgggatggggcatcgctggggttgggagacacacctgactgccgcacccttactgccccaaggtacaagctgagatcaagaaatcttggagccgctggacactggcactggacttcaagcgaaaggcacgcagcgggagcagcagctatagctacggccccatggtgtcccacacaagtgtgaccaatgtcggcccccgtgtgggactcggcctgcccctcagcccccgcctactgcccactgccaccaccaacggccaccctcagctgcctggccatgccaagccagggaccccagccctggagaccctcgagaccacaccacctgccatggctgctcccaaggacgatgggttcctcaacggctcctgctcaggcctggacgaggaggcctctgggcctgagcggccacctgccctgctacaggaagagtgggagacagtcatgtgaccaggcgctgggggctggacctgctgacatagtggatggacagatggaccaaaagatgggtggttgaatgatttcccactcagggctggggccaagaggaaaaacagggaaaaaaagaaaaaaaaaagaaaaaggaaaaggaagcggtgtgtggcttcctgtggcccaaactggggactcactccgagagggtggggctgggagccagggaaagctgtggcgggagggccatgagtcatggaggaatcctcaggtctcacttcagaatggggagggatctggggcctgtggtatccagcagaaagggcccagagtggctcaagtctgcaggggtcacacagcagccaagtggacccatgtggaaatccagcctcagcctccgttgctgccagctgtggagctgctctccacacttgtacctagaccccatgggggacccaggctcctctgggccaactcttctgactgctgc

SEQ ID NO: 105563 - DNA, 1007 bp, Homo sapiens
ccacctttgccttagctcagtcccttgtgttgggtgggtttgtgatgctagtccccctgcctcagtgggacagggaatgatggtttatgctgggtttcggagggtacagaaggggaatgtcctggcctcttccccagggcagccccctccagcaaccgagcatgactcctaatgccagagggctgcaagaggggaggggacccaatgccacatcaggccagccttcaccttcctgcttctccctgcctccctgctccagggacctcaagagagatgtggccaagaagctggagaaactaaaaaagcggactcagagggccattgccgagctgatccgtaagtgcagtgcctgggaaggtggggtcctgcccactgggtggtggcccaagcaccgggcccctccccaccccttctgtctgccatccatcccaggtgaaaggctgaaaggccaggaagacagcctagcctctgcagtggatgctgccaccgaacaaaagacctgtgactccgactgaggcatgccctgccccaccactcgcccatcaggcctgtcctgcagaggatggtcttgggcagggatgggggctaggcttgccatcacctccagtttggcttctgagcagagactccctgcccatcaagtctgaaacccccatggatgaggtcagctccttgtctgctgggtggcccctgccattctgaatggaggcagaaccagcaacaactctgggcgtgcctgtgtctgcacatgtggatgtacatatgtctgtatatatgtatatattttgaactttctaaaaaaaaatctggaaatagaaacaagtaaacccctgtgtgtggcagaaatgtgtcagatatttcctaggtctgagggtgcagtggatttgggctccacaggatggagacagggtgactgcagagctggtacttaatatgtatgaataacccctgtgttgggctgggcatgttgaggccggaggggtgggaaacactcagggctgccttct

SEQ ID NO: 105564 - DNA, 1118 bp, Homo sapiens
tccagttgtgcctatgagatgcagcaggcgtgtaccctgttggagtctgggacaccaagctgggccctgccaggtgccccccttctgagatgtcctgttctttagctccctgggccacgtggactggaagtaggagctttcaactgagctggtggttttctccctttctttgcaggacaaggaagatggggagccaaagaccaagcatctcagagaagaggaggaagaaggcgagaagcacaggtaatgcccgtgtgcagctccagggtctgctctctcctccagcactcatcggtctcccagtctctgggtcctcccaactctgttcagtgtctgccctgttccctcccctcttctttctgcccatggctgtcctgttcagaccttaaaatctcaacatctcagaaggcccttgtcgaggccttctctgcctcctttccctcattttccatttggctgttactcagcccccagcattttctttctagcccttacattatgcctttttacccttctcatacaccttttgtggcgtggttctccattgcctactgagtaagtgccccttctgcacttggcatgtgaagctctgcctggaccatctagcctcatccaacctcctctggtttccctctagccagagccctttgtggtcggcccttgccacctctggccactcagcatttcctgaccagtcttttgtccgtcctctcagcctggaggtccttctcatctctcctatacctttgatgtctgggtcttcacatagagttcagctcaaagggcgcctttctcgttgtctgtgtccctctggcttcatttccctctgtagtatttatcttattttgtcgaatactctcatctggttgggtccacttaagttgcctaaacacagcacacgtgagggtcttgggtacacttccctcgtgattgcaggcacaaggtcttcccccgcagtcttgagggctgcaacctccacagagcctcagatgctgctttgcctcccaaaaatctggagcctggaaactgttgccggaaccagtgtgtggggtgagcgaggcaaagctgtgctgctgatctttgtgagcagagtgtctgactaccactcccgtgtcagc

SEQ ID NO: 105565 - DNA, 1046 bp, Homo sapiens
ttcatggtgcagggtcatgcgggaccctgtaccacatggtggacccaagttgccttgtataatcctcacatgcccctgttaaagtagtgccagccccactttgacaggggaggagacagagcctcagggaggtcccaccactggtaagcagtgtgtcctgatgttcccaccacctgcccagtccagggctgcaggctgggcttcctgcataccacagtgcccctacagggaggaccctggagggagtttggagccaggccagacttcccagaggaactcgtccagtctggctgcatatgaaggaaggggaagagactggtctttgccctgccctctgtgtgacctttcaagaggttatttcctgctggggccagtgtgggtgaagtctcagggcagtgggaggggccttttgcatactaatggttctggttgttccctctgctctcttccccctccgtccctctgtccccactgtcactcatcctttaaggtgacacttcctttggaaagcctctgtagacacctcttaatgccacccaaaaaaacactgccttccctggctgttgacaccttcccttttcccctgtgggtcaccacccccttgagaatctgaagagctccagatttctcatccactaagattcaccttctcacactcgcctgtgtttctgtctggtcattgacctctggaatctgtgcaccgaggataagaacccctgccctgctctgtgggcactaggtgcctactcgttcctcttcctcctcagtacccagcatggagtatctgagtacagcatggagtaccacaggggagccagtcagtatttgtcgactgataaagtctgctggaggagctctgtagtgcctcccttgagcacttgcagcaagaataggatcagagttgacttgggctggctccccacactcctgacagacacatggaggatatctgggcagggccgtgtgacgggcctggcgaggagctgcactaggcatgccgtggcctggcccttgaggtgccatatggatggtggggcccagcgtgc

SEQ ID NO: 105566 - DNA, 1052 bp, Homo sapiens
cattggttggcttatgagtagtgtccccatttgggctttgtcccaggctgcataactcacaagacagagcctgagctggtagaggtgctgagaaaacacttgagggattgagtggatggcatggagagtgatagctgtttccaggtgtgaaagaggtggagggattttaggcagaggaggggcaggagcagaacaggcaggcatggaggtggtctgaatttgggaagatgatctgtggaaggcccttcttccttgccacctccctgtccccccacactggctagcgttttctgacttggattcatattctctgcacacgtgtagggtctgctcttctcaactgtggtagctcgagggcaagggctggggcttcctccgggtgacactgatggctgctctgggtgaactgagggaaggaacaaggcatgaatgtggggatctgttatgtgacccctttgtcacgggatgagagggcctcaccccgaagacacaggtgagagtctcaggctccaccatcatcatcactgtggttggcgcctactgactgaggacgtactctgtgccagccacagtgtagggctgtcactcacatgcgtacccttaagtcatgccatctagcagttgaagaaactgcagctctgagaagctaaactggcccagagtaccacagtacacagttgttagtgctgggtattgactcctcatgtggttctgctttctcaacctttccatatgctgagcatgtggatttttaaaaacgctttgtagctaaaggaagtgtgtgtaggtggggataagaccttgtgaagcagtatttccccccacaaaaaaatgtgccagttctgacttgtttaaatttggtttaattaggatttttatcacttgtagatcacaccagagagcagacagctgtcttacctttacttctcagattgtgacactccaagaagcagctgaccagaggttaaaatagcttctagtctaggagcttcagcacattttgttgctgtgtaaacctctgacttgcctggaaattgacttgtaaagaattt

SEQ ID NO: 105567 - DNA, 1125 bp, Homo sapiens
gagtcagggcattccaagaggccagcatggagtgattagtgtggttagtacttgggcaaaaccggagcgatcgacgcactcttttctccttctctcaggtctgaattccacttgctgctctttcactgatcagcgttggataaatcgagccttagcttttttttttttcttttttttttttgctggctccccacccactaggcaagttgtccggaagaataagggcggggcggggcggggcggggcaaggcggggagggctcgcccataataaccccgcattgattggctttcaggacctcccagtctctcattctcgtccttggattggccgcgagacatttatccactctccttaggcctgcgcgatgcaagacgggagaaaaggaggggcgtacgcgggcaagatggaggcaactacggctggtgtgggccggctagaggaagaggcgttgcggcgaaaggaacggctgaaggccctacgggagaaaaccgggcgcaaggtgagaagtgtggagtgagggtcgcagttgaggcgtccagcgttcggggtccgggtcgcgcttgaggagagcaaagggctaataaggaaagacagctgccgagggcgcgcatgcgcgggcgctaacgcatgcgcgagaagacggcgccctcccacgatgtctggggctgcttggcgtgggactcctctggcgctggtgcggtcgtcgcgcatgcgcgggggtgggcaaggcagtggtcagcgacccgcagtccatctgactcctgcttcccgggtgttgctcgtgtaggtatctagggctgcctgtaggttcagatgcttgttgggttaggcgtgatttgttccgttcctctatggcctagctggtctttaacccccgccttcgattctgagtcagacagactccccagtccggcagcactccttggacagggcagcaagtgacagcagtgggtatacagccggagtcgtttcgtgcaaaaatcaaaaagaggccgggcacggtggctcacgcctgtaatcccagtgctttgggaggccgaggcaggcggatcacttgaggttagtagttcgagaccaggctgggtaacatggtgaaaccccgcctctactaaaaatacaaaa

SEQ ID NO: 105568 - DNA, 1049 bp, Homo sapiens
tcttgcctcctgtctagaggaacaggcctccagcctccccttggtgctgctcatagaacaagtcaggaaaatgatctcaaacccagggtccctcagcaccaacctgggagtcttaggtgtgggggaaactactgaatgtgtcacttaaacttactgttctccagctaaggaagttgataaaataccaaggtaaaataatcagcaaggtaaaataatcagcaaggtaaaataccttccaaacatgataaagccagcaaatggtagtaggcgcaggatatgaactctgatctgtgcctccagagcccatgcatcctataggatcacactgcctgccatcccaggtgctgcttggagaggcccctcccacagcctagggacccccaccccttttctgggcctctgcctcatagccacccactcaactgtctcacaggcccaaggagccagatagagccagcggaaaagtccgaatcacctttaatatgggttacaaaagtagcaaaaccagctgaggcttaataagaggaggtggagtagggatccaaagggcagaaccactcctcactgcccactccccaccatatcctgggccctcttctggaggggatgggtggataaggggaagtgaatggtggctggatcttcggttttcttccccagaacagagcaggctgagcccagcaaccccaggaagcccacaaagggaaagatatatgagatgggggtaggggagcaccggagcagtctccgagagtgcaggctatggagacagcactcacaccacagaacagccctcagcttgggggcccaggacctggaccacatcttcctggcccatggcaaccagggcattctctagcaccttgtgggtggcaccactgtcttcttggatagcccagtccctcagcagtgtgtaggctcacacctggccttgggccatgatttctacagcctcagcttggtagcccagatggtctgccagtccccgccagcccttgtcaggttcacgtgacacctctaacagccgctccactttctcctggtgctgc

SEQ ID NO: 105569 - DNA, 1010 bp, Homo sapiens
ctttttttgggggggggtgggggaggggggtggggagaaagggtctcgctttgttgcccgggctggaacgcagtggtgtgatcatagctcattgcatccctgaactcctgggcccaagcagtcttcttgcctcagcctctggagtagctaggactattagctaatactttttaaaaatttttgtagagacacagggtcttgctatgttacccaggctggtcttgacttccaggcctcaagtaatgctcctgctttagactcccaaagtgttggacacctggtttgaaatgctcatttgatgtttgggttccctagcttcccactgtgctccctaacactggggttggacactagaggacaggataggacccctataaaagaggtatagtgcacaggttatgatgatagtgaacatttccaggaagatgcagggcttggtgagagacctctctcccacttgttggatcagttatctaggcagtgaggaaggctaagggcttcaggccagactgggcccatctttgcaaaaaggttggtcccacctgtttctcaccagggttattctgcctgctgcagcagtgttcttgaggtcaggtcaggttgtggcctgccaaatctttggcagggtgagtagcaattagagcagtcactgcctgctaggcactgtgctgagcacttagagctcaggttgtggtcacagtcctgaggcacaggaattggcactataatgaggaaaactaagggtcagagaggttcagtaactcttctaatatcctcatattaaaggaagtgttaaaagaggggaaaatccttattttaaacttagacatgctattgttttctcatgatactgcagccttcaaaactgtaaagcactttttttttttgagacagagtttcgctcttgtccaggctggagtgcagtcgcacgatcttggctcactgcgacctctgcctcccaggttcaagcgattctcctgcctcagcctccctagtagctgagattacag

SEQ ID NO: 105570 - DNA, 1436 bp, Homo sapiens
tcctgtggttcctgggattgctaagcctcatagaagctctggaacacctgctgtgctctgccttgcctccagggcccagagaacccagctactgtctttatgccaaggacacaaaattcattgactgaaacctggggctgctgaaggactcagcattgaagtcatgctgttgagtccctccagcctcctttaaggcttgcttagtccatccaggggagctctttccctctcaggctgagcccgtatccttttctcagatcttactggcttactagtattccactgtccaaaccagttaacctgagggaggaaaaggagaaggattggctggctttactcactaccttttctagttatttcctcagtacaactccttgccctctctggactgttgagcaacgtgttctcttttctctgcctgcagatgtcccagttcatcgtccagtgcctgaacccttaccggaaacctgactgcaaagtgggaagaattaccacaactgaagactttaaacatctggctcgcaaggtactccccttgcttttggtagcccaccaggcaatgttctgggcaaactgtgtaccttctaagaagcccttttcatcatagaaagtatttttttttttcttgtcagatgtcagagctggggacccaggaacggggagggaaggtttggggagggatgcgtaccttacatgacagcagtagttctctaagaaattttcagagctcagcttgtcctttctggtgatcatagcaccagcctgccccaacatctacccccttattaacttcctgtcttggtgagaagggccctgaagcagcaggctggattaccacccctgtcctccccctcatataatttctgctctgattggtggctgtggtctctcttcctgtgccctggacagctgactcacggtgttatgaataaggagctgaagtactgtaagaatcctgaggacctggagtgcaatgagaatgtgaaacacaaaaccaaggagtacattaagaagtacatgcagaagtttggggctgtttacaaacccaaagaggacactgaattagagtgactgttgggccagggtgggaggatgggtggtcaggtaagacagactctagggagaggaaatcctgtgggcctttctgtcccacccctgtcagcactgtgctactgatgatacatcaccctggggaattcaaccctgcagatgtcaactgaaggccacaaaaatgaactccatctacaagtgattacctagttgtgagctgttggcatgtggttagaagccatcagaggtgcaagggcttagaaaagaccctggccagacctgactccactcttaaacctgggtcttctccttggcggtgctgtcagcgcacagacccatgcgcatccccacccacaaccctttaccctgatgatctgtattatatt

SEQ ID NO: 105571 - DNA, 1102 bp, Homo sapiens
ttataagaaggagagccaaaccatgtaacaggatttgaaacataatagccaagttgactccaggccttgtacctgagtcagggcctctaaacggattctaataccaagaatcaggtatccctgctaggggaaagaaaggagggttctgggacagtagggcatcactaaactgacttctcatgccagcaccactgtgttttctcctccatttttaggcctcgaaaaagcccaagacagcagaagcagacacctccagtgaactagcaaagaaaagcaaagaagtattcagaaaagaggtaaggtttggtggatataagcactaagctcctcaggcttaaatctgaaccctttcatttcttgtcctaagtatgtcgaatatctcctttgccccaagataggcaggaacacaaggtgttccttgtgtgtatgtcttgctgaagtgcttcttttagcactgaaaactcctcagccatcttttcttggcttgacaggagcccctctcagaccacatttgcttgtttgactgtgggccttctgtagcatctatggcaaaagaaagctgtctgtagtggtaggctgccttgtctttgggtattcctcttgcttctgtgatttgacttagttgttatgtgaatgacacattggtgaaagaggtgtggcctttttcaactggttaagcacttcagtacccattgactcattttgtccccacaacagcccttgaggtaggcaagacagattgcctttcctcttattcaggtgaaagaactcttaaggttcagagaaggcaagttctagacaaaagatttgaactcaggcgttctggctcaaagtccagttctctttctgtaatatctcatttggtagctgcctaattctccagggcttgggagaatgctgctcctttttatgctaccagaagtgtgtcttaccaaccatcaagacactaaacttgtctgcttcatagcatctaggttctaaactccaatcttcattcactgaaggggcttgtagtgttttggaagaaacagacctgtaaataagtagcgacagctgtgtgaaaagtatgccatattagggctgggagccacaatctgggcag

SEQ ID NO: 105572 - DNA, 1015 bp, Homo sapiens
taggaactacgactggagatgctggggaatcttgccaagactgaaaagcaggattgagggtttagcaaacaagtgagtaagggagtcatggatggcctgcaccctcattcttagcttgggtggataagatcccatcattcagcctagggaatgaaagaaagaggaggaggaggtgtggagattaagttcattgtggagtttgagctccctgcagtggctgctaggcaggcaaatctgggtttgagtcatcagtaaattggtgcttgttggagacagagctgtatggagtgacatagggaaggcatataatggtcagataattctttgaagagtgctgtctggtagtaaaagcttttgatgatgagactaaacattgtgagactgttccttttctcttttccatccattgttgttcccttcattgtcttgtactcaccatcaagataagtgtaagtggtggtaagtgtaaagtgtaaagtcaggtcttccctttgagcacctctgacctgaattattactacttgcacaattgaggcagcagtttatttactgctgcctcctggcttttaattaacagtcataaggtataatagatctcctctaactatgttatgttaaaatagtagttttagagtatttgttgcattgagggagttgcagagaggtggcatcaagagccaatgtatttttcaaacggggtcttgctctgtcgcccaggctggagtgcagtggtgtgatctggtctcactgcaacctttgcctcccaggttcaagtggttcttgtgcctcagcctccgaattagctgggattacaggcatgcaccaccaggcccagctaatttgtttgtttgtttgtttatttgtttatttgagacggagtctcactctgtcgcccaggctggagtgcaatggtgtgatcttggctcactgcaccctctgcctcccaggttatagcaattctcctgcctcagcctcccaagtagctgggattacaggcgcctgccaccacgcctgg

SEQ ID NO: 105573 - DNA, 1059 bp, Homo sapiens
acgggtgtgagccaccgcgcccagcctttttagatcattcttaatctgcttctgatttagaaactataataagtctgaattcattctaatgtcatagaaaccattttagtgttttgttcaagtatctttttttcctttaatactgcagagatttttttttttttttttaagagacggagtctcgctctgtcgcccaggctggagtgcagtggcgcaatctcggctcactgcaagctccacctcctgggttcacgccattctcctgccacagcctccggagtagctggaactacaggcacctgccaccacgcccagctaatttttgtatttttagtagagacggggtttcaccgtgttagccaggatggtctcaatctcctgacctcgtgatccacctgcctcagcctcccaaagtgttgggattacaggcgtgagccaccgttcccggcctactgcagagatttttaatctgtgatccataattgaacttcaggagatgtttagaacctctaaaattacatgtaagactatagcatttctggggtgagggtccataaatataagcaatttctctaacaggggcgtgtatatatctgggttgagaaaggaatgaactgtggttcaaaaagtgtttctagatgatttgggtatcaggagggctcctactcttagctttgtagtgaagggtgggtaaggctagaaaagaaggtggttgggggaccaagtttaaatagaggcagtgaactaggaggactttctaggtatggcacttactgaagaacaacatttacaagttgccttgtgagtagctatggtctttaccaagaatacacccataatgcacaagagtctttggtactatgcctaggactttttctgaggtattttatcttttcttcttcttttttagttttaaaaacaggctatttctgcacatgaggcaaaatatgaaagacatacagtgaaatgtttcctccctacccttggcttccatctgatttccttgaggcaatcaagcagtttcttgtgtagctttccagagataatttatgcatatta

SEQ ID NO: 105574 - DNA, 1031 bp, Homo sapiens
gcaaaaatggtctaaaatttattggtccattttttaaccaaatactttcatctaaatcaagggttggccaaatctgccccactgtctgtttttgtaaataaaattttctttgaaacacagccatgttcattcatttatgtactatcatctgtggctgcttttgtacttcagtggtagagttgagtagttgtgagaaagactggatggctcacaaagcctaaaatatttactatcttgtcctttacagaaaaagtttgccaacatctgatctaaaagataaagtgcagaatctggctgctctaaacattctggttttgaatgaagtcattttcactttactcttttgggtgagctcttaattctgtttccctaaagacataatgatcatgtttctattgctgcccatgaaattagtttttttaaaaaagtcttgatgctgtttaggaagtgatttggttgtacaactatcttgagaggtgggagggtgtatacattatagaatttccaagctagaagtgatcattaaggaatattgttattcccttaggactgtgaccaagtcagaaacttgagactgttttagtatagatgtaggcagtataatttaagtcttatagtaaccataatgaaaacacatacattttccttcttaatactttaaacttttaattatgatataatttcaggctcaatgaaaaactgcaagaacagcattctgtacatattctacatgttacacacattctagtgacgagtctagagaaaattcagtgaaaaattcctctaaacttttcactgagattccccagtgttaacattttaccttattttttttattgttttctgtttctgaactttaaaaaagtaagttacagcagaggtgggcagatcatttgagcccaggagttcaagaccagcctgggcaacaaagcaaaaccctgtctctacaaaaactaaaaaattagcgaggcatggtggcacatgcctgtagtcccagccacttgggaggctgaggtgggaggattgcttga

SEQ ID NO: 105575 - DNA, 1088 bp, Homo sapiens
ttgtaacttgaaccatttccatctagcttctcagggcagcaaggagcttgttaacatcaccagctgaccatgtgtctccttttctcaactccatttccaacttcgtgctgaagaaaaacgagaacctagcgtgcattctgtgaagaaacaggaagatggttgggaagttggatgatgcatgaaaaatataataggtgaaaagaggacagaggtggttaactcactggcgccggcgttattttggtgcgtccattgccgacaatggatgtcgttccgggaaaatccctactcctggcgagaaaggattaagtgagctactttttctatacctatatacacaggaccactgccttgactccacaaggcttacacattttgactcctaaagtagacctcaaccagaaacatcacctagcacattgccacttgtgagcatgtattcattttcatgtgaaaatttactaggctacattttcagcagggatatgtgcatatatttctgtttgcagaagaaattgttgcatatcacccttcatgctgaaaatataccctagacttcatagggcaaaacagctggttaccagtggtgactaagtgtaacttgactggaatatcttcattcatttggatcataagaagaggaggtaaggttcctgtgaacttggcaatttcatttgccattaaacaccgagagattgtaatggttagtgattccagagcctctcttataaacacttagattataggatgtgcatttctccttagaatgaagtctgggtatttccatttgcatctggatttagatgatttagggacaaaattacctacatgtgataagttgaactcttcctaatgactattcttattcttctcttatttcatctttatctcaagacattatctttaattcagcaaatcaagtatttccctagaaagctatgtattaaaactctctatgaaaagttaaaataaaacatagagttgcctaaactgagaagttttgagtcactgtttggaatttcactccctcgctaatattgtatgtgaaatctgctgtgcaacatttgaaaatgaaattatgtttcctg

SEQ ID NO: 105576 - DNA, 3436 bp, Homo sapiens
tctactaaaaatacaaaagattagccaggcgtggcagctagcgcctgtactcccagctacttgggaggctgagacaggagaattgcttgaacccaggaggcagaggttgcagtgagccaagatcatgccattgcattccagcctgggtgacagagtgagactctgtctcaaaaaaaaaaaaaaaagtcaactgtacaaagtgatgtaatttttttttatgtttaatcagattataaagactttggaacacttgcccattcctactaaaaatatgttggaggaaagcaaagtacttccaattattcaacgctggtctcagactaagactgctgtccctccgttgagtgaaggagatgggtattctagtgagaatacatcgcgtgctcatacaccactcaacacacctgatccttccaccaagctgagcacagaagctgacacagacactcccaagaaactaatgtttcgcagactgaaaattataagtgaaaatagcatggacagtgcaatctctgatgcaaccagtgagctagaaggcaaggatggcaaagaggatcttgatcaattagaaaatgtccctgtagaggaagaggaagaattgcagtcacaacagctactcccacaacagctgcctgaatgcaaagttgatagtgaaaccaacatagaagctagtaagctacctacatctgaaccagaagctgacgctgaaatagagcccaaagagagcaacggcacaaaactagaagaacctattaatgaagaaacaccatcccaagatgaagaggagggtgtgtctgatgtggagagtgaaaggagccaagaacagccagataaaacagtggatataagtgatttggccaccaaactcctggacagttggaaagacctaaaggtaaggaagcatcttttgttcatttcaacttgaattactcaggtttagagttctacaaacctaagcaaaattaactactttttttagccatgcatatttctgaaaaatggaatactgtctctcttactgttttatttataagtgtctcaaacatcctctaaaccgtggcaagagtcatattagccaaactaatatacaaatgtcttcttttctgtcacttagaaaagtacatcacaatagtgagttcagtcatttaagtgctcttcacattaaaaacaaaaatcctttgaggagcaaacttaggattctatttgtaatgagaaaaaattagtgtttaaatttattggaaatcagttgtattaatggaaaattaaaaataattggaaaactaagataatttagcagcttactaaaaatgattgaatgtaaatttttattttagaaaaacaactttatggaactagttcgtattcacttctattattgtttctgaaatgggcctgcttttaaatgcctatttctttggacaaaagaggaaaaatagatctggaactcttatgcctattacatacataatctcttgttgaagaatgtagcaagatgtgcagggtttgctttgcagaaaacccagactgagtcttggataaacacaagaatgaataacaggataaacctaggagaggtgtggtacatttcatttgtaagtgatctggacttgggatccacgtcttgaggaccctgtgggaacaggttacttaactagcttctatttttctgttcctcctttcttctgccggagatgaagcaaccaaataaaccagcaatcctgactctttgcagcaagatgaacacctgaatcctccctgcccctaattatgatgacaaagctcactccattagatcctgtgatttgacccaatgaaactggccttaaacactgagcaaaatgagtagttggtggttgtgtactatgcttcctcatttgctgtgttgagacccttctttaagtatgttgtggtttcagcttttgtttacccatttgagctcttactcatgttactttcatcacttacaattcagtataaagtcagccttattatgtcttaggaaatcaggcctttttctaaatatgaaaggaagagttcgtagtaaatttacttatgaagtcagtatgtgaactgcaggaatcagaattgcagttaattgaaagaagtgctgggatagtcacttgatggatttttatttaaggcctgctttgtgacagcacaggagtccctaaaaggagtccctcttgtgtttggaggctgctagtggagcctgtaaagaagctcagttaagaaggtggagatgaagacaagtacacaaatggacacagaaaaggcctttatagctgtacttttatggaaggaagaataagtagggttgtagaccagtagtttacttttgccggagaagtctctggttgatgttattttttaaaactgctaagaagtaatcattgtaaagctatcttaaaatctggaaaaagtaaatattcttgtttcttcgtatgatagtgggtttctgtaattgtgatggtatgaattactctctaggatatacttaacccaattagatgtaaccatggtaatttaaactcacactctggacacacatttgagtcctacaaaattatttcttccccttcttcttatcttccccactcctatctgaaacatcaaagcaattttatatgtagcttgatgatcctcttgatttgaggtttaaaactttatttgtacttaaaatatatccttcttatccttcatactttggatttttcctgattcttagtgtcaagggagccgttaagtaaaattctcctctcttcttcaaactttagtttgctctggaatcattacccatctagaattgtattactgagaaatgtttttacttgactgtgaactgtgatgttttgttatacattggtgctggggttcttaattcatccatcattctaattaacatttactatggctctgttttcaaaactctgattatggtggttcttaaaaaaaccagacaaacatagatagcatttaaccagaagtctgaaatcaggaatccataatttgaacatgttttagagaaacacattgacatgatgtgattactgtatatccatacgatcccggcattgaaagagttaactacttctgtctgacttccacctatgtgttcgagtagacattggctgaaaagaaaatgtcttattcaaccaacctttattaggcacctattgtcaaacactgtgttagttgctgatctttaattccaagatcgtactaaaaagcattggtctaagattgtggttatgtggttatggccatttcaagtctccccagccaaccgggggccaccataacattggtggacatgtgttccgcttggcttttctacacactggatggagtgaagaacagaaagggattgcttcagattccttaatcttggttttgctgtgatggcagactataggaatcatcagtaaatgaaagaggg

SEQ ID NO: 105577 - DNA, 1443 bp, Homo sapiens
tttctgttttggctcattgcagatctccacctagaattatacttgactcatataagttcttgctacgtatttgatgagtgaatgaaatgcatttcaaatgtattataccactttatactttcatcaacagtagacttgttattatcagccttcttaactttttcccccagtctagtactttcccagtttggtcttcatttgtgttttcctgataattgataaggttgagcaactttttgggtttttggtttttttttttgttgttgttgttttataaaaaggtatttttatttgctgtggtaggtggatggagagctagaagctctgatggaaaatggtgagggtctctctgataaaaaccaggtgctcagcttatcccggctaatggttagaattgaaactttggagcagaaacttacctgtctggaactcatacaggtgaacactttaatgtttgttttttatttctggttttgtggtgggaatgaatgaatgaagatgaatgaagaaggaataattctgataagagttagtcttattttatttatttatttatttgtttgtttgtttgtttgtttgtttgtttagatggggtcttgttctgtcatccaggctggagtgcagtggtgcagtctcggttcactgtaacttctgtgtcctgggtgcaagcaattctgcctcagcgtcctgagtagctgggattacaggcgccagccaccacgcccagctgatttttgtattttcttattagagatggggtttcaccatgttggccaggctggtgtggaaatcctgacctcagatgatccacccgtctcagcctcccagaatgctgggattacaggcgtgagccaccatggccggccagttttattttttaaatggatatgtgagttgtgtatgactttcaaagcttgtaccatattatttaaaatggctaaagagttcagtatcatttaatctattagtacagggatccccaatccccaggccatgggctgattaggaacggggccacacaggaggaggtgagtgagcattactgcctgagctccacctgctgtcagagtagcagcggcattcgattctcataggagcacgaaccctattgtgaactgcacatgcgagagatctaggttgtacactccttatgagaatctaatgcctgatgatttgaggtggaacagtttcatcctgaatccatcccccacccagtttgttgaaaaattatcttccctgaaactggttcctggtgccagaaaggttggggaccatggcattattagacctggtttgctttctgtctatattcaaagaatgtggtggctttttttttttttttgtaataattcatcacacttgccatagccttttaccctccagttactagcatcccaaagccatttgtactacgtgatctccaagcacaaaattttaacggta

SEQ ID NO: 105578 - DNA, 1087 bp, Homo sapiens
tagcagttacttttattagagacgaattagagatatatgcaatctggtagtccattaaatgagagttacacttaaatattttagttcttttaaagaaaaaagtctccatgtgctatttgggaaaaccttcattgcctaaagacccacttgcataattaaggcagatgatgatgatctttatatatgcgcacacacacacacacacacacacacacacacacacactaataagttactaatttcttttgttttcaaacatcatctcagtggactgtgaacggacaactgagggttgggttttttaccaccaaactggttccttcaggctcagagttaacgtttgactatcagttccagagatatgggtaagtattgtttctactaattttgctgcttctgatggggaaataggctgttcagatataaggatataaaactttaatataaattacttaaaagttatatttactcttaactcttatctataagatattgttttggttttgtgtgtttttctactgtatgacacttctgacccttaagggatgttgtacaggaactgtataattttctcctcaacttcatatggtctacttgtataattatatttcttatgtaattctgaaaaactttagacatgccaactctttttgtgtctgaagagaatagtacagtattataaattcctctgtatccgttattcagcattaacagttagcataactcataaccagtctatttcatctgtaccattttgtactcttaaatataattggttacctagttcttttttttttttttttttttttttttgagatggactcttgctctgtcgcccaggctagagtgcagtggcgtgatcttggctcactgcaagctccgcctcccaggttcatgccgttctcctgcctcagcctcctgagcagctggtactacaggcgcccgccaccacgcccagctaattttttgtatttttagtagagacagggtttcaccgtgttagccaggatggtcttgatctcctgaccttgtgatccgcccgcctctgcctcccaaagtgctgggattacaggcttgagccactgcg

SEQ ID NO: 105579 - DNA, 1043 bp, Homo sapiens
ccttgtatgttgttttgcttttgtaagttgcagtttcaaagaacctgttgatgactttaagtgaggacttaactgtaacaatagtaagcccattacttattgataaaaataacatggtattatgaaaaataacttttttttttttgagtcagggtcttgctctgttgcccagcctggggtgcagtggcatgatgatagcttacagcagccttgaactgctgggctcaagcagtcctcccacctcagtctcctgaggtgctggaactacaggcacatgccaccatgcctggcttatttttaaattttttgtagagacagggtcttgctgtgttgcccaggctggtctcacttctgacctgaagcaatcctcctgcctcaacttcccaaagcactgggattacagacataaaccactgtgcctggccttggaaaatgattatttaaattttttttttttttttagtgaaaagagttgcatcgctttacatttttataaatctctttaatgtctggcttaataaaattcagttcaattctcatatatctgcctctgtattcagtgtggaaatgtaaattctagggacctaaccccagagctgtttagtttaaccctagggatgggttcagcaagttttaacaaactctccatgggatttggatacacactcaaggttgagacctatggcattgtgacatagcccacactttaaagtgaagtattataccatgcagtgagattaggatgtaatagaatataagaaatggctaaggataaatgggagagacactgataaagataattttgcctatgggcaaaagttaataattagcagatcttccaaaagcatcagttaggtatttgttgctttgaagtgggaagcagtgtgacagttctctgaagcaagggcaaagtggggataagggagtgtgtgtgtgtgtgcgtgcgtgtgcattgcatgtatcttacatttgtcttaatgcttttcctttgtaaaatgtgtaaattttttttgattgggttaatttaattcacagtgtcatct

SEQ ID NO: 105580 - DNA, 1019 bp, Homo sapiens
tctaggtttacccatgaataatcagatttttattattgagacctaaatgtgtttgtgatggactactatataaatatatatatacatccactataaacttctccaatcctgtttttgagctctgctttttaatatatgtgttcttttctcatttgtttttaattgctttattttttaaagtaaaaggatttaatttttttcagttggcgaagttaactcctttaataagtacattgattatgccagtatgttgtaaacaaatacaaaagatttacattaaaaaaatttctttcattagaattagggtatgtttattttgaggggataagaaaagactttcaggcaggccattttatgtcagaacttcagagtaaaacatagtataacatttgtctacatagaactaatagttgaagtcattggttagaatgagcttttagagaattaagagaaggggaaaagactgataatttaatatcttcagttcagaataaataggtaaataatcaagaaaagaacattcaaagataaagggtaactgaaagatgccaaagaagaagataaataacaattactgataacattctaaagagacgtcaaagagaatgtcattacataaagggaattagatttgatctttaacatttttagagacctttgagagtaaagacagcagaagggctgctatatttaagttgccttcttctttttctttttcctttttttttttttttgagacggagtctcactctcttgcccaggctggagtgcagtggcgcgatctcggctcactgcaacttctgcctcccaggttcaagcaattctcctgtctcagcctcccaagtagctgggactacaggtgcatgccaccacacctggctaatttttgtatttttagtagagatggggtttcaccatattggtcaggctggtctcgaacttgtgacctcaggtgatccacccgcctctacctcccaaagtgctgggattataggcatgagcctctgcgcccggctgcc

SEQ ID NO: 105581 - DNA, 5285 bp, Homo sapiens
ctgtgcactccatgtgatgccaggagaccactggtcttgatgacctctgatttttcatctctgatagaacacaagaacaaaccatattgagtactgagatgttagatattgccctttatacaaatgtctttcaaacatatgtcaggtttttaaaaaattctttttaaaaaatgctacctggaaaatagttataaaactgaaaaaagttatttatgtacgagaaagtaagaatggggaaaataggtaattgttgaagcttggagtggatacttagggatttattataccattttctatacttttgactgtgtttgaaaattttcataataaagatatatatagcttagtgaaattcatactatttgttattaaaaagggcttttcatttctccagtaaacattttaaactgtgcagtccatttgaaagtaactatttattgtagtagtaattgcttattttgttcatttgtaggcaaagattgaaaatgtgcagaaaacaggtttcatcaaaggaccaatgttcaaaggtgttgcttctagtcgatttttgcccaaaggcaccaaaacaaaagttaatttggaagaacagggacgacagaaggtgtcattcagcttcagccttacaaagaaaactttgcagaataggtttctcactgcacttggcaatgaaaagcaaagtgatactccaaaccctccagctgtacctcttcaggtagactcgactcctaaaatgaaaatggaaattggtgataccttatctactgcagaagaatcttccccaccaaagtcaagggtggaattgggcaaaattcattttaagaaacatctgcttcatgtaacatccaggccactgctggctactaccacagcagtagcatctccacctactcatgcagcaccattaccagcagtgatagcagaatcaacaactgtagactcaccgccctcatctccgcctccaccgcctccacctgcccaagccacaacactctcatcaccagcaccagtaacagagccagtggccttgccacatacaccaataacagttctaatggcagcaccagtacccttaccagtagatgtagcagttagatctctgaaagaaccaccaattataattgtaccagaatctttagaagcagatactaagcaggacactatatctaatagtttagaagaacacgtaactcaaatattgaatgagcaagcagatatttcctcaaaaaaagaagattcccatattgggaaggatgaagaaattccagatagttctaagattagtctgagctgtaaaaaaacaggttctaagaagaaatcctcacaatctgaaggcatctttcttggttcagaatctgatgaagattctgtacggacttcttcaagtcaaagatcacatgatttaaaattttcagcaagcattgaaaaggaaagagattttaaaaagagctcagcacctttaaaaagtgaggatctagggaaaccttcacgatctaaaacagacagagatgataaatattttagctattcaaaacttgaaagagatactcggtatgtatcttcccgatgtagatcagaaagagagcgacggcggagcagatctcactctaggtctgagagaggctctagaactaatttatcctattccaggtcagaacgatctcattattatgactctgatcgtcgctaccataggagctccccttatcgagagaggacgcgctattctcggccatacacagataacagagcacgagagagttctgactcagaagaagagtataagaagacatactcaaggcgtacctcatctcattcctcttcttacagagacctaaggacatcatcctattctaaatctgatcgggactgtaaaactgagacctcttacttagagatggaaagaagaggcaagtattcttcaaaactagaaagagaatctaaaaggacttcagaaaatgaagcaattaaaagatgttgttctccccctaatgaactgggattccgacgagggtcatcatattctaagcatgacagtagtgcttcccgttataaatctaccctttcaaaacctatacccaagtctgataaatttaaaaattctttctgttgtacagaattaaatgaagaaatcaaacagtctcattcttttagtttacagacaccttgttcaaaaggtagtgaattaagaatgattaataaaaatcctgaaagagaaaaggctgggtctccagctccatcaaatcgattaaatgattcacctactttaaaaaagctagatgaattgcctatttttaagtccgaatttataacacatgatagccatgatagtattaaggaattagactctttatctaaagtgaagaatgatcaattaagaagtttttgtcccatagaattaaatataaatggatctcctggggcagaatctgatttggcaacattttgcacttctaaaactgatgctgttttaatgacttctgatgatagtgtgactggatcggaattatcccctttggtcaaagcatgcatgctttcatcaaatggatttcagaatattagtaggtgcaaagaaaaagacttggatgatacctgcatgctgcataagaagtcagaaagcccatttagagaaacagaacctctggtgtcaccacaccaagataaactcatgtctatgccagttatgactgtggattattccaaaacagtagttaaagaaccagttgatacgagggtttcttgctgcaaaaccaaagattcagacatatactgtactttgaacgatagcaacccttctttgtgtaactctgaagctgaaaatattgagccttcagttatgaagatttcttcaaatagctttatgaatgtgcatttggaatcaaaaccagttatatgtgatagtagaaatttgacagatcactcaaaatttgcatgtgaagaatataagcagagcatcggtagcactagttcagcttctgttaatcattttgatgatttatatcaacctattgggagttcaggtattgcttcatctcttcagagtcttccaccaggaataaaggtggacagtctaactctcttgaaatgcggagagaacacatctccagttctggatgcagtgctaaagagtaaaaaaagttcagagtttttaaagcatgcagggaaagaaacaatagtagaagtaggtagtgaccttcctgattcaggaaagggatttgcttccagggagaacaggcgtaataatgggttatctgggaaatgtttgcaagaggctcaagaagaagggaattccatattgcctgaaagaagaggaagaccagaaatctctttagatgaaagaggagaaggaggacatgtgcatacttctgatgactcagaagttgtattttcttcttgtgatttgaatttaaccatggaagacagtgatggtgtaacttatgcattaaagtgtgacagtagtggtcatgccccagaaattgtgtctacagttcatgaagattattctggctcttctgaaagttcaaatgatgaaagtgattcagaagatacagattcggatgatagcagtattccaagaaaccgtctccagtctgttgtggttgtgccaaagaattctactttgcccatggaagaaacaagtccttgttcttctcggagcagtcaaagttatagacactattctgaccattgggaagatgagagattggagtcaaggagacatttgtatgaggaaaaatttgaaagtatagcaagtaaagcctgtcctcaaactgataagtttttccttcataaaggaacagagaagaatccggaaatttcttttacacagtccagtagaaaacaaatagataatcgcctgcctgaactttctcatcctcagagtgatggggttgatagtacaagtcatacagatgtgaaatctgaccctctgggtcacccaaattcagaggaaaccgtgaaagccaaaataccttctaggcagcaagaagagctgccaatttattcttctgattttgaagatgtcccaaataagtcttggcaacagaccactttccaaaacaggccagatagtagactgggaaaaacagaattgagtttttcttcctcttgtgagataccacatgtggatggcttgcactcatcagaagagctcagaaacttaggttgggacttctctcaagaaaagccttctaccacgtatcagcaacctgacagtagctatggagcttgtggtggacacaagtatcagcaaaatgcagaacagtatggtgggacacgtgattactggcaaggcaatggttactgggatccaagatcaggtagacctcctggaactggggttgtgtatgatcgaactcaaggacaagtaccagattccctaacagatgatcgtgaagaagaggagaattgggatcaacaggatggatcccatttttcagaccagtccgataaatttcttctatcccttcagaaagacaaggggtcagtgcaagcacctgaaataagcagcaattccattaaggacactttagctgtgaatgaaaagaaagatttttcaaaaaacttagaaaaaaatgatatcaaagatagagggcctcttaaaaaaaggaggcaggaaatagagagtgattctgaaagtgatggtgagcttcaggacagaaagaaagttagagtggaggtagagcagggagagacatcagtgcccccaggttcagcactggttgggccctcctgtgtcatggatgacttcagggacccacagcgatggaaggaatgtgccaagcaagggaaaatgccatgttactttgatcttattgaagaaaatgtttatttaacagaaaggtaagtctaattaatacttgtttgacaaattttaactctttttttgttgttagaaaaagcctttaaacaattcagactgtatgagattaaacacatgaaagagttgtgggataaagtaaatttaaaagtctaaaaaagtgtttttacctatttagatttgatagtatagattcctttccccattccccccgccgccccatccccaggaaaggagatgtctatttttttctttcattacttgtttggttttcaaggtacaatttaggctagcccagtatttctgtaattccttttacatgtgaaagtctgaccaaaaaaacagaataaaaccccagcaaaataatctgtacttagagaagaaaaaagtggttactttggattttattttcaaaaatgtgcagaatgaagtatctttgggtactgtattagtccgttttcatgctgct

SEQ ID NO: 105582 - DNA, 1364 bp, Homo sapiens
ttttctaaaaacccaactcttacttgcaatagtaagttaacatggctttttcctttcatgggttcttggccattggttaacattaccttaattagattggtctttttgttttgctactggcagggtcagttaggtaagattgttttgatttactgcaccatcagtccaattacaaagctcatgttataggtttttagtttgaaaaacctcaaaaaaaattttatatcacgattcaataaatgcttatatagcacttgctctgtacaaagtaacatgctaacccctgaataggctaagtgcctgctttcacttccttttaccaggttgtttggtgaagtccggaagctttaaggatcacatccttacacttcttggggaaaaacaatttttcataatatgtgggaaaatggactcagaagtgcatctttggtagacctgagtggggaaggaatcaagaatgttttatggttttacatgttttggagtttttatttttattgctttaatgtagtagaaatccactgctttggatttctaacagtgattatatatttttaaattctcgtgtattttttccttttttttttttttagaggcagggtcccactctgtcacccaggctggagtgcagtggtgtcatcatggctcattgcatccttgaacctctgggcttaagcagtcctcctgcctcagcctcctgggttgggactataggcatgtgtcaccacacccagctaattaaaaaaaaataaattacgttactggttttgaatccctggcctcaagtgagcctcctgccttggcctcccaaagtgctgggattgcaggcatgagccattgtgccaggcctcttcttgtgtattaacctgtatggagtaaagaattgtaacatgttttttgttgttgttgttttgtttttcctttttttcataatactataaagactggaggggatcatggtaggtatcctgagcaatatcacctgtttggcatatgaagaaaatgaaggctagagaagtgaagtgacagcaaactcttgagatagtaagctagttagtgtttataatgctagagagaggagagagaaaggcagtatagggtttaaaaaacctggatttcagagtcagacctgaatctgaacactattttaaccttggacgatgacttcatctctctgaacttgggttttctcatcttttatataggtattataatggttaacaacttactggggctttttgggaggattgaatgagataatgcatgaagagcacttggcgcagaatgtggcacgtgtaagtgcttctagttggggtcatcagggaaaagttaaaaggtaggatttaagttgaggatgaaaagac

SEQ ID NO: 105583 - DNA, 1454 bp, Homo sapiens
ggctcactacaacctccgcctcctgggttcaagcgattctcctgcctcagcctcccgagtagctgggattacaggcgcaccaccacgcccagctaatttattttttattttcattcatttatttatttttttgagatggagtcttgctctgtcgccaggctggagtgcagtggcacaatctgggcttactgcaacctccgcctcctgggttcaagcgattctcctgcttcagcctcccgcgtacctggaattacagccgtgcgccaccacgcccggctaaattttgtatttttagtagagatggggtttcgccatgttggccagtgtggtctggaactcttgacctcagttactccgcccgcctcggcctcctaaagtgctgggattacaggcgtgaaccaccgcgcccggcccactttcagtttttaaccactgtttctcaattggaagacacatcctttcctttccgttaccaattgctggtaaaatccgattcaaaattctagtggaaaaacaacagcaacaacaacacaaaaaacgctaaccctatgaacccccaatgtcaaaatgatctatcgccaaaaactcttcagcgtctagaaagtttagctattggatttacgcgttcctatctctccttccaaaaataacaactcgtagctctttcaagttattctacttagtctcatcttatcatttctgtaggaaagtgattaataccctttttttcatgacattgcctctaaggccccaagaaccacacaggagaggggagctgccgccttggagacttcgggtgggggcagagcgccgcgccgaggtggaggtaggagccccgagggcacagcgggaaggaaggcggaggaggctgccgggagctcggcctccgagcaatcccccgcctcgctgggcttccatgcttgctaaagggtcgagatgaacgggcaagggagagagagggcgaggaaaaataaaaaagagaggggcgagtgggacgaggggcccgggagcagccgcggccgcgttacctcagagcccagaggcctgggggaggggccctcggcgctgccgcggactccggggctcccggcgggcaggtcctgcagggccgcggagcgagaaggctgatgtctcgggtgtctcggggagttctcccgacgtcgcctgctgtttgtcagtcgccagctgtgacacggtagcgggccgggtcacgctgcccccggccgccaggcgggttgcgggaggggtcgcggtgccgcctctccaggtccggtctggcccacatcactggggccgggggtttattgttccggagagccacaggcacggtcggcctggacccgccgggcagtgttccgctctgcccgtcccggcctggggtcaagccaacagctgcaaggcacgccgactggcggcagatcggtggcccgtgtgtgtctctttaaggggccggg

SEQ ID NO: 105584 - DNA, 1049 bp, Homo sapiens
ccacaatacttgcctaaggcaagtccctctcctctttctggctggttcagggggtcagttatcatgtccctgaaagggacattctgtggatcagtttgattactatgtacatttaaaaggtagcagcaagccaggtatggtggctcacgcctataatcccagcactttgcgaggccaaggagggcggatcacctaaggtcacgagtttgagaccagcctggccaacatggtgaaaccctgtctttactaaaaatacaaaaattagccaggcatggtggcgggcgcctgttatcccagctacttgggaggctaaggcagggagaattgcttaaaccggggaggcgggggttgcaatgagctaagatcgtgccactgcattccagcctggttgacagagtgagactccgtctcaaaaaaaagaaaaggtagcattaagcctggtatgttttattttcctgtttgttagaaacctagattcatttttaatcttcaccagcatcacatttgaaaatagtgaattgggcagcttggcatttgtgctgaattccttataaggcgttgtgtaggagggaagattacatgattacaccaccagacccctgggtctttgatattaggagagcttggcatgtaaggagttggggagttgggcttgtctcatttaaatctgaggcaggcctctctctgggcagtcttgaggagagacctcagcctccccaagctatggctgcctgtctgtacagtgattatggtgctctttccttccttgcagggtgtgctaagggctgaaaatagcaagtgggccatgcacagtggctcacacctgtaatgccagcactttgggaggctaaggcgggaggattgctggagcccaggagtttaagaccagcctgggcaacatagtgagacccccgtctatacaaaaaaaaaattagccaggcatagtgccatgtgcctgtagtcccagctactggggagtctgaggtgggagaatcccttgaacccaggaggtcaagactgctgtgaaccatcattgtgctactgcactc

SEQ ID NO: 105585 - DNA, 1070 bp, Homo sapiens
actacctagcattgcatccttgggcacatcctttttgtttccttagatgcaaacagaaagggttaggtgaggtgacctctccctgtccccatacaccaaagagcaggcctgcagcagagggaatactgggagagctccttgtccccatacctcccacaggagtttgacatcatggggggctgctgtgccctgcacggtcactccatggactgagctttgcctctgactgtcctgtacctgtgcctctctccccactgcaggtggaacactacaaccaccacacagccacctggcaccctgcagctggcatgctcaacaagcgctgccggcacggagccgcctccctggggagcaagatgtttgtctgcgggggctacgatggctctggcttcctcagcattgccgagatgtacagctctgtggcagaccagtggtgcctgattgtccccatgcacacgcgcaggagccgggtctccctggtggccagctgtgggcgcctctacgctgttgggggctacgacggacagtcaaacctaagctcagtggagatgtatgacccagagacagactgctggacattcatggcccccatggcgtgccatgagggaggggtcggtgtgggctgcatccctctcctcaccatctaaggcagaggatgggatgtggtggggcagggatctggtacagacataggcgcttccttccaggaacagtccctcaggagaggcagtggaccagaagagatggcgaaacgtgagctcgccggaggtacagtttttccaggtgcttaagccctcccccactgtgccacccttgtgaccttcaggcttgggtcatcaagatgcacagcatggaacacaagctcctctggatcctgcagctggtgacatggaactgttttctggtccacatgaacacaggctccatccaggcccagctcctacccaccgcctctctgtgggccagctgttcacagaaggccttccatctgatgctccccatcgcctgcttgctctccagccgagtctggccaatttgccatggggaggctgcagtgtccaagcctgctg

SEQ ID NO: 105586 - DNA, 1823 bp, Homo sapiens
tttccagcggcccgcccgccacgtcatctctaccacagcaccagtcctccacggctcttgacaatacgtgggagggcaagttcataggtgaggtctcatgctcttcctaggagggaggagcgcggcgggcgggacccgcagctgggcttggcccgggagcggggaataagctcgctccgcgcctctcagtttagtggatgaagactactatcccagaagccgtttcgcctcgggctggcgagctcctccccgccctactccctccgcgcgaagaagactgagcatgcgcaacagggacagcgcctgcgcaaaagactacgcgagcgggtggctgggttcactgcaactcccggcaggccgctggcatttttcattccctcccgtgaccagtgacttccggcacgaaggggcggggctgggctcgtggctgagccagcagctgcagcagctacgggagtggccgggtggccggcgggtgccagccgccatggaggccgtgccccgcatgcccatgatctggctggacctgaaggaggccggtgactttcacttccagccagctgtgaagaaggtgagcttgccttccatcttcccccctatccgccgcgtatctccgtcgtctgcaagcgcgtgacgcccccctgcgcgcccatcacctcctcaggcccggtcgcagggtccggtgaggccaggaggggccttcgccggttttcctcagcctgtcccacaccccggcgcccgcaggccattcttctcctccccgatagccccgtgctagcacctgcatcttcatctgaacccggttcccgacttctgccccgagtcatccgctgttcccactgaggcagcacacttcctccttctgacgctcggacccagttctgccccgcccctcctccatgccaggaccgccccgcgcgggagcggtgggcggccctgaccgtgcggattcttttgctgcgcccggccctcggtgcgctgtcaagtccacgcccgcctgggacagacactggggatggctcaggggcgtgtgtttaagacgtgagccccggtggcccagggagatgcccgacccctgcggtgagggtttgttttacaattgctgcgattctgtatggtctcccattcgggagtctctttggaccaaacaatacaatcccacgacatttttaggagggttactgcttttcgtaaccgactggagggcataaacagtgttgtagagctcagagaaatcttactgtgttggaagaacagacgggcaggtttggcgttgactaaggcaaggaacttctgtggagaggttcaggtgtggtgattgaacacaggtgccctccgagacatccgctgtattggtagcactgagggctagagcagaaatgaaaaggaacaaccaggaggccgtcgcaggtggggggccttgtgggcttagcacagcagatgccagagtaagccccaatctagatggtgcaccacttagcgagacgcttgggaagacaaataggaaaaagaaaatgggtttggaagtagtttcccaagaagctgtctcccctctaatcgccatacaccattgccttagttcagacagtgtttgagtccatcatctagcctcttggggccaggaaatgagggtaattgatccaaaattctagaattttgttaacggttatccagacgttgctctcttcttcatctgctgtttctttttcctacctttttttttttttttgagacggagtttcgctcttgttgcccaggctggagtgcaatggcacgatctcggctcaccgcaacgtcagcctcccgggtttaagcgattctcc

SEQ ID NO: 105587 - DNA, 1361 bp, Homo sapiens
ctcccgggttcaagcgattctcctgcctcagcctcccaagtagctaggattacaggcatgtgccaccacgcctggctaattttgtatttttagtagagacggggtttctccatgttagtcaggctggtcttgaacccccgacctcaggtgatctgcctgcctcggcctcccaaagtgctgggattacaggtatgagccgccacacccagccagacccacgtaattttttagtggggaaatgctgctggccttgcatcttcttaacttgtgctttggaggccagagtgctgattcactggaaactgatgatggatgactcttgtcctctttatcagtgagtgatttggcctcaggtatttctgtttgaagttctttattctttctggcccaaacacttgcccttaaccagctgtacttgagctcaagtccagcttacttggactgagctgttacgttcatccctgattcattcattgaacaaatagttattgagtgcctgtcatgtgccagccctgggtacagtggtgacaaaaacctgtgtcttggctgggagcagtggttctaacctgtaatcccagcactttgggaggctgaggcaggtggattgcttgagtccaggagtttgagaccagcctggccaatatgatgaaaccccatctctactaaaaatacaaaaattagctgggcatggtggtgcgtgccttgtaggcccagctacttaggaggctgaggtgggaggatcacttgaacccagaggtggatgttacagtgagccaagatcacaccactgtactctagtcagggcgacagagtgagaccctgtctccaaaaaaacaccacaaaaccctgtcttcatgaaacttacctcctagtaatctacacagtaaccctcatcctcaagtgcaggtgtacatctggctggtagccaccctgcctgtcacttggcttctcttcatctcccatcctcccactctggctgagttgatctctaaatctctactttcccatcaggctgctcatggcctgtccccagcttgcttcagcctgtctctctaacttcactccccagtcctctcctatgagaactttcagcttctcttccttccacatctggtcactgcccttgctcaggcccttactggaattcccttcctcctgtttatcacatgggttgaactgtacgtcattagggtcctctcagccacccagcaagtgtttgggccagaaacaagaaagaacttttccctcctctgaattcagactgtcttgctgtccaccactgggttagcctgcaccacagagtgcacgctggtttttttttctttttttttggagacagagtctcgctctgtcacccaggc

SEQ ID NO: 105588 - DNA, 1396 bp, Homo sapiens
catggactttttgggatcccttggtgtgtgcagtcggccagctgtgatgcattttcctggcatttgtgagttagctggcctgcgtgtccactgccccatatgacaacaggcctgcttctcccatcctgccccccagaatgctgtccgtgtcccacgagactttgagggctgtagtgtcctccgcaagtacctcggccagcttcattacctgcagagtcgggtccccatgggctcgggccaggaggccgctgtccctgtcacctggtgagagccgcaggcagggctggaggatcccacggggagtctgggtggtgggggtgctcctcccctcccttcccccttctccttgctgcataggatggggaatggcctcatatggtccccccaggcctccccacatccccacaatggggtgtttagtccccttacctaatctcagggccctggctagctcctgccctcgagataactggggtgccatgtctgcaggacagagatcttctcaggcaagtctgtggcccatgaggacatcaagtacgagcaggcctgtattctctacaaccttggtgagctgcctgatcccttcccccggccctactccccagtcctgccagcctagctttcagctcttcagatggccacaaaggcagtgggctgataaagggaggactccaggattcccgcccctccactgacctccccacagccctgccagctcctccactgttttctgggctgggcccgtggggagcctctgctggggcgaggctctactgggctggctgccacacagagttgccactgtgtgctctgtctgggagagagggcctttcttctttgactggacagcccctccccactgtggttttgggctgcttcaggcaggaggagagtgtggctggcctcagcttaccctgctagtcagccttagcctggctcaagggagaagcttggggagccccagagttctgtgcaaacatccctgaagcttcaagattggaccccttggacaggagcccttccatcctctgccaaatgcagagcaggagactgagggctgggcaggacttctgagtttccctgttccctccagcttgggtgtccttggactcgttgccctggttctcagagccatgttgtcctgattgtggataacagcagtgccccctctgtctcaccttcacatgggtgtgagcagccccaggcccctaacactgtcccctccctccccaggagcgctgcactccatgctgggggccatggacaagcgggtgtctgaggaggtgaggagaggggcagtagtggaacatgtggacataccagggaggggcagcctcccaagtatggatgaatcctgacccatggagtggacacaggccatcctcccactccctcc

SEQ ID NO: 105589 - DNA, 1097 bp, Homo sapiens
atccagggaaggggatggccagggagggggcagttgggcctggatcctggaccaaggcagtgagggacaagcaaggggccttggctttgttgaatcaggagcaccgtggtgctgcttggagtgggggcagctgggggagagggcagtgaagagggatccctcagtctgcccctggggaaggataaagggaaggggaagcgggaggccttgggtgagcgagggagtgcacctcacgtgtcgccccagggccaggctcaggagtgcctcctggagaagtcgatgttggacaacaggaagagctttctggtggcccgcatcagtgcacaggtagggacggggctgaggggaggccttcactttactgctgactcccccactcattgggccccaccctgttctcaggtggtagattactacaaggaggcatgccgggccttggagaaccccgacactgcctcactgctgggccggatccagaaggactggaagaaacttgtgcagatgaagatctactacttcgcagccgtggctcatgtgagggcctggggccccagggcggggcagggcggggctgagtggccacagctcaggaagcaagtcgtggcgtctcttcttctttcccagctgcacatgggaaagcaggccgaggagcagcagaagttcggggagcgggtgagctacagcgaggaggggactggggaccaatggcagccttcagtgagatgccggtgtgctcccgctccttacacaccagggggtggccttctctgtctcaccctggccatcaccctgctggaggcctggtgtcttaagtgttgtcccatctgtgcagccctcgtccctcggggtctgaggaggtggggcaggctccctacagagcaggtggctggggcagggtgtggcgccaccttgctgctgttggctggggtggtgcccggctgcctcctgagctgcttgtcatctgatggacaggcagggccgggtgggaggcaggaggagaaagggtccaagcagaggaggacagagcaggctttcctgccaccctccacaggttgcatacttccagagcgccctggacaagctcaatgaagccatca

SEQ ID NO: 105590 - DNA, 2005 bp, Homo sapiens
ctgcacgtcggcaacctgcgcctgctcagcgggccgcttgaccaggtccgggctgccctgcccacaccggccctctccccaggtgagccccaccagaccccattgggagactcgagctgggggtttctctggcctcactgaccactgctgcccacagaggacaaggccgtgctgcaaaacctaaagcgcatcctggctaaggtgcaggagatgcgggaccagcgcgtgtccctggagcagcagctgcgtgagcttatccagaaagatgacatcactgcctcgctggtcaccacagaccactcagagatgaaggtgggctgggtgagcagggtagaggggctctggctccgggccccacccttaggagtcgaggccctgagtgtccgtccctggcccccaccccttcctcagaagttgttcgaggagcagctgaaaaagtatgaccagctgaaggtgtacctggagcagaacctggccgcccaggaccgtgtcctctgtgcactgacagaggccaacgtgcagtacgcagccgtgcggcgggtactcagcgacttggaccaaaagtcagtgcccagtcctctgctctttcccggagccacctggagcccagccccatggttcacctggagctggcccttctgcccaccaggtggaactccacgctgcagaccctggtggcctcgtatgaagcctatgaggacctgatgaagaagtcgcaggagggcagggacttctacgcagatctggagagcaaggtggctgctctgctggagcgcacgcagtccacctgccaggcccgcgaggctgcccgccagcagctcctggacaggtttgtgtggccctggggctgtggtgcggctcgggtccagacaggctggggtgatgggagcctggccccactttttccttgcctgtcgcacagggagctgaagaagaagccgccgccacggcccacagccccaaagccgctgctgccccgcagggaggagagtgaggcagtggaagcaggagacccccctgaggagctgcgcagcctcccccctgacatggtggctggcccacgactgcctgacaccttcctgggaagtgccaccccgctccactttcctcccagccccttccccagctccacaggcccaggaccccactatctctcaggccccttgccccctggtacctactcgggccccacccagctgatacagcccagggccccagggccccatgcaatgcccgtagcacctgggcctgccctctacccagcccctgcctacacaccggagctgggccttgtgccccgatcctccccacagcatggcgtggtgagcagtccctatgtgggggtagggccggccccaccagttgcaggtctcccctcggccccacctcctcaattctcaggccccgagttggccatggcggttcggccagccaccaccacagtagatagcatccaggcgcccatccccagccacacagccccacggccaaaccccacccctgctcctcccccgccctgcttccctgtgcccccaccgcagccactgcccacgccttacacctaccctgcaggggctaagcaacccatcccggcacagcaccacttctcttctgggatccccgcaggttttccagccccaaggattgggccccagccccagccccatcctcagccccatccttcacaagcgtttgggcctcagcccccacagcagccccttccactccagcatccacatctcttcccaccccaggccccaggactcctacccccacaatccccctacccctatgcccctcagcctggggtcctggggcagccgccaccccccctacacacccagctctacccaggtcccgctcaagaccctctgccagcccactcaggggctctgcctttccccagccctgggccccctcagcctccccatcccccactggcatatggtcctgccccttctaccagacccatgggcccccaggcagcccctcttaccattcgagg

SEQ ID NO: 105591 - DNA, 1043 bp, Homo sapiens
gctccaggccccttgtggtgctgcacttggccttagagtggcaaagggtattcctcaggccctggtggcccctggaagcctggctctggggagttgcccgttgtgtcctccctgcccagaccctagtggcttctgaggagataagcctgtgggagaagcagctccagggttctcaggtacaggagccatcctctccccagagtggcccaggacaggagcctgttagttgagtgctctgggatggacccacttgtggccaccacattgccctgggtcgggttcatcggccgctgcatggtgtgcagacactggaaagtgctgggcaaaatcattcaccagccgggctgggctggccttggggcagcagtgcctcttccagggagctgaactgagatgggaggaaggctgaggccccctgggactaggacctctgggggactctggagcaggtcaggttgctggccctctgaccgtaggaatggtagcagctttctggctccagctgaggtggagcttaggggtggggacattctgtgtcaaacctcagggtgcttcagtgtatttccaggccaagaaactcagcccctaactgtggaaaggcaagcaggcccctccagcagcaagtgttggcaggtgttagcaggaggacttggagaggcaggagaaaaggacgcagtggggcctgtgtcctctctccatccccaggcctgaggtccctgtgctgcttcctctcagcatgagggctgaagctgctgggggttggggcccattcctcccactgagtaccccctgccccactgcaggctggcaccgttgtctggattggcatcctggtatacacagacccagcagggctgcgcaactacctcgctgcccaggtgacggaacagagcccattgggtgagggagccctggctcccatgcccgtgcctagtggcatgctgccccccagccacccggaccctgccttctccatcttcccacctgatgcccctaagctacctgagaaccagacgtcgccaggcgagtcacctgagcgtgga

SEQ ID NO: 105592 - DNA, 1049 bp, Homo sapiens
ggtggctcacacctgtaatcccagtactttgggaggccaaggcgggcagatcacctgaggtcaggagtttgaaaccagcctgaccaacatggtgaaaccccatctctactgaaaataaaaaattagccaggcatggtggcacatacctgtaatcccagctacttgcgaggctgaggcaagagaatcgcttgaacccaggaggctgaggttgcagtgagccgagatcacgccgttgcacgtcagcctgggcaacaagagcaaaactctgtctcaaataaagaaataaataaaaataaaactgattcttagcagcagcagttcagtccctttgttagtcattcctgaccaggtcaagagggagtaagaatgtaggtaactggcattgtggaagaaaatctttaataggtttgttggtgttctattgtaaagagggttgacattatgcacgtggttatttgtgacaaccattacaaccaactaatataatttggtcttacttcaatttgggtgttgctgtgccatcccaacagttactctaaaatgtgccagtactcatcttcttgaatatgtgtgtttttaggctttaaattctctgaaatcagctttcgttcattaactgaaattcctttattttttcaatactatttaattattattatttttttgagacagagttttgcccctgttgcccaggctggagtgcagtggtgcaatctcagctcactgcaacctctgcctccagggttcaagcgattctcctgcctcagcctcctgagtagctggaattacagacgcatgccaccacacccagctaatttttgtttttgagtagagacggggtttcactgtgttggccagctggtcttgaactcctgacctcgtgatccacccgccttggcctcccaaagtgctgggattacaggcatgagccactgcgcctggccacgccctgctaatttttgtatttttagtagagacggggtttcaccatgttgcccaggctggtcttgaactccagacctcaggtgatctgcccacctcagcctccc

SEQ ID NO: 105593 - DNA, 1167 bp, Homo sapiens
gttgaccttcccctccattttggcttggctaactcctacttgccctctgagattcagctcacatgagctcacctcctgacctgctcctccgggttacaggggatgcctcttcgttgtgctcccatacacctcatgcttccctctcccttggtcttatcattctgtattgtcagcatctgtctgtctcctgggcccatatctctcacttgttattcctactgtgggatctggtacactcttaagtattcaggaactgttgactgaatgaatggttgcctggcaggatggtgacacttttagtaacattcaggaattcaggagattgagctaattttgaagactgttggtttagatgaagtgagctgaaaatatgggttggctcattatgggtgaaatatgggtgaagttgtccagtaggtgactggaattagggtctgggagcacaggtaggggctggctgtagcagcagcagggagggtgatctgtgagaggatgtacaggggagtggaggcaacgagaggctggcactccctgactctgggtgtcctttccagtaaggagcaggcttccatcttgtatctgatgcagggaaacatggtggtccttgtgcacgacagtggagatgcggaggatgaggagaatgacatcctgctgaatggcctcagtcatcagagccatctgatactgcgggctgagggcctggccactggcttctgcagggatgtgcacgggcaggtatgcaggggcctcctgggcaacaggcttcttgcccgtgtacctgtgattcttgactacataggggagagtcaggcctgagggactgtctggttgggacatgacttcaggtggaagggaaacactggaaattgtgagacttcaggtaatagacctgctccagattgcgcttagcctcatggaccagcccacgttttccatgggggtcccatttgtgaccaaagtggggcactcttaaagaggagacagctgtctagagtggaatgcaggggcatgccatcaaataacagcaaaattcctccgcagtactgcagcaggcgtcgtctattcaggtcaacactgttccttttttttttagacggagtcttgctctgtcacctaggctagagtgcagtggcgcgatcttggctcactgcaacctccgcctcctgg

SEQ ID NO: 105594 - DNA, 1934 bp, Homo sapiens
ttgtctcaaacttctgggctcaaatgatccacctgcctcagcctcccaagtagctgggactccaggcatgtgccaccatgcctggctagtttttcttttaatgtaacaattaaatggaaatacacatctgaaaacagttggggcattatgggtttgggagcacccaggggaatgaagacaggcctgtacattgggtgatcagatacacttctgccaagtttggaaggtgtcttatgccctcttgcaagctggcatctagtctgatgggttcccctacaaggcatagtaactcactctctttttcatgtttagggtgtcagcctgaccatggcgcgggagcgtgggcagcttgtgttccttgagggactcaagtctgcagtggacgtcgtcttccaggctcaaaaggagccacaccccctgcagtttctcaggtcagtcagcctacagcccagcccggaagcaacacgtggcaggtgggcccaggcagggttcctggttgctgtgtgattccttcttattgtgcaggaggatggaactggcttcaggagtcagacacttcatctggtgttgcagcatcatcaaatgctggctcttatcatggggctgagggtggacatttgtcccaaaagctatagagaggatcatttgctggaaggatggcagaactatatgctttgctgtgttttccagccctggcttagagccctagtatacacctgtgctctgcaacagtggagactgcaatggcaaactatgggctatgggtcagctgcctgtttttgtaaatacatttgttttgtttgttttgtttcatattttttaaactgtttgtcttttttaaaattccttttttttgttgttgttgttgttgagatggagtctcgctctgtcacccaggctggagtgcagtagcgtgatctcggctcactgcaagctctgcctcccaggttcacgccattctcctgcctcagcctctctgagtagctgggactacaggcgcccgccaccatgcccggctaattttttgtatttttagtagagacggggtttcaccatggtctcgatctcctgacctcgtgatccgcccgcctcggcctcccaaagtgctgggattacaagagtgagccaccgcgcccggccaaaattcctttttttaaatttattttttgtaagtaaaattttattggaatacagccacgttcatttgtttgcatgttgtccttggctgtttttgcactacagcaacaaatagagttgagtagttgggacagagaccatatgacctgcaagcctaaaatatttacttttcagacatttaagaaaaaatttttcccctggtttggtattcaacatcacaggcctgagactggttttcctgcttttcctcctttctgaacattggccacaaacatagctctgtgaagactccccgcttggctgctgttcttcgtccactacaaagtggtccacacaggaacttcccccactgccttatctctcagacacacacacccttatgcagtgggtgtgaggccatgtttcctgaccctgtgtgtgacttcacacacatcccttagcatctctgacttggggtttcctcatttgaaggcaggggctggttatacctcatcccaaggtatggggagatgtcttcattgttagtgaagataacccaatgccaggggctcatccctggagcataaggcagtaggccagttgccctgggccctgggctctgttcctccactcattgctgagaaatgatggccaggggtagtcactggagaagacggagataggcaagctggcttgtgtcagaaacaggtcaaatctgttacgtatacagaagccttaggccactgccactcaccatcagggcaactgagttgctgtttaacttcttcttttcatttttttttttgagacagggtctt

SEQ ID NO: 105595 - DNA, 1024 bp, Homo sapiens
aactgattactgtcaagttttcctctctgcctggccatttcttgtaaggatgactttcctaaaaagttgctgctaatgagttactttggttccttttagttcattcaagtcttggagctttttccttgtttcagtgatgcttccttcaaccagatagaaaacgctgatattattatttggttgctgtatgcattgtctccccccccccaactttttccctcttccaggatgatcctagtgctccccacaaaatccaggaggttctcaagtcctgcctgaaagaggaggagtcatttaacatccagaactccatgtcgcccaaacttgagggtggcaaaggtgaccaggctgacttggatgtgaactgtcttcagaataatttaacctaaagcagagcaagaagagaggaagcgggggtagtgggtggggggtaggggaagaaacattatctcctcttgtacagagtctatttcttgtaaccatttgttaaactcttttctttttctgatctcatggcatgcttttatgtattttgtacaggaggcaaaaaaatacttaaaataagcaaagaaactgaacagaattgcatacattgggttgttttttctgtgctgtctgtacattgcttctgctgctgtgatttctaaacctgtgctgttattcaactgacttttttttgtactttgacccacgtttttttgaaataccagtaaaaaacaaagttcttgaaataaaactttttaaaaagttattcattttcttagtctttgtgtccactcctttaagtttgagttgagtaaccttcattgaagatgtttgtttatttatttatttattttgaggtggaatctcgctctgtcacccaggctggagtgcaaggctcactgtagccttgacctccccagctcaagtgatcctcccacctcagccttctgagtagctgggactacaggtgcaagccaccacacctggctaatctataaattttttttggaaaggcagggtctcactatgttgcccaggc

SEQ ID NO: 105596 - DNA, 1034 bp, Homo sapiens
caggcacactgcgtgaatgaagccaccagaaacccagggcagctgccccaacactgggctgccctgatggtcctcacaacggtgctgtcgagaccatgggggtaacttgggttgtgctaagatttgacagaccttccgggatttcagtttattcctaggatttctccattgatgttcctgtgctttttttttttttttcctatttaactctttcctactctccagactcttctcttgcatgtatttgttaaagcactgactgcccaccctcttccaatagatgtttgcctctggccaggcctgaacccacatgacccctgggttgaagggtgcccatactgctgggattgaatgctgggagcagtgagtccacagtggttcctaggaacttatgccagatgttgatccagctcccttgtgatgaggtacttctattaagtcaaaggcagttggacctgctgtggaattcagctacccttggcttaataggatcaagttctggagcaaacacctgagttaggagagccccatcttggtgtagacattcctttgcctcttgtgtttgttggaggtattcagcttgtctaatagcactgtttgcatatctcttgcttttgggatatgcttcttccatcccttggctcagaagacagttttctaatctagatcccatgagccctcgagggctcaggtttaatctgggagcccaccttcatggcatcagagctctgagaccagggtctgtgaggagtcacttagtccacttttcttcacatcatgagaatgtttctgtacccctgtatgcccccagagaatatgtgatgaaggagttgagggtgggaggttatcttgaaagacataaaagcaagttgtatccttgtaagaggagaggtgattataggtcctcttgtcctgttctagattttagtgtgattcaaagtccatcctacctaagatacttatagctcagctctccagctttcatgaccatggtttcccccaaacagtacagaagtacacgaaataaaaaagtg

SEQ ID NO: 105597 - DNA, 1038 bp, Homo sapiens
gagaaggctattgtttcaaacatattttacttggtccccggaggcagcatgaaactatgaaagaaagagccttaccccttttttcaaggctctccagaccacagttctgggatgggtgtgggtggttgccattcgttcatttatgcctgtctgatatggagcctccctctgttaccagccctgtgcactcaagtgccttgcagtccagtgaggaataactgtagataagatgagatgatgggcattaagtgtaactgctgagaagccttcatagagggaaaggtgataagaactgagtttttctggcatgaggagtttaccaggcaggagaggtggagacgctaggctaggcaaataggctgcagccatagttctgctgagaaacaggttttgaaccaaggcaactccatctggagatatgtatcagaaagattaggagatagaatctccatcttggtcacttatttggtcttctaagacagcaatgggaccgtctcttaaatactggagttgtcctatctccttgggctgataccctgaactgtcatttgggtgagtaacacattaaggggtagacggtcggtttgggggaataaactaagtaactaggttgcggttcctcctgccgactaagcagacctcctggtgcgtggtcttgggttgccctgtgagccctgaagctgtgaatgggccccacagatcactctaaagccaagcatccatgtgtgcccggctggggatctagacccccctggtctacccaggaacctgagttttggtggtctgagacacctgggggacgacgtatcccggagaagggaccaggattaaaggccgctccccaggctgcccggagactagaaggaaggcgaggtagccgcagtcccagggagggtcttaccccttgctcccgggatgcgttatggcgggcctggctgtgcgagatctaggctagtggctttggctgcgaacggattagatctgatccgattagagcctgggcggtcggcttcgcccccttgccaggctctgccaacg

SEQ ID NO: 105598 - DNA, 4375 bp, Homo sapiens
aaatgaaaacttggatagaacttagcaaatgaaggcatatagaacttaccaaaggttacatgagactgtgatgtgccttaagtacactctaatactctgggaggcttcatggacagagacatgtctgactcttctctggcccccagagtctgggacaaagtaggtgcacagaagaaagacactaatttatctaggtatataagatcacaacaactttttaaaattatctcccttaagctagtggtcagtggttgtgtagtacagtaggtacctctttttcttggcaagaaaatgtttgccaagccaccctgtggaccatacataaatgagctcgcctatcaagagagttgaccagttttccatccctattgcagaggtagtatcactggtctttaccaatttaccactgtcatgtcctgctggtcacccatgttttgtacttcaggattccttcccaaagggacctcagtagagctccttgagaatgtggagggtttcaggtggaaccttcccacctgctgcctggttcctgccataagtcagtgctctggaattctgaaccatgtgaattggttctaggatactaggtaggccacactggatgagttgcttctccacttcagcccttcatttcctccactgaaagatgacacaagggattagatcagtgagcttcagaatgctttcaagagtcttaagggtttggtagaaacctcttgggcatagagttgggtgaattgattggtgagcaatgctgcactttatttcatatgttttcaattctgacaagatctaggggtttttaaaacccggattaaatgatctctcgggttcttttgtacactaaagcaggtaaagttgaaataggaaagagtcccagacactcatactaattgttcccttcaggacatgacctagtttgggccaaaaatcgaaggactgcagttcaggagctgtggaggcctccctggactatccagtttgtcagcaactgcctcaagtgaagctctctggccctggtggagacatttatatagcaagaatttattgataatctattttgtgcccagctaggctagggactgtgggggcggggggggggcgggaagaaaaacaagacatagaactgtcccaggaaggagcttattttttaactgaagaaataaaattagaacccttgaaatacaatgcaatcaaaattaacttctgaaagggcctggagcgattcttggaaggagttggcctggaaggagggtgggggaaattcagacacctcccactccccagccactagggttaggctaagcaacttgagcagtgccctagaggttcagaaggaattgacttgcatagaccacagtggaatcaatgcctcacagggtgcattggttgcctgccactaaggaaaggacttctgtgtctttttttcactgaataggctctttcctgagtctcttgtatttccagcaataacgagttactcttggatatgtttgcagatccccctccaccacagcagcagccaccgccaccaccacctgcagatggggtccctccgcctcctgctcctggcccgccagcctcagctgctccttagcctggaagatgcagggaacctccacgcccaccaccatgagctggagtggggatgacaagacttgtgttcctcaactttcttgggtttctttcaggatttttcttctcacagctccaagcacgtgtcccgtgcctccccactcctcttaccacccctctctctgacactttttgtgttgggtcctcagccaacactcaaggggaaacctgtagtgacagtgtgccctggtcatccttaaaataacctgcatctcccctgtcctggtgtgggagtaagctgacagtttctctgcaggtcctgtcaactttagcatgctatgtctttaccatttttgctctcttgcagttttttgctttgtcttatgcttctatggataatgctatataatcattatctttttatctttctgttattattgttttaaaggagagcatcctaagttaataggaaccaaaaaataatgatgggcagaagggggggaatagccacaggggacaaaccttaaggcattataagtgaccttatttctgcttttctgagctaagaatggtgctgatggtaaagtttgagacttttgccacacacaaatttgtgaaaattaaacgagatgtggaaggagaacctcagtgattttattccctagtgaggcctctgagggcctccacactgcctggcagaacataccactgaactagtatgtgctagaggagggcacaaacatccgctccttccctaggcctgctggctctggttttctatgcagatgattcattggattgggggtgagtgttttgtttttctgggggcagtgtgagctttgagggttggaatattgggaggcattccttagtttcctcaactagcctggaaagttaggagtctagggtaattacccccaatgagtctagcctactattcactgctttgtgtgcatttttttctccctctttaaaaaaccctttaaaagaaaaaaaaaagtagatagtgctaaatattttagctcatgaaacttggttaggatggctgggggtacaagtccccaaactacctcttgttacagtagccagggagtggaatttcgtcaaccggtacttttaaggttaggatgggacgggaaaagtgaagcaggatattagctccttataccttctcccttccatttctgagatctcacattccatctatcacagggttttcaaagagatgctgagggtaacaaggaactcacttggcagtcagagcatcatgctttgaggtttggggtgctcaggctgggagggtagaatgccattccagaggacaagccacaaaaatgccttaatttgagctcgtatttacccctgctgataagtgacttgagagttcccggttttttcctcttgtccttccctcccttctgtccttccatgtgtggggaaagggtgtttttggtagagcttggtttccaaagcgcctggctttctcacttcacattctcaagtggcagtttcattatttagaatgcaaggtggacatcttttggatatctttttctatatattttctaaagctttacatatgagagggtatagggaggtgtttataaaacacttgagaacttttttccttaatatcagaaagcaaaaaaataaaaccacaattgagatttgcctttcaaaccctcaggtttgcctctaaccaggtgtccctggtcaccatcagagtactggaatacgggaaccgaggagaccttggtccttttgtttttgttctggactcttgggagtggaaatgagaatgagtttattcctactggagcttagttccaatgcatttggctccagaaagaccccagtgccttttgacaatggccagggttttacctacttcctgccagtctttcccaaaggaaactcattccaaatacttcttttttcccctggagtccgagaaggaaaatggaattctggttcatactgtggtcccttgtaacctcaggtctttaatgtgatcactttcaaatttaaaagatccaggtggaaatatttttactatagtaataattctacaaaatacctgaattcttaacactgttatatttcagtataagtggtggctttttcttttcatgtctttgatctggttttattcctgtaattcagccacctgattttgtgaggggggggaataatatgtggtttttgtacaaacatgtttctcagtgtgttgttattttggaaaaaatgaggggagggagtttggcaagaatggagaaaatgaatgaagaaggcctaatctctctctttttcagtgaataaatggaacaccatttctggattctagtcccattctctgcattcatacaccagtttcttcatatatcctatgaagaacctaaacatttggccccacctggtcttggtttgatcagcagttaaaattctgtgactcgggcttccttcccgactgcccaccttcatgatgtgtaaggaacatacattttgagggtacctcacccactgttcatttgcatggtcaaagtgaaaatgagtggaagttctccaaaaatgatggccaacatcctggcacctccaggtgtgagaaatagctttgcttggtgaatgggataatgtttgtcaggatgcagtttagacagtcccaagttggaggcaggccttgagggcagaagattctgtgaaccttgggggacagcttttgggtactcacagatataaaccctgtgcagaaaaaaagaagtgattgttttcaggatgcttataaatcgagtgaagcaaaaga

SEQ ID NO: 105599 - DNA, 1138 bp, Homo sapiens
cccccattaacacccttcttccaaaaaacccagaatacaaaaagctaaacatagagattattacagattattgctctgttgatatttcagatcctttggaaggttggatatttgtatttaggagttggatttaagttgatccctttcttacacccctttctagtatacttacagtactttaaatctccctccacaggtcagataccaggcccaggttccatgatgcccgggcagcacatgccaggccgcatgattcccactgttgcagccaacatccacccctctgggagtggccctacccctcctggcatgccaccaatgccaggaaacatcttaggaccccgggtacccctgacagcacctaacggcatgtgtaagtaacatggaggggggatgcattatctcagggtccgttctggagggctgtagataagggaaggaggctttgttctctccccgagatttggcaggtccatggatgatgcagtctgtgacagtggcttctcaaagaccagttttcagtctgtgttcttcagcacccctgatggacaggtgcacaggtgacaaaatgcttctaatcagggttgtgcctttatggcatgcactgtcagcattggggccataaagatattcctctcccacacctgtttaagcctgtcttgttatgactctcaacagacatgtagagctactggtggtggttttccctacagcagccttttgtggatacagggttcaaaagtgatgcgtgtaaagaaaagaatagaagtgagtttagagctggaattacaaatatgtttcttatagccatttttgttatattagtagtggctgtgtaggctaagaaagtagtattcaggggctgtgttgagaggaaatacgaagttccagcaagctcaatgaggacaacactagtgctgctaagtgatacttgtctgaggctgtgtttagagaccaggtcatttctcccataggctcttgctcggcttcagccttggcctgagggttgtttctgagaccctggcctgccttttactccagaaggccttcccagtgaggatgatgctgaaatgcagccagtagtaggtcaggtaccccagccacatctgtaatcttaggttcatgtagaagttcacgt

SEQ ID NO: 105600 - DNA, 1089 bp, Homo sapiens
gccttattgagaaacttgacagttgatgggcaagcacttctaggtgctggaaacagccagtgcagaggccctgaggcaggagtatgactgacatgttcagagacaagggagtaggtgggtgggctggagcataaatgagtcaagggagttaggagcataaagtcaaagagatcatggtgaccaaatcacagaaattcttgaaagcagtccagaggcctttttgctttactctgaaatgtgaaataattgcgggaccttgagttgaggactgaagtgatcttccttacagtttatcagggatcactctgtctactgtgttagagagagtaaattataaggcagcaaggtcagaatcagggagacttggtgtggaggctgttaggttaatgcacgtgagatatggtggcttggaccagggtgtcagccgtggaagtgaagagaaatggtgaagttctgggtggaatttcaagatagagataatgggctatcctcacaaatagtaagtttagaaaaatttgttatattttatgacaaactgaggaagaaagaacagcaaaaaagaatttcatagtgtcccagagtaattatatttaactttgttttctgtgtagttgtagtaattcatcttctgtgctgcctgtcatacaattgaatctattgttcaacatttgctattacattaaaggtagttttatttgagattagaaagccatacccagtagcaggttcagttctgaagcagaaagacttgtggcctcaagaagcaagcacactgcaacaaagataaaatgacaagtcacaataatgatgcaggctccctttttggatttctgctaccagaagtacacatggaagtagcaaaatgcaattatattgttttcttttacctcaggtataaaaagggatggatatgtctgttttggatttggggttttttcagtgaatttctcatcactgatacaaagcattgaaaaggaaggtgtgattatttactttagctctgaggcttcaagtctcagctgatatttcagtccttggcattgcagatagatttttgtggccctcactgtcttttactctttcccaccc

SEQ ID NO: 105601 - DNA, 1055 bp, Homo sapiens
agaggctttgtataagagtgtcaggtgctgtcctcagcagcctgcctgcctgcccacccctagaaaagttttagggaggaaaggatagtgaggggacagaccgagtgccaggatggggtggtaggtggcaaagtacctcctgtcctcatctttggcccatcagggtcctggtttgccctctccttcttgatagcccttttgaaggtagtagtttaccacatgaggcatttcctttaatcttttaagggttgatttatctctataaggaccagaaattcagagacagttattttagattgtacgttacaaaggagacatatagggtaccattgtaaattatataatctctactttgaatattgtcagcattttcttaatgttctttaagcaaatgtttacctaaatagcttgaatgatcttgtacccttagcacctggctgcagtggaagaaagaaagatcaagtccctggtagctctcttggttgagacacaaatgaagaaactagagatcaaacttcgacattttgaagagctggaaactatcatggacagagagaaagaagctgtaagtatttggaattttttagtggctttttcacaattaaaccttggtcacttttcacaaaacaagttagataaaataaatggtagcctgttctcttggtctccatggctaacttctgtccttttttctgtgtttgatttgccctttcaaaaggattgttagccagtgatgttaaataaaaggcactctgttaactctctaaagtgaattatctaaatctcagcttcttgtgcgtgttggctgtgaagatacatgatgatattaaattcttcactctacaaaacttagatcttagagttatttcattacctacttgttaccaataaagtagaaactgtataactctattatctgagtcagggattttctttcttttttttttttttttaaagttttaatttttattttagattcagaggtacttgtgcaggtttgttacatggatatattgtatgatgcttaggtttaagcttctattgaagctgtcacc

SEQ ID NO: 105602 - DNA, 4502 bp, Homo sapiens
aatatctgggtcatagtgtttccccagtacctgagtcaaaatacatacttgtcaggcatctgttaaataataatgaattatttttattttgcctttatattttaatacatacagaaaatcgaaaatcctaagcagacagcctagttcatttctacaaattccagacctagaaacagagcgttaccagcaccctaggacctcccctttcccaattgaatctgctttctgtataattcaccccttccccctgttaaccactgttctgagtgctgacaccatagattacttttcacctgtttttgaactttatcatacagtgtgtgttgttttgtgcctgacttcttttttcaactgtatggctatgatattcgttatgtattactgtatatatttgtatttcagacactctcacagctgtataataatagcttttacctttttccacattggagtacttgttcttattcttttacttgtagaaggagctgaagaggaaaaaatggaagccgaccctgatggtcagcagcctgaaaaggtaaagtctcacagcagtaaaaccacagatagcatgcctttcagaccataatggtttgttttttgggtgtttttgagtccctcttaggggactctaaataattctatcagctacttggactttgctggtttaaggtatagttctcacaggatataatataggacatttttcatttgttcactggggaggtgtattcactccctatcctcttcttttatattttaaacatctaatttcattgcattagaagaagaaggaatatgaatttcccacaaaagaagagggaatatgaatacacaagttgggactatgaatacaaaagttatggttcttggctgggcgcggtggctcacgccgtaattccagcactttgggaggctgtggtgggcggattacaaggccaagagatcgagaccgtcctggctaacatggtgaaaccccatctctactaaaaatacaaaaaaattagccaggcgtggtggtgggtgcctgtagtcccagctactcaggaggctgaggcaggagaatggcgtgaacccgggagagacagagcttgcagtgagccgagatcgcgccactgcactccatcctgggcgacagagcgagactctgtctcaacaacaacaacaaaagttgtggttcttgtgaatatcgaattttaaggtttgagtcctattcttgtgccaggagagaatgacagaatagtaagtgatttcctatgagggctaactgcctgcagaagaatcttaagaaaagaatgagaagatgacatatgaggtaggttttaaagagtaggtagaactataaagattgaaatagaggttagaaaatcaaagattcccactagttggagaggagagacactaaagccagtgtgtgaagagcttcaaagtagccagtgtgttagtggctcaatctctcttctgtaggagactgtaaatgcatgatgggtgaggcagaacaggaggttacaaaggtcaggatgtgggcctttgtattccttttttttttttgagacagagtctcactctgtcgcacaggctggaatgcagcaacgcaatcttggctcactgcaacctccgttttctgagttcaagcaattctcctgcctcagcctcccaagtagctgggattacagccacgcgccaccacatccagctaatttttgtatttttagtagagacgtggtttcactatgttggccaggctggtctggaactcctgacctcaggtgatccacccaccttggcttcccaaagtgttgggattacaggtatgagccaccacgcccagcctctgggcctttgtgttcctaatactgttactgcacatagggatcagtcagtcactatttgagtgaatatatataagccaagattgaaggtcttgattatatgtggtattctaaaattgtatatagttaaggggagggtgagggtaataatgaaattgattatagttcctgcattattctaaagacgatatttgtacttcacatttttaatttcatttaattcctaaaagagtctcagctgggtgtggtgtgtcatacttgtagtcccagctacttggaaggttgtaggatcacttgggaggctggaggatcacttgatactaggactttgaaaccaccctaggcaacatagggggaccctgcctctaagcaaacaatatagcctcatgaagtcagtgatagtcagttgcggttttttcagtttctaaagcatgatcactgatgttctctcatggttcttcctgaaattattagcagatggctgtattaaaagactttgtcaacttttccagcagcatttcaacttgcttctttgttgatggtgtgacatttaaatgctcttaattctttaaatcaatcagtaattattaagtacacacacacacacacacacacacacacacacacacacacacacacacatatatatattttgttgtggttgttgttgtttttgagatggagtctcactcttgctgcctaggctagagtgcaatggtgtgatcttgggtcactgcaatctctgcctcccgggtgttcaagggattctcctgcctcagtctcctgagtacctgggattataggttcccatcaccatgcccggctaatttcttttttgtatttttagtagagacaggatttcactgtgttggccagctgatctcaaactgctgacttcaggtgatctgcctgcctcagcctcccagactgctgggattacaggcgtgagctactgcacccggcccggcctgtttttaatcaacaaaaatatcagttaattcccttcacattcctctgggcatggtaacccttgctttatagcagagtatgcagagagggcagcgactctgtgctttggaggaacatcttgtgagcactcaagtgttgaagtggtagaaagtattgcttggaatgtattagttcttttcgagctgttctctacaagtcacttttgaatctagtctatttcttgccaaaaatattggaaccttttgctagtctaagataattactcataaaaaggtctggggtttttttgttcactgcctgtcctcttgttttatatccctttcaggcagaaaataaagtggaaaatgaaacggatgaaggtgataaagcacaagatggagaaaatgaaaaaaatagtgaaaaggaacaggatagtgaagtgagtgaggataccaaatcaggtaatttgaggaaactccttagatattattatgtaaaactgtaaaaggcactggagaaatgaaggtggtttatatagaaatatttcctcatttattttgggtttgtttcttaatgtaacaataagtatgtaattgagtttcattcagataggtgctaatactaatgctggtggctacacttttttctgtgcttttaatatgtagaagaaaaagttattcaacagtattgaagtcacctcacagacttcccatttcattttctgtgtcagttgctgatacaccccatcatgcctgtcaggcttagagaagtagtctgttctcagcttctgatttcctacagacactagagttcctagagcatttcattgattgatgagcaagtacgttggccttagacttagttcccctgtatgttcctttaaatatatatatccaagggacctccacatagaacttagcaaaatgataggaaaacaagtgtgctgtttagaaaatatgtccccaatagaggcaaacctaaatgcatggaatggctcaacagaactcttaaaaagaagaaaaaggcattgacatctctttgtcatatcagtcctagtttgttatagtggtggaggtaaggagaaagatgggttttcgagagtgggcacgctagtaacaaagctttctgatattttcagaagaaaaggagactgaagagaacaaagaactcactgatacatgtaaagaaagagaaagtgatactgggaagaagaaagtagaacatgaaatttccgaaggaaatgttgccacagccgcagcagctgctcttgcctcagcggctaccaaagccaaggtttgcccctgacagcccttttccagtgctctcttaaggcatgaatggtcgtattgtttttagttaattgggaacatttagtataaagagctttgctcccaataggagatgactgcttgaatggcatttctaggttaagaaatccacaggcaggaggagggttatagaaatagtagatccagtctaaagggtgacttttttcattccattcattataccatttagccttgtaaagactgcagagattgaaggcaaattttaaagtctctttaaggaactgattatcattttgtttttaatttgcctgcagaacttatcttggactattgttccaataatttctaccagattgaaatatttatgatttttaagacaaaaacctgtttccttgcctaaatacttcaccctgatcttacagactgaaaggagaga

SEQ ID NO: 105603 - DNA, 1063 bp, Homo sapiens
gtgagccaccaagcccggcctgaattatttcaaagtaggttgaagacattcgatgattctttgtagcctaaatagtccaccatgtatttcctaaggataaggacattttcctacatcagttatttaatacaatgaattttagtccctttttgggacaccagccctttccctcaagagagttggaatgtacttgtacattcaagggctagtcaagggtttctcaaaaatcttttattgttaccctcatttatatttcctgatctcaagtattagtttcatttcttttgctactgagtggatttactgtctgcatctcaattctggtttggacaggttttgagggattgagttaattgaagtgttttccttacaagttgatgacttttggtaaaatttaatcacaaatagaataatcaagagtttttaaaaatatatcaatgagtagattgtctaccgagctccttaacagcctgtggaatacaggtttcccatgagtacatcttgagccagttgtcacagctctgtgttaaagaacccaactaatggttcctagtttttaagaaggttaaggactaactagtctctagaccattatgagattaagataatcctgaaataaataataccgaagaagtaactttctaagaacatacagcccagaaatgactgttagaattctcgcctcagatgctattcatagcttataagtagccttgctcttctcaccatgaggatttccataacattatttttaaagtcaggcacttctaaaacaccatgtgtgaaaacaccctaggccaatgcatgtaagaaaaatgtggaaccatatttgatcatcagacttacatcacgtggagtgggcttctctctttctctttgttatatttaaagggctctttcaagtatagtaaaaacatattgaaatatagactcaaacttctgaatagctcataattggacatttaatttctaaggactgactagggtttacgtgactttcctgatgtctcatatttattaggtagtaggatgtatattttcaggaagaaattggcttttgtta

SEQ ID NO: 105604 - DNA, 1417 bp, Homo sapiens
gtgagccgagatcgtgccactgcactccatcccctgggcaatagagcaagactccgtctcaaaaaaaaaaaaaaagtattacaaaatttttaagtaatgcaccttaaaattaagagctttaggaattggagggacagaggttttttattgtgtattttgtgattaatttagaatttggtgtaactagcaaaggaagtcatttaatattcatgggttacacattaattgtaactagaactttgtcacatcatagaactctttcttggttttatggatgtttaatccttgctgtttttgtttttttgacttattaatctagtaagcagttaaaatatggacagcagttttgattattactggcataagttgaaagatctcttatttcaaggctctgtgatgtgtaggagaaaatgtagaaccatagaatttcattattattactattttttgtctcatttagtcctctcatttttctggtatagagggactgagagcctgaagaggttgctacacctaagacaataatactgtgttgggtttcctggtggtggttttacactgaagcaaatttttgtgcaaagttagattgctgttccatttttattcttgaaccagaggagttttctcgggtccgggaggaggtaccactggaattggttgaagctcatgtcaagaaagtacaagaagcagcacgagcctctgggaaagtggatcccacctacggtctggagagcagctgcattgcaggcacagggcccgatgagccagagaagcttggtgagtcactgctgcttttaagggacagggttaatatatgtttgtattcctgtcagtttactcaaataattgggtttacttgcactaaaaagtgagtacaatgatcagtataaacttgtcttttaagattagtacatgattttttttctcttgtctgtttcttttggtagctagaactaaaaaattatcttgtaactgttaatggtattacagttgtgaattatctggttgctgtttgtagatccaggttttgaatagacagatacaagaatactgaaagatgcatggaactgtaggtgaaaaaaagaatattgaaaggacttatgattatgttaatttatatgttgctgagtgggtttaaattcattgttttgggggtttttttagctgaggaaaaattcctgtaacataaaattcctcattttaactgcttaaaagtatataacctagtagcttctgctatatttacaatgctgtgtgtctatcaccactatctaattccagaacattttcctcatcccaataggaagtcacatacttattaagtggtcactccccattccttttgctcttcagctgtggtacccactaacaatctgctttctgtctctatgggtttgcctattctggacatttaata

SEQ ID NO: 105605 - DNA, 1076 bp, Homo sapiens
actttttttttttttttttgagacaaagtcattccgtcatgcaggctggagttcagtggtgtgatcttggctgcctgcattttgttttctttgtgtgccaagaactgttgctaggtctcaaagtccttaacactcttgttgttaagtactatattttgtgacagaagtccttagtatctgctgtaacagaatctcaatttctctctccatttttgtatgttcttttctgaatttggtctcatggattctacttattgccccgccgtgatctcccttaaagaactgctgtgagaaattacatagctatttgcagagccaaatccacatgacatgtgtgaaatacagaagtgataggcagcagaggttgagagcatagattgaagagctaccacactggcagcattgaattctggctccatcagttaccaaccctgtggctaggacatattctctaacaactcagtgtttgtttcctcacccataaatgggatgatagcagaccctacctgcaatatagagcgattatgaggattcaattgtcagacatacattgcttataacagtgccctgtacacagtaaagtatagatatgtggtagtgaggcagatagcctatgtaaccacgtgttagtttccaattctgcagttaactaccaccatgaccaagtttgaatttatgttacttcacattaatgtcattagattacttgttgttatacattaataaacagttgttttgcatattcgtggttctaaattcactcataactttaaatgtgcaatataatatcaatgttttttatgctcttgtcttaatttgttgttgtatttttaaggaatctgaagatttttgagtttctaagtaacattgtttctgagaggatacatgtccaccttatgaattttgccattgctttttagatacttggcatatcgaaattttatgattgacacgtatcgtctaaacccccaagagtatttaactagcactgcttgtcggaggaacttgactggagatgtgtgtgctgtgatgaggtaaactgtttgactttttctgagacatttaactgtaggaat

SEQ ID NO: 105606 - DNA, 1022 bp, Homo sapiens
gcccagcccataatttggtttcttaatagaaaataatttcattaggttacaaataataaaatcaccacagagagaaaattgtaaaacatttcaatatcaaaaaaagtatttaaaatacgtttaaatgtatgcaataaaaatgtgtatcaagtaaacatttacttcagattaagtaaaactggacaaggaagaagcaagctattatggaacgagatctgggttatgagttatttatttagtctgaagtcctgtgcattgaaacagactttcttcaatcaacttgttaatcttattatgagagacctaccttctctgcattgattccctcatcatcataaatgagcaacaaaaccttatcagctggctaccttgtaccttaaatactgtgaaaggttgtttttacttgaaatttgtttttcaaatatctgatcgaatcggggagcttcattttatttaacctaacaactgaagtgtaagagatgttatatatatctctctctgtagttctttctttctttgaactttgtcttcttttctataggaagatgaagatcctgccaaaggtgatcagagtcgatcagttgaccttggggaagataatgtgacagagcagaccaatcacattattattcctagttatgcatcatggtttgattataactggtgagtggaccacttccatctgtgagcatggtactgagcagtacaagaactttccttgaaatcaggttgtgcctttctgcccatgttccttatcagaaattactatcactttggatgaagggagatggagagtgatttttatctttggaatgtgtttgtgttttttgtttgtttgtttgttttgttgttgttgagacagagtcttgctttgtcaccctggctagaatgcagtggtatgatctcgactcactgcaacctctgcctcccggtttcaagtgattctcttgcttcagcctcctgagtagctgggattacaggttcccgccgccgtgccaggctaatttttgtatttttagtag

SEQ ID NO: 105607 - DNA, 1135 bp, Homo sapiens
gaacttcatcatgccttacctagtgccagcggtcacagtagtgataaaaagcttaaatattacaggcatataataatgtaacttgttgttctttaatactacctctttcctattctgtactggcagttttacttttcattgtggaaatcaactgtctagtttacaaattttacctgggctttctttcatgctaagccctctatcctcagaaggcattgtcttactaagattagtaagggattggttatcacccgtttttttactcatcattctttactcacttcttctgaaacccaaaatgttgttattttagcaaaactcaggagacaagaatcgtaatcaagtcctgtatctgttattaagatcatgactatgatattagctcaagtagtaattaattgtaaattccccactgtttgaaatttttaatgatctttgctttgaatttctaattacctctgtgcttctgtgtagaattctaatttagtgaattattcagagtgattttgctttaataatgcactatttcattccttttctctgtccagtatcagttcttagaccattaattttccaaataacccaaagaacatttacctgtttttaaaatgaattgtgtgttttggttttgcagatgagcaggatgaagaaacagtcacagcaggaggaaaggtaacaattcagttaagcctggtgtgagagagcttctctaagggtcctgtgtaccgaacagtagaagcactgaattggacataacccaatttttggactatgaagcccttctggtttttgaatttttttttgtttttagtttttcccctaaggaaaacaaatacaatataagaaccatttctggaaggtgtttttgttagttttttcttttgagacaggctgttggttctcactgtaaccttgacctcctgggctcaggtgatccccctcccacctcagcctcccgagtagctgagactacttgtgtgcaccactacacccaactgatttttttattttttgtagagatggagttttttatgttgcccaggctggttgcgaactcctgggctcaagcaatctgtctgcctcagcctcccaaagtgatggcattacaggtgtcagccactgcgctcggcaaaat

SEQ ID NO: 105608 - DNA, 1060 bp, Homo sapiens
gtcccaattacttgggagcctgagatcaaaggatcgcttgagcctgggaggtcaaggctgcagtgagccatgatcgcaccactgcactcaagtctgggcgacagactgagtccctgtctgaaaacaaactaaaaaggtattagttcttccttaattttttttaaaagaatgaatggattagaagtgagaatcaaaacaaatgcatcataaactttaataaaaaaaacttttgtggaagggattgaaagattgttttcatgttttgttgagtattttgtattgtttgcttttatgatgaaactatatggtgcttgggtaatgagaatatagtctgttaaatatttcatagctgggcttatgatttttacctgaaagtgtattgaatggtgttgcagttgtagtgagatgcatgtcgtttaatcatgtcctattctgttttctttctaaaaagaagtacaacttttcccacataaacataactcttttttttctttttctagtgaacctaaagaaagatagtgaaaatacacctgttaaaggaggaactgtagcggatctaggtaagcacctaaaatctatacactggtctgtgctttctgtcttgaatatgtcatctcctttgatagtctattcttccaaggtcttgttctgttggtcaggctggagtgcagtggtgtaatatagctcaccacagctttaaacttctgggctccagcgattttcctaccttagtcttccaagtagttcggattataggcacacaccaccatgcccagcttgatacactccttcttttcttttttttttaagacggaatctcactctgtcacccagggctcactgcaacctctgcctcctgggtttaagtgattctcctgtctcagcctcctgagtagctaggattacaggcttgcgccaccacgcccagctaatttttgtatttttagtagagacggggtttcaccatgttcaggcctgtctcgaactcctgacctcatgatccgcctgtctcggcctcccaaagtgctgggattacaggcgtgagccaccgtgactggcc

SEQ ID NO: 105609 - DNA, 1125 bp, Homo sapiens
tcttttattggctggttagatgtaatttgggggaagttatctaattttttctttttaatgtttgccttttttatttttaaaaattcttttagatggagtctctctctgtcacccaggcaggagtgcactggcgccatctcagctcactccaacctccaccttccgggttcaagcgattctcctacctcagtctgctgagcagatgggattacaggcgcctgccaccatgcccggcttatttttgtattttcagtagagacggggattcgctatgttggtcaggctggtctcaaactcctgaccttagtgatccacctgcctcggcctcccaaagtgctctgattacaggcatgaaccaccgcgaccgacctactgtttgtcttttaaagtgatcttgagcatatgttctacaaataatgaaggtgtacaacctcagaaactgtttgctatcagtagctataatcagtcttgtttatatttcatatacttgtatgttttagccaagctagcctttatgggaagcgcagaagtcagaaagaggaagatgagcaagaagatctaaccaaggatatggaagacccaacacctgtacccaatatagaagaagtagtacttcccaaaaatggtttgtattcttctgcatgagagtgttagatttaatttagtcattctcagcaataccatgggatgattcattgcttgctgtgggtccacagttctcgactttcaagtatgaatagattgtcccttttatggatatctttttttaattttctttaatcatttgagtagttttactctttgtttatagagaaaacttacagcgaccaaaaacatctttaatttagtaatgttttaaaattaatggtttttaaattgcaacagaatcacattcatatgaaaaagtggaatacgtacctatatatagtttaacttattgaaatctctagggaatgctttatgtggatgcaaatttgaagttctctggtaatgaatttcttctaagtgtgatgaaccttagttaccagttatgtaaattctggcctaacttctattcaatgtaattaaattcaaagtgggctgggcatggtggcttatacctgtaaccccagcacttggggagac

SEQ ID NO: 105610 - DNA, 1178 bp, Homo sapiens
ttcccgcctcggcttcccaaagtgctgagattacaggcatgagccatggcacccagcctagacattgactttaaatcatgttgccatcttgcttaacatttcttatgacatgaagttatcttctgtttattttagagattaagaataattcctataatgctacattttcacaggatcgtttggcctgtctttgtattttgtcagtttagtagagtgtatttcacatttttccagtagttattgaaatacaattctcacctcaaaacagaatgtgaacagtagcagtttttagttgtgcagggtttcagcatgtctgttatagcatagtttgaataactgatagccgatatttccattgatgatatatatcacctgaaaggtcagggaaagtttcttgattactggtgttcctggatgattaatgatattctttttatttgctctgaactaaggatatgctgttgtctttgtgtgtggagattcaccttttgccaaggatttgtagaaactgaggagcaaagatagctgatacttatttccatttacttcttcctagccagtcagaagtccagaaagaagagatagaaaagcatcagctaatgctcgaaagaggaaacattcgccttcgcctccccctccgacaccaacagaatcacggaagaagagtgggaagaaagggtaagaactattacatgattcaaagggcattaaaacaggccggacgtggtggcttacacttataatcccagcacttttggaggctgaggtgggcagatcaactgaggtcagtagttcaaatccagcctggccaacatggtgaaacctcgtctctactaaaaatataaaaattagctgggcacggtggtgcacgcctgtcatcccagctacttgggaggctgaggctggagaatcacttggaatttttttttttttttgtatctaagtatgtattgagaagcatgactggtaagaagtttaagacattatattcaccatgtttagtgtctccttttctgattttaccacttgtcccatttgtgatcaaataagctcatagaagagatgaatatgtggctgcttgatgttctgcaaagcatggcagtacaacgcctggttcagggctacacttttgtacttagtgagctttggttgaatgaggattacgatttctactgaat

SEQ ID NO: 105611 - DNA, 1021 bp, Homo sapiens
tggggcaggtgatcggcctctgcgaatgtgctctgtcatcaacacttagagtgttgttgataaacccaaagacatccttcgtgcctaaagcaatgactgattttggctctgtgctgttgaatgtttttatcagtgattttcatgaacataaggatgaaatgattaagcaaaacaaatttgagggactttgctatcaaaatctgggtctagtataaattattgatgctttcttgttctctttaatatggaataaaaatagagatgattaaattacaactcacatatcattagtagtatcacattattaatgttttatgcatttgaggctttgaaaataaatcagcttgtttccttctcaatactgtaaaaccttgagtgattttgttatttatgtagatattgatgctttgatatggttttaggttcatgtgaaatggattttggacactgatattttcaatgaatggatgaatgaggaggattatgaggtggatgaaaataggaagcctgtgagttttcgtcagcggatttcaaccaagaatgaagaggtattttctttggcacagtttctcatcattaagtctgtcttcttggcctaaatgttattaaatcttcatcagtaagctgtcatatacaaaccacttaggaactttcacatctgcctgatggctgatgtgccatcaggtgaaaattccaaagtggctgtaatagccatctcagaaacaataacctcccaaaaagtggtatgaaaatcttaaaaggttattaagatttaaagtggcccatgcagaagggtagtggtatagctgattttgcccactagatctgaagtgtaatatcacagcagaatttaatgtagctgttggttttcctatgcaaaactcattttgtttagtatgtatatatattttttgagacagagtcttgctctgtagcccaggctggagtacagtggcactatctcggctcactgcaacctctgcctcttgggttgaagcgattctcctgcctcaagcctccc

SEQ ID NO: 105612 - DNA, 1043 bp, Homo sapiens
tagtaatgatgttgatgctgaaattgaagatccaccaattccagaaaaaccatggaaggtaaatgatttaacaaaaaaaatcttacaataatctttttaaaattttttttgagatggcgtctcactctgtcgcccaggctagagtggagtggtgcgatcttggcttactgcaacctccgcctccgggttcaagtgattctcgtgcgttagcctcccaagtagctgggactataggcacacgccaccacgttaggctaatttttgtatttttagtagagacggagttttactggattggtcaggctggcctcagcctcccgacctcgggtgatcggcctgcctcagcctcccaaagtgctgggattacaggtgtaagccatcgtgcctggccaaaaaaattcttacaataatctaatagctcttctcagctgttttctacagcagtctctctaaggagatacagaatgttggtttccctttcctgtcatccatttacaagatacgtacggccatgaagactttattatctaggtcttagatgaaatgtctgcagtgcttgatgtttgaggagaatccaaaggcaggtcagattgtggtttgtgagagaggagtgtgaggagtagagttgaacatcactgatgatgtcatttgggtagcttggaagcaatgcctgtgtgacttttagaatgatacagacttactttattaatcatttctaccataatgtaataagagtccatacattgacttttaatcaacttttgatgtggaaataaagtttatggggcatggtggctcacacctgtaataacaacactttgggaggctaaggcaggaggattgcttgaccagcctgagctaccaaaaaaaaaaaattatctgagcataatgtcaagtgccctatagtcctagctacatacttggaaggctgaggcaggaggattgcttgagctgaggaggttgaggctgcagtgagccgtgattgcaaccacttcactccagcctttataacaagttaagaccctgtctcaaaacaaaaaaat

SEQ ID NO: 105613 - DNA, 1026 bp, Homo sapiens
aagagtataaggttgggttttttttttttttttttttttttgagatggagtctcactctcacccaggctggagtgcagtggtgcgatctaagctcactgcaaactccacctcccaggttcatgcgattctcctgcctcagcctcccaagtagctgagattacaggtgcacactacaacgccccgctaatttttgtattttttaatagaaacgggatttcaccatgttggccaggctggtcttgaactccttatacttcaggtggtccactgccttggcctcccaaagtgctggaattacaggcgtgagtcactgtgcctggccaggttccatattcttttgaactgacctctgaatggtgactaaaaggaagctaatacttgtcatcatactagatgtcatttggtttcatagtttactggtcagtatagtgatattcacagtgttttattttggttaaaattttgtgcctattttatgattttgttggagtaggtggtctgatttatgtcagtgagttcttgttgataaagaggctccttgagcaaagagatgtgaagaaataagagagtaagctatatggatatctggacagtgagggagcaatctgtgtagagtgtatgcaggcttagtagggaatgttggaataatgttatcaaagcctgtgtggctcaaatataacatgaataaggacagaagagcaggaaatggggtcagagtctctgtcagataattagatcttgaagccatggcaagccatcgttaggttttttactttcactctgatagggtgagagcagttggaagtgttggatcagtagagtgatgtggactgacttagttttcaaaaagatcacaatggctatgtgaaaaattaactctttgagagaccaagagaccaatggcagaagcaggaaaaccagtgagcagagtggaggggtaagaattagatagattctagacatacttttgaagttagagctggtcacatttgcagttggtttgattacaggatgtgcttgagaat

SEQ ID NO: 105614 - DNA, 1007 bp, Homo sapiens
tcggctcactgcaagctccaacctcccgggttcacgccattctcctgcctcagcctcccgagtagctgggactacaggcgcccaccaccacgcctggctaatttttttgtatttttagtagagacagggtttcaccgtgttagccaggatggtcttgatctcctgacctcatgatccgcccatctcggcctcccaaagtgctgggattacaggcgtgagccacttgccattgctatttttaagattaactgtaatcccttccgtagctaaaaacactacattagaccattaaagtaaatttgggtaaaattggggaggaagattaatctggcaatctggtatggtatcttaatgaaaaagttgctgaatttctttaggtcatgcttctcaatattttttgtggcagaaaaggttatctgggggtggtttgtatattgcataaataatatgatattatttcaaaactaagagaatttgaaagtctgttcttttcatcctcagaacaattgtttgaccagacccaacatctacctcattccagacattgatctgaagttggctaacaaattgaaagatatcatcaaacgacatcaggtaatagacacaatcacttcagataataatagacacgatcacttcattttgtagttgtaagcctctaataaatgacaaccatagtaatgttttggattttttgatatatttgcatcaaaagaaatttttttcttgagttttttttttttttttctttttagagatgaggtgtcactttgttgcccaggctggaatgcaatggcactatcctagcatccttgctcactgtagctttggacttctgggctcaagagatcttccagtttttttgttgttgtggttgagagagtctcgcgctgtcgcccaggctagagtgtaggggtgcaatcccggttcattgcatcctctgcctccgaggttcaagtgattctcgtgcctcagcctccgaaattgctgggactacaggtgtgtgc

SEQ ID NO: 105615 - DNA, 1326 bp, Homo sapiens
gtctctgctcttgactgctactgtggccagttaaaaattttatttggagaaaacttgtctgtttaaatcacaagtcttacagctgtattagaattaaatacccaagatgctttcctttatctaagagaacacagatactgctgaatttgaacaaatgattttttttttttttgagacggagtcttgctctgtcaccaggctagagtgcagtggcgtgatcccggctcactgcaacctccgcctctcgggttcaagtgattctcctgcctcagcctcctgagtagctgggattacaggtgtgcaccaccatgcccagttgatttttgtatttttagtagagatggggtttcaccacgttggccaggctggtcttgaactcttgatctcttgatccacccgcctcagcctcccaaagtgctgggattacaggcgtcagccactgcgcccagcctggatatgtggactacttttctataagatgtaagatgtcttagatttaaggaaaattagatagatatgtcatggaattgatacttcattttcactgaggtggatcttaatatctcttttataagggtgttgatactatgtattcttatgttactgagagaatgtctcacacattttgtagagttattttaattttcaaatctttctaactcatttgcatcgaattctaaaaccaagttttcatttgtgtttaagctgggagacaaattaactagggtttttctttttttttaggcggaggtttgacctacagaacccatctcgaatggatcgtaatgtggaaatgtttatgaacattgaaaaaacattggtgcaggtaacttggaaacttaggttatttaaaaagtttacctttaatatattttcagttttaagattggctggccaggcgcggtggctcatgcctgtaatcccagcactttgggaggccgaggcaaggcggatcacgaggtcaggagatcgagaccatcctggctaacacggtgaaaccccgtctctacttaaaaaaaaaaaaaaaaaaaattagccgcacgtggttccgggtacctgtagtcccagctactctggtggctgaggcaagagaatggtgtgaacctgggaggcggagcttgcagtgagccgagattgcgcccctgcactccagcctgggcaacagagcgagactccgtctcaaacaacaaaaacaaaaaaaagattggctctcaaaaaaacaaaaaaaaccacagattggctttattggattgccaaaagaacaaaggaagaaaatgttctgaaaggtattgttttattatttttatgggtgtttggggattagag

SEQ ID NO: 105616 - DNA, 1022 bp, Homo sapiens
tgtcatccagggctggagtgcagtagggcgatcagggctcaccgcaggctcaacctctcaggctgaagtgatcctcccaccccagcctcctggataggattgcaggtgtgtgccacaatgcacagctaatttttaaatttttttctagagactggatctccctgtgttgcccagactggtcttgaactcctgggcttaagtgatcctcctgtttcacgctcccagagtgttgggattacaggcatgagccaccatgcccagcctaatctacttttagaaaaatgtattgattcctcagtttattcaagaagatgtttaaggaggttgtttaattagtatttgtttatatatttgaatttataaaacttagaattaagacatgagtaattttgtcagaagctttatttttctcatgtgtaatttgtatcatttttaggcaaagtgtttcatggatttcaaagctggaggcgccttatgtcacattcttggggctgcttacaagtataaaaatgaacagggatggtaagtttttgtatttgtttgcatgttttgatcttaagttatttacttttaagtcctgtttccttgtgttagaaaatcctgtaagcacatgatgattaatgtgttttaccaagagccctaatttaccttgtttctacatccaagaaaaatatcaagcaaccacgtatttatttatttttgagacagggtcttaaaaataggaccaaccaaggctgttggcaaggctagaagtgcagtggtggaatctcaggtcactgcatcccgcgcatcagattcaagcaattctcatgccccagcctcctgagtagctgggactgtaggcgtgcaccaccatgcctggctaatttttctatttttagtagaaatagggttttgtcatgttggtcaggctgctctcaaactcctggcctcaagcactccacccatctcagcctcccaaagtgctgggattacaggcgtgagccaccgcacccggccacaaccaagtatttattagggaa

SEQ ID NO: 105617 - DNA, 1179 bp, Homo sapiens
ggccgctgggggtggagggcctgagggaaagcggggcccggcgcagtcccagtccgggtgcagggccctcggccagcactcgataccctagacaggctttcccttgggcatttctcgcaccaggccttttccctccagcggaggcgggctatgacacataacccacctgcggttgttgaccgcataatgattcgacgtcggtagcgagggaagagcaaggctcaaaaaccggcgctcactagggcagaatgcagcctacggaggatggcggaagaggcggctgaggccgcaggacgtgctattccaaggcacggccgcacgagtgctacgcatgcgcgtgcgctggctcgcgtcagatacagtgccagttcccagatggggcggggccgggcgtccgcgccggaagagggttggctgggcggggccgggaagcggcagtggcggctacgcgcgcgggggtgcgcgcgggaacgaccgggaaacaccgcgagggccggggtgggccaggctgtggggacgacgggctgcgacgatggccgcagcggcgggcggcggcgggccggggacagcggtaggcgccacgggctcggggattgcggcggcagccgcaggcctagctgtttatcgacggaaggatgggggcccggccaccaagttttgggagagcccggagacggtgtcccagctggattcggtgcgggtctggctgggcaagcactacaagaaggtgggttcgcgcgcccgtgggggccgggagaccacgcgaccggggccggaggcggcagctggcctcgcgggcctcgggccgcccctcccccccgcacgccacgagggacaacaaaggcaggcgccgggcccgccacgcccccgccgcccgctctgggcgcccgcgatcccggggcctgactggggttcggggctctctcctctgagcctacgcacccatggtgaaagcccctgctcagtctcgtgtgccagagcaggtcgagctcagccactaagcgagtgtgactctctctcttttgtcagctgccttaggtgtgtgaacaatgatccctaaagaccgagcaagcgtggtaaaagcagcttcaagttttgtttagagcgtattcaaagtctcgagggggtttgctacctgttgttgaattgctaaacgactgggatgattgtattcgttaa

SEQ ID NO: 105618 - DNA, 1024 bp, Homo sapiens
ggcgtggctacgagctgtggcggggaaggcgggtggaatcccggagcccgagctggaaaccgttccccgctcagccatgacccgggctgtttattcgcatcaggaggcgcgggtggctcgcagagggcgagaagacccttcccgctttcacactgcaggcagctaagtcgccgagaaaggcagcaacttgacgcccgaccccgccacccaaacccgctcgctctgcgaccccagagcagccggcgccaacccgtccccttcgcgactccgccggaagtcccgcctgcaccgccgccgcgccccattgggccgggtgctggggcatcccgggcgctgggtgccccgagcggctacgacgagtcccaggtggggccgggctccaggcccgcgggggagcggagccgtgcgccgcaggcgggctccgtgacgccgggtggggaacgccgggccggtggcgggacttccgccacgggactcggaaggggccgcgccgccgctgctgggagttgtagtccggccgtggttgggggagccgcggctcatgcgcggtgcacagaggcttgtttcacatctgtaacaacaggtgaattgggctttttattctcccctttcgtgccctcttgaggagcctgccgcggccgggggtggtcgtcgtgaggagggggcccggtccgaccgccagcctggcggagagtggggcggagacgccggcgggcccgaggagcaggccgggcatcctaggcctgcccgggaagccggcccggccgatccgtgggcagccaggcctcggcctgccgttgccatggagcccgggcgggggcgggggccagaccggtccgccggggcgggcctcgcagccaggggctccgcggaggccgtgggagaggccgcttcattggcgcaacgacgccttcgcctcgggatgcgccgtttccccaggcagggcctggaggaagcctcctgagtgccccgagacctttgtctacttctcctccttcccggtgctgcccggaccgttcgtcca

SEQ ID NO: 105619 - DNA, 1091 bp, Homo sapiens
ttcaccatcttggccagaatgggctcgaactcctgacctcaggcaatctgcctgcctcagcctcccaaagtgatgggattacaggcgtgagccaccaagcctggcccactacaaagatttttaaacattactgcattatggccggtcgtggtggctgatgcctgtaatcccagcactttgggaggctgaggcgggcggatcacaaggtcaggagttcgagtccagcctggccaacatggtgaaacactgtctctaccaaaaatacaaaaattagccaggcgtggtggcgggtgcctgtaatcccagctactagggagactgagacaggagaatcatttgaatccgggaggtggaggttgtagtgagcagagatcatgccattgcactccagcctgggcaacaagagcaacactctgtctcaaaacaaaacaccattactgactgcattacaaggaagaccgctttcttttggatctctatgaaatgttctagagctctgtaaattctgtctctaaaagatcctgtcttgattctcatagtatcgtttttttagattagtacaggaaaaagaatggtacatgagcctaaattgacatattgggctagaggtttagggacttttaaaaagcaaaactggccgggcacggtggctcatgcctgtaatcccagcactttgggaggccgaggcaggcagatcatgaggccaagagatcgagaccatcctggccaacatgatgaaagcccatctctactaaaaatccaaaaaaatttagccgtgcatggtggcgtgtgcctgtagtcccagctacttggaaggctgagacaggagaatagcttgaacccgggaggtggaggttgcagtaagctgatattacgccattgccctccaacctggtgacagagcgagactctgtctcaaaaaaaaaaaaaaaaaaaaaaaagcaaaatcaagagtctatttgcaagcaaattaacttacaaattttttttttagaggcagggtctcactgtgttgcctaggctggtcttgaactcctggcctcaagcgatccttcacctgggcgtcccaaagtgctgggactacaggcatg

SEQ ID NO: 105620 - DNA, 1824 bp, Homo sapiens
actacaggcccgcacaaccatgcctggctcatttttttgtatttttttagtagagacggggtttcaccgtgttagcaaggatggtctcgatctcctgacctcgtgatccgcccacctcggcctcccaaagtgctgggattacaggcgtgagccaccgcgcctggccggaatgtaacttcttaaagtaaatgttatcattgttgatattgtattgaagttttctctgtgatataccatatcctatgggctgaaatttccagcatcccttggggagtggaggccatcagggcagacctgctatggacctgaaagattccgccccaggtcagccctccactccccacctccccacaatttgagaatgagagggaacaggagtcaggagccggagtgttggccccagtagactccaatcaatgttggacatgattctgattggctaaacactgtgtagatgtttttaaacaaagtccatttaaggttactgcactaatcaaggagtactggattataaaaacatctataaatctgagtttgagtattttttaaaacaaaattgttaaaccagatgtgttgcttttttttcttgtcatctctaagtatagtcctcagttaaatatactaataagcaaaatgcaccaaaacttttggctaatagttgtgctttaacttaatatttgttatttcatagagactgctatgaaaagctttttattctgaatcactgtacagttattctttgatcctgtcagtcaaatctcatttttagggtcttgactaggttttatgaaagcccagtaaggcagtttgcccataaggcagtcatcagtcctgtttcctgatgccacatgacagaaggggtccatgtagaatttcgtttcttcctggaagtcccaaggaaacctgcaagtattatgataactaggaaggaaacctgcaagtattatgatgaactgggaaggaaacctgtaagtattatgatgaactagatagaactacatgtctctcatgatgaaatgcatctccctctgtttaacaggatatggggagttttaggacagggaagaaagtgctcaattagaaagaagcaaagacaattactctagagtggagctggccttccagtcctcaagactggggagcagcagttggggctcattagtgaagagtttcatttttttcattttctgaacagtgctctccatgttactgaagtcttctttgtgggttgctggaccaggaatattaaccattgcctcttggccctccttgttctcaggattccagctttccctcctggccagaaatgttcagcctggactcattcagaaaaggtaagactgcaactgtgcttgtgacctcatgcccttccttattgggatgggcagctctgagggctgtgaaagtctctccccagtatgtagttcttgcacatttctttgggtggttttccaaaggcctttcctatagccttccttttgcatggtgcttagaatctgtgccaacccttgccatggcctttgccatgcttcctcccagtgcccccttctgcgtactccctgcttattaaaatccttttttttttttctgagatggagcctcacttctgtcgcccaggctggagtgcagtggcacgatctcggctcagtgcaatctcctcctcctgggttgaagcaattctcctgcctcagcctccgtagtagctgggattacaggaaccagctgccaagctcggctaattcttttttttttttttagttgagacggggtttcaccatgttggccaggctggtctcaaactgttgacctcaagtgatccaccca

SEQ ID NO: 105621 - DNA, 2153 bp, Homo sapiens
agacacgtggtgcttttgagttgatgtagtaccaaggctttcagctttctcctgttgtcctgtcacatcctcacaacttaagactaagagaagtatataggatgggtgttaacctcatagggggtagctaagggaacaggaagagtttgagggctctctctaaggctgtcacatatcacatcatatgagacgcttgccttcttcctgtgtggcgttgttagtgctgttcctcagaacctgtggctgctcccagcactgtccagcagccctgttgcccagagctcctcacggatgctctgagtgagtcagttcaggggtctgtgactgtgaggggtgagaacatgtcgccctgatgccctctctctttccccagatcgggcccagcacaggcagcgtcagtgcaaacttcccccaccccgccttccacccatgtgtgtcaaccctaccccaggagggaccatctctcgaggtaagggaggagccttgcctccagcaacagcttggtccagggtctgtggggaggtgggtggcaatgggagccctggtgccagggccacagccctccagaaagtgagtgaggaagggtgggattagcagagctattggagccctgagggagaaattacttggaaaagtctggattttttcatgatcccttgactcatggcctggaccctgcagtcttcttgggcctccttgtgtggcctggactaaagcctaggctcagtttgggtggttctctcagcacccgcatggagaatccgcagggcttggggcctcgaggctcctagaagtccctgatcaggtggctcagagagcagggtgcttgtagcagggctggaacagatagccctgactcaaccctagtgctttccatcttggaggctttgggaatacacacagatcactttcctgtctcccatgtggcacctcaaagcactttactgacattaaaatgtgcctctcagtccacttggcaaggtaggctgtccttttgattggggagaatgttagagcaccaggtaagtggcagcttacctcaggccctatcagtacccagggatggcgccagggataggacccagggaagcatcgctgcacatgagcgcctcctcttctccctcagacttattaatataccttttccaggcctgctaaggccagtgctcctggaagcctttttgtcctaatagctgctcttttctgccccataggctgcctgttcacacccctctgcctagcagaaggagccctgttttaggtcatagggtcattgtctcatctagagacagcatgtctactctagggtctgtctgtaaagtgctttgaaggtcaagagctcaggaggagtgtggggaacacagagcacctcagtttctgcagcccatgctgctgctgcgtcccaggcagttttcacactcctgctgctgcggccctgactactgacagcaggatagaaatgagtacttctagccccctgaccatttgacttaggttttaaagaaatgccacccccctaccgttaccaaaacaagagttgattgcccttttttttttctttcttaaaatgccctgtaactcgaaaaggctgaacgttaacatttccaacatggcaggtgagtggctctgagagtgtcagatgtgctttggctaagcttgaagacggttagtcggggttaaccaggcagttggctaggcagtgccttcttgagcacacgcggaggagaacactgatcgcaggatgggcagttgctgcctctggggcagccccacaagtgctgtgctctcttccccagaggagtgcagacccctgagcctggtggtctctcctcacagctgcgcctccaggaggcatccgtgggtgtgtgcattttgccttctctctctcagctagaagcaacagcccctcttggcctgcggatagcgatcaggcctctcccctgtgctttctagctccctagaggcttcactggtgctcctgcccttaaggagatgtgttgcagcaacagtctctctggtgtttatataaggaaaacagtgcaccgaaaatggtggccatttatattgatcacagtactcagcagaatcagatttggaactgaaaaaaaatgatcacctccctacctccttgaccccccttcctccactgccaa

SEQ ID NO: 105622 - DNA, 1971 bp, Homo sapiens
cttccttagatgacattgagctaaggcctagcattattttccccccaacagcctcattccatcttcctgccttccatccacacgactgctggtttagatttgctggagagtgagctctgcagggtcctagccctgggcagcgccgagcccgcctactgaaggcccagggctgtggtgagcgaggacgggctgctgatgccctcgcctaggcttgggcttcgggtccgcccggcccgcagggggcgcgcggcgctcgggccggccgctcccgttctcttcgcccggtccctgccgcgcacaggcctcggggtcggcgggagcacgatggcggccgctaggagactcatggcgctggccgccggcatctctccgcgcctgcagccgctgggtccccgcgctgctgggcgacagggtcgctcgcgcggcttctcttcaagctgcgcccaccccgaccacaccaaggaagccgccgaggccgagtcagggatggcccccggcgggcctggggaaggcgacggaagcttggtgaacggtgagggcatcggcgggggcgggcggtccgcagcgcccttgactcctgggatggcagagctaggggcgcgggccgaaatcgggcctggcggccgggggtcctctcttccatagtggccaagttcgccatccgtcggcgggcagcggccttgctgtttgtaaagcttagcgtggcacaggcccgaatggacccttagagtacctgctcccggcaagaataggtgagaggtgcgagacctcgagggagtggggaaaacgagtaaaagtccaactcctgccaggatgagtggccaagggctagagcttctagggacaagcatgccctcaccagtgtgagaaatagcccaaagtaactcctgggacatcaggatctcaaatagagacagaatgactgttctggtggattccagctttgtgcctcccaaatagtgcagaggataaaactgttgaaagcatcaaggatgggtagagagcgccagcctccaccaaccttatagagctgaaggtgggggcggggtggtggtctcagtgcagctctattgttaaaccagtgggtgtaatgggctactcgaagttgggtccctctgtgacgaaaccccccccgccccggccaagtccacttagatatggtttcttaactgcttaactgcttgactcttagttgctttacaagttaccgcttagagggagacaggatcaggtgtcctccatcctggccacttgacacaggagtctgtcccaaggaaacagtctcaaaccaggcagcagagttacatcagaacgcttggaagcactttttgaaaatatagagtcgcctccaacatcgctcccattctcaggtcccctgtggggagctggatgtccatgcggtgaaaaagctccccaggtgatcagtgtacacgcaggtgcacatgtgcatatatacagctccttttggagctgccagaggctagagtggagaatgatatggccccccatgttcctagcagacctcttcatgacctggttaagccttgtgtctggtacaagcttaccctaggtagatatctcttccctttctgctctgagattaatccaaaaaacaagaaaaagaagcgaggtacctctcatggtatctgatgcatcaattttccccttgattccagagaacttgggggaggagtaattcatgcctgctcagatgtagaggttttctttcttttttttttttttttttgagatggagtttcactcttgttgcccaggctggattgcagtggcgcgatcttgcctcactacaacctccgcctcccgggttcaagcgattctcctgcttcagcctcccaagtagctgggactacaggcgcctgccaccaggcctggctaattttttgtatttttagtagagacgaggtttcacaaggtttcactatgttggccaggttgtcaaactcctgacct

SEQ ID NO: 105623 - DNA, 1038 bp, Homo sapiens
tattttaggaagagccttgcattgtcttgatctccagtttgtgtgtgtggtggatttttgtttttgtattttttgcttgcttgtttgtttagtgtcttctttcagacatcagactggggggtttattgaccaaccaggcttttgtaggtgatgtatgaaatgaggagattgggcggagaagaggatgctggtaggatcccttctgtggtgtgtgggtcattggcccttcttcaggagatggttattcaagtgggtctggccccactcttccctgtaaaccctgaagtcattcctcttttcttttccaagatgctcctgggtggtttggggtcatgagccaacatcctcagaatccagcccagggttgccctgatacacaccccatggagtttttaaaagaaaaagaacaactgtaatgcttttgttcttattttcttagcttctagggacctattaaaagagttcccacagcccaaaaatcttctcaacagtgtgattggaagagccctcggcatctcacatgcaaaagacaaactagtctacgtgcacacaaatggaccgaagaaaaaggtaactctgctggtggcaaggaaaaacattggtatgactcagaaaggaggctgtttgtcctttctgtcttaggtttctttgtcaaggaggccatagaatgggtttcctgaattaaaatggtcagcagagactcagagcaaagctaggtttgaagaagagccagaatacacgtgcctggtttagggaagaggaacacagggcaaatgaggtgccatcttatctaagacaggcgcctatacggatccttggtttttgcccccatcgactaaggactgcagagggttagagttaatgataattcttgcccttacagtcttatagattctggaaccatagaagcatgccagcaaaccattctggatgattttttaacatttattttatttatttttgtagagacagagtcagagtctctctgtcacccaggctggagtgcagtggcacaatcataactcacagtaacctcaa

SEQ ID NO: 105624 - DNA, 1022 bp, Homo sapiens
ctaacatagtgaaatcccgtctctactaaaagtacaaaaaattagctgggcgtggtggtgggcacctgtagccccagctacttgggaggctgaggcaggagaatggcgtgaggcaacagtgcagcctgggcaacagtgcaagactctgtctcaaaaaaaaagatgaagatggatcccggcttggcctctggctagaacatggcaccttgaaggagcaaaacaacttggggtagaacagattgtttcacggtgagacagttagagccttataaggagttaatgatgggattggggttctgtcctctgttctcaactctgaacctagcacattgctgctgtgaggtctgctgctgtgaggtccaccactgtttattttccatgtaatttgcaacaactctagtctggagtggcaagacttctgatttctctcttctcttccccagaaagtcacactgcacataaaatggcccaagagcgtggaggtagaaggctatggcagcaagaagatcgatgctgagcggcaggctgcagctgcagcctgccagctgttcaaggtgacccttcctcagtgaaagccactgagaccttcctcctggaaactccttgccctttgtttttattggtagaggttggcccagtgttctaccactcacctgccctgagcccttcccacttcctgattcctttcttactgttcagccaatgagatatatatatatatatatatatatatattttttttttttttttcctgtgtttttggtttttttttttttcctttgagtcagagtttcactctgttgcccaggctggagtgcagtgatgcgatcttggctcactgcaacctccactttctaggttcaagtgattctcatgccttagcctcccaagtagctgggattgcaggtgcccaccaccacgcctggctaatatttgtatttttagtagagagggggtttcaccctgttggccaggctggtcttgaactcctgacctcaagtgatccacctgcctaggcctct

SEQ ID NO: 105625 - DNA, 1444 bp, Homo sapiens
cactttgggaggccaaggcgggcggatctgttgggtccaggagttcaagaccatcctgggcaacatggtgaagccctgttgctacaaaaattcgctgggcgttgtggtgcatgcctttagtcccagttactttggaagttgaggtgggagggtcacctgagcccaggaggcagaggttgtagtgagccgtgattgtgccactgcactccagtctgggtgacagagcgagaccctgtgtcaaaaaaacaaaaaacaaacagtatcttctgctcacccattgccatgtggggttatttgtttgcatcaaagctaggcatctttgagagttccatgcccagttctggactaggggctgaagtgggtaaacagatgaaaaaccacggctgcacaacacaacttaacggtgtagctggacacggaccaggccgactgaggtgtaaagatggtatcaatccttaaaacgtcccttttcccctccagggttggggtctgctaggtccccggaatgagttgtttgacgcagccaaataccgagtgctagctgatcgctttggctcccctgccgacagctggtggcgtccggaacccaccatgccccctacttcctggcggcagctgaatccagagagtattcgaccagggggacctgggggcctatcccgctctttaggccgggaagaagaggaggacgaggaggaagagctagaagaagggaccatagatgttaccgacttcttgtccatgacccagcaggattcccacgctccactcagggactcaaggtacagatggaggatggggatgcagcagaggctggctgtgccttgacacggggatgggcgaatgttctctgctagctttctctgagatgggagcgcccctgcctcacatttcagcctgtgtgccccatcactcagtgtgtgtctgcccattcttgggggacagccagctgtggtcttctatgtggctgggcttttgcagaacagcagcatggagcccctgctctctgctatcttatctgtgtgagggaatggagggagcagtccccatgcagtgtggctgtgggaggagcagagacgcccggtttcccatccatttcatgccttctgcccttctggctccctgctgcagcgcagcgtcctcacccctacatcgcagagcctcagggaaattggtccaggaagagagaattctttcagttaaacttttggtcctcccagggggagttcctttgagatgacagatgacgacagtgccattagggctctgacccagtttccacttcccaagaaccttctggccaaggtgattcagattgcaacgtcatcctccacagctaaggtgagttgggtctcctagaagtttgtgtgggggccgtttacttggtcatgtctggtgttccctaaaggcaggtttagagagggctgagggggtgtgttcctcc

SEQ ID NO: 105626 - DNA, 1005 bp, Homo sapiens
gtccaggtgcagggtctttttgctcccgcaggatgtgcctggtttttagctcatgctgacagcttcaacccacagctgccacgatgttgccgagatgacagtgggctaggagggcaggtgatggcattgcccaagcactgtcttctgcagtggaagtcgaggtatagcaggagaagcgagcctgggactagggtgcctgagcccatgggcctgctcctggctatgcagcagcacctctagcatggctcacgcctggcacctgctgagatggtggctcattctgtctctgggctccttggcattctgagaatgccccaagtctcttcccattccctacatttctgtaaccatctctcttgccttccatgtagaacctcatgcagttccatactgtgggcaccaagaccaagctgtctacactcaccctgctctggccctgccccatgacctttgttgccaaagggcgccgcaaagcagaggctgagaataaggcggcagccttggcctgcaagaaactgaaggtgagtccaggaaggtcctgggtgtggtgcatgagaatgtcttgaagctcccctctgccagtggcaaatgggtcccattttctaggaaatgaaaccaccacagcaggccttttgcctggcacaaagacagctggtatgcaggcctcgcttgtaggccctgtggctgttgccatggcttttccagaggccctgtggagatactttgcccgtgacccagcattttccacactgttggcctgaacctggtgaggccgggaggaaacttgctcattgttctgaatagtataaagccgggaggagccgggcctgttttgagaggcagacctggtgtccagtatgatcctgataacccgggttttgtgggcagaatgaataatgtgacttgtgactgcagtgatgattgaggaagcagtcaggatcaaggtagagacagtgtggcagacagctggcagttctcttttttttgagacagggtctctgtggc

SEQ ID NO: 105627 - DNA, 1036 bp, Homo sapiens
ccaacaggggccaaccccctgcctctgggcgtgctggcaccatcagctataaggacctaaaggacaggaatctggtcctcataccacaggaggtgccaacacaagctccttgctgcaggaacaggcttctgccctctccccagacttcatgggttttacccaccagcctcactgacaaatggccctccagccactgcaaagcttgctccttcccagacaggcccctaccatgccaaggtgcttctgctcacagtgcgtgtgcatcaggccaaagctcagatgcctccagttctactcagtccttgttctgccctcgagtcacaggtagcatatctgtgccctctttatctcaccaattgcctgtcccctcttcctcgtctttctccaggttcttgttacctctcaccatcagctgtaactaaaacatggttcccagagccaactgtacccatgaaatggtgcacctgaccattcagagtaaagcaggcccatttctatcttggtctgcaaactaaacctccaccaacatgggttgagattactaactcctcaggcagtcagagacaatcccaactccctcccactactgtgccatcagctaactccaccagcccctttcaagagaacggccatggccaggagcggtggctcacgcctgcaatcccaacactttaggaagtgaaggtagaaagactgattgagcccaagattttaagaccagtcttcgcaacacagtgagacccttgtctctacaaaaaatgtttaaaaataagctgggagtggtggtgcatacctatggtcccagctatgcaggaggctgaggtgaaaggatcgcttaagcctaggagatcgaggctgcagtgagccatgatcgtgccactatactccagcctgggccacagagaccctgtctcaaaaaaaagagaactgccagctgtctgccacactgtctctaccttgatcctgactgcttcctcaatcatcactgcagtcacaagtcacattattcattctgcccacaaaacccgggttatca

SEQ ID NO: 105628 - DNA, 1048 bp, Homo sapiens
ctgagtccttgcccaagggcaagatgtcatcactctgcagccggagttctggggcgatccatgaactctccacagggtactggagggcagggaggcaagcaaaacaatgaaaaagaaattcctcattcacacacaaccagccactctgcaggattcgcctgggtcagatgttgtggcccaacccgctgggcagaggattaatttagtccatgactgccccgggatccttgtgggcaagactgggctgttcaggccagggggatcccaggccccaaactcagtgaagagaatggggaggtactactgcctgtcgcaggtggaggccttcagtctggagagatggaggcagactacagggagcaggggtggtgagggatgcagggcctcttacatggttcaggaaggtctctatcttgcggaggatgggctcgggcacctggatggtgcatggtcggcgctgggtctcacccagctcacgcaaagaggccaggttatacatggcgtgtgtaagcggttcgttgttcctgtccaccaggcccaggctctgcagggggacatgcaagactcagtctatgctctggggctccccaaaaaccagcccagacaagctcaggagctccaacgcataagttgtgccaagtaatctctaagagattttggattttggctgacatggtgatggagggagaaattatgaactaggaaaatgttaacttaccaaaataaacgttttaaaaaatgaactaaagttaattcaggccgggcgcggtggctcacgcctgtaatcccagcactttgggaggccgaggcaggcaaatcacctgaggtcaggggttcgagaccagcctggctaacatggtgaaaccccatctctactaaaaatacaaaaattagccaggtggggggccggcacctatagtcccagctactagggaggctgaggcacgagaatcgcctgaaccctggagacacaggttgcagtgagccgagatcatgacggtgcactccagcctgggcgacagagcgagactctgtctcaaagaaaata

SEQ ID NO: 105629 - DNA, 2131 bp, Homo sapiens
tacaggtgggatcctgtgcttcctgcctgggtggcaggagatcaaaggagtgcagcagcgcctccaggaggccctgggcatgcacgagagcaagtacctcatcctgccaggtgagagccccggcggagggaccagggacctttggaaaccagcctgacctctgtcctagggactgacccaactgggactccaggggccccggtttctgaccaagctgtggcacttttcactgggcatagtgtttatctgcgcctgtttcatcaaaatggggtcaaaatccttgccctgcccacattccaggggggaattctggtggaagcagtgcccataactggtgtgtgtcttgcccaccagtgcactccaacatccccatgatggatcagaaggccatattccagcagcctccagttggggtgcgcaagattgtcttggccaccaacattgctgagacttccatcacaatcaatgacatcgtgcatgtggtggacagtgggctgcacaaggaagaacgctatgacctgaagaccaaggtggcacctacctcctgggcccggccaaccactgggggagggactccgttttgaggtggtccccagcccagatctaccttagacctgctttgtgtgtcttcagaaggccgcgcttgtggggtctcagtgttcctgatgtagggggctggtgagggttactcagggagtggggaagcactgaggaagtggcatttgtgtgctgcttacttgccacctcctccaggtgtcctgcctggagacagtgtgggtatcaagagccaatgtgatccagcgccggggccgggcgggccgctgccagtccggctttgcctaccacttgttccctcgaagccggctggagaaaatggtccctttccaagtgccagagatcctgcgcacacctcttgagaacctggtgctgcaagcgaaaatccacatgcctgagaagacggtgcggcggggcggggcaggggctggcctggggaccaggcaggtgggaggcaggctcatggcgggctctggctctgtcataggcggtggagttcctgtccaaggctgtggacagtccaaacatcaaggcagtggacgaggctgtgatcttgctccaggagatcggtatgtaggggctgggctgggctgggctggggagtggctctcgagggtggtactgacagctgagccgttgcaggggtgctggaccagcgggagtacctgactaccctggggcagcgcctggctcacatctccaccgacccccggttggccaaggccattgtgttggctgccatcttccgttgcctgcacccactactggtggtcgtttcctgcctcacccgggaccccttcagcagcagcctacagaaccgggcagaggtggacaaggtcagtcctggctccttcctggagccgtccacccactgctgttctgagggggcgttgtctagcccctgcctgtgatccggctgccctcttctcccctcccaggtgaaagcactgttgagccatgacagcggcagtgaccacctggcctttgtgcgggctgtcgccggctgggaggaggtgctgcgttggcaggaccgcagctcccgggagaattacctggaggaaaacctgctgtacgcacccagcctgcgcttcatccacggtcagtcgggcccacacctgctctcctgagcccctcccacccccactgagtttctgtcacctccagcctgtggctaggggctgtaggtccaccacacattctgtctccctaggactcatcaagcagttctcagagaacatttatgaggccttcctggtggggaagccctcggactgcaccctggcctccgcccagtgcaacgagtacagtgaggaggaggagctggtgaagggcgtgctgatggccggcctctaccccaacctcatccaggtgctgcctctgggagggaatggagttcaccaggtcccagcctccttccctgtctgcagctccttgctcagccccacccgtcttttcctccatccctgcaggtgaggcagggcaaggtcacccggcaggggaagttcaagcccaacagcgtcacatataggaccaaatcaggcaacatcctgctgcacaagtcgaccattaacaggtg

SEQ ID NO: 105630 - DNA, 3314 bp, Homo sapiens
gtggggccggggcacctgcctgggattctccaagcgactgtgccttgagccagtgggtgccagggcagcaagggtgggggctgtgtgtgaaacccaccaccatcaccccatcccactccccccctcgactgaccctgcactgtctcccccactgtttcattgtagactgagggcggtggcagcgaggctcctctgtgtccgggtccccctgctggggaggagccggccatctctgaggcagcgcctgaagctggcgcccccacttcagccagtggcctcaatggccaccccaccctgtcagggggtggtgaccaaagggaggcccagaccttggacagccagatccaggagacaagtaagtggctgggctcggcctaagggccagccaggggccctgccactggccgcaaattgaaactcctttgtttttgactagagtgtggcctaaattttaatgaagtaaccttttattttccaggcatctaatgatgacattctggtctcgtcttccgtctcccccgtgttcccctcttgtctcccctgttcccctctcccttccctcctcccatgtcactgcagattgagacctacaggctgacgttccgggcaaatgccagggcccgcaccgaccacggggccgacattgtctcccgccccccacacttccctggcggccccaactcgggctcccgggtccttggccccctttcccgggctgtccactagaccagtgagcgcttgggcgccgtgctgggcagcccgctaggctcgccttccctcctgctttgcgtgcccggggcagcagcagccctgccccacacctcctctcactccccagcctgggcccatctccctgctttggtcttgccccatcactgcgccactgctccgtggaggaggttgggagggggttggggtggttgaggctaagttgggatctaggagaggagaaccagattctatcctcatctttttttggttctttggtccaaacccaaaagaaactgacatgccctcccttctccctggatctacctggagggaagagtggaggtggattccgagtggtgacaggacgctgaccgtggagcttaagccactgcctctccctctggtcccacaaatgggcgcccccccctccccatgcaggtggtgtcgggcccttcttgctgccctgccccaagttgggggtcagtgctgcctgtccccatgcttaacatacccgcctagctgctgtcacatttttcttgttttgtccttttatttttttctaataacctaaaaactggcaaaatagttctgcaggttgaagccatgtctacatgaaagtcctcagtaagtgttagagggaacagggcggagatatccttatgccacccccgctggaggatgtgggcagcttagggccctggaggcggtgcggcagggaagaggggtgcagaggctgtggctggtgagccggtcaggcacacaaggggcccttggagcgtggactggttggttttgccattttgttgtgtgtatgctgcttttcttttctaaccaagaggctggttttggcatctctgtcccattccctgggatctggtggtcagccctaggataaaaagccagggctggagaacaagaaagggccaggagatggaattccttcaggccggcacccacaccctaggacatgtaagccctcatgtccaagggagcctcatgcagatagtaggaaatcaggtctggaaatttaaaaataaaaggcatgagactaaggctatctgcttcccttatgccctgactggagaggggagggaggagaggcaaggcccacagagggcatcccagctaggccttgggatggctgcagtgaggagaaatcccgggaactgtattgacacaaagattcttattgcacttgtattttttgtattaaagtttgcatggtttctaataaaggattcaaacataagtttgtagtgaaatggcctgggagattccaagggcttctctggagggggattggctgcagtgtagatttgcctctgaggaggctgccccagacttggcctcctcatgccccctcctgacctctgcccttctctggtcctggcatccctggagaaggtaggggtcttgacctaagtttagatttgatctccatgtgcagggaggctgtcctgggcctgacaggtcctccccctttctgaggtagcagtgccttgtggaggtttgacaccatgtccctagctccccaagcacacaccaggaaactgcaggggctcacggaggaagtgctgcctgggccagggggaccagctttcctccgtagagaccatgtgcagaacacttctgctgtgccaagaacatgagggagccagtgttttgtcagcaggaagaaagggcctgctgggatgaaagtgggaaggaaacagggttgcgtagtcaggagacacctcaggggcaacagcacaggcccagagtacctgctgcctccactgcgtctgtcctggggtcatgaggatgctgaggttgacgacaggttccaggtcctttcactcctttggccaaaggttgggggtaggtggcccaagtggcgtgctctctaggtagacaacaggagtggtcagagttccctcaaaggatcctccactccagagcacctgagaaggccgggaccagaggccctgtgtgatgtgtactccgcagctgtttggggtgggacatttctgtacttctcgatttgcttatggctcagccattacctgtgtcagtccatgattctgttgtaacagttttaagagtaaataaataaagctgcctgatgtcccatcacgcaggcttcgtgcttctgtctcgttttgcatctaccacctccctggatcttcctgccctcagctcagcccctcagctgtgaacttgtggatgtggacacgggaaggaccactgtgccacatagccctgcgccttggctacctgtggaactctcccctagtctgcctgataaagggctacttgacacttacttgcttacttactgtccaaaactacaaggacagtgacagttctgacaggcttcctgtggtgggtaccgagagcagcagctgtgccaggggactggggtggttaacagcaccgctgcttcatgctctttcttggtgaagggaggaggttccaacccccttctctcttaaaagacttggggccacagccagcccgttccccagcaataagcatctcactctcttctctacctaccttcctccttcctctttggggaaccgtggcccagtgtatggaggccctgagagaggagcccctagtgg

SEQ ID NO: 105631 - DNA, 1018 bp, Homo sapiens
cttttgcagcatcagttttaccggctgggaagcagggaccgtggccgtgatgacagggcattcatgagaattcagtgaggctgtgcctgagaagcactgcatggcccagttagcgggagggcattcccacacagagtagagaagcagaggcttcgccctggaggctgtgctcggagccccaggcctgcccaagcctggcctgcagctcagtggctgtggcatggggtggtggaagggatggctttccttttcttggaggtattcccactggctggacggagagattgtctcagcctcactgtgatatgagaagtcctctttagacaaacgtgttcactgttcttcatttgccacccagaacaggtcacgtctgtctcatttctagattgggcatatcgctagtcctggttttgcctgcagggatattcctctgccaccctaggtgaccagttcctttgtggttccaggtggaggagatgtcaagattgaaagtcagaagttgaacttcaaggagaaggcccaggccaaggtgggatccctcgataatgtgggccacctacctgcaggaggtgctgtgaaggtagcgagtgggtcactggggagacacagctggggaggggtgggaactatgcagttagggtcagggtcctcacaggtaggcacctgtcaccgcccctcagtctcttcaggagtcatgtcttcacccacaccattgccgttttcccaccgtgtatcatcagtcctgactgaggcagaagtgaagaggccccagcccagccacccctcacctgtcagctggaggcagaaccttgctcctgagagccatggccttcctaattgagcccatccagccatttgagaaggccacggactgggacacagaccacccccaggcgagcgggggttctgcaccacacagttctccccagctgtctcgcgccaaggggaatgtgggttcccgccccatgtcaggctccgctcctgggttaggagcaggacagcacattcttagctgcca

SEQ ID NO: 105632 - DNA, 1062 bp, Homo sapiens
catgccattctcctgcctcagcctcccgagtactgggactacaggcacctgccaccacgcccggctaattttttttgtatttttagtagagacggggtttcaccatgttagccaggatggtctcgatctcctgacctcgtgatccgcccgccttagcctcccaaagtgctgggattacaggcgtgagccaccgtgcccagccaaggtgcaccacctttaaatgcaaatttttgcatttttagtagagatagagtttcactgtgctggccaggctggtctcaaactcctagccacaggtgatctgcctgcctcagcctcccaaagtgctgggattacaggcatgacccactgcacctggctgggaaaattgttataacatggattaagcaggaatactatgattacacacacacacacacacacacacaacgcgcacacacacacacacacacacacacacaccaccccctcacctctcccaaggggaaaatgcattgaaaaggactagaagtaaatatgttattccaggttctctgggcaaggagttgataggtaaggatttgagatggaataaaggggatatttcatgggagccttggtgctggtgtttggacctggtgaaatgacagaagagctgtctggagcatgcatggacagggtctgcacagaaagacctgtggggtgtggaaatggtggtttggtctggctggaggtggggttagaagtgaaggctggtggccgggcgtggtggctcacacctgtaattccagcactttgggatcctgaggcaggcggatcacctgaggtcaggagttcgagaccagcctgaccaatatggagaaaccctgtctctactaaaaatacaaaattagctgggcgtggtggcgcatgcctgtaatcctagctactccagaggctgaggcagaagaatcacttgaacccgggagatggaggctggggtgagccaagatcgtgccagcctgggcaacaagagtgaaactctgtcttaaaaaaaaaaaaaaaaaaagtgaaggccaggcgtggtggctcacgcctgtaatc

SEQ ID NO: 105633 - DNA, 1184 bp, Homo sapiens
cccttatcatttttagactctgttaacactcctgcctcctccttggtgatcatgacatcctgcccatggcctacagatacccccagcagttgtatcatgaggaatgcggccatgagctttcattcttgccccacacaactccttcctgcccctccttcctggtcatcttctcaccactgcctcttcctggcctgggtagaaatggcatcctttacactcgggtggaattgcttgaccagactaattagtcagcctggaataggatcagctgaagtgaggtgacaaagatccagcccacgaggggcccaggcagctgctgagcctggctttgtcctggatgaaaacagaaggtgaacaggggttctgagggaactgggtcacttgtgtaggtgagacatagagatatatttgtgtgtgttgtgtggtgcatataagagctctgaaaatagtcatcattaatgtatcacctgctgtgatctttccacactgcctacacatgacctcacatgtgtagggttttttgttttgttttgttgttttgagggtgaatgtatttttaaagccttttcactttaggaggcttccttaaacagagaattagggagactactgtgagccatctttcctggtgggaagatgaggataaacaacagctgaccacagctggacccaggtgctttgtttccttccataatctctgtcagtccctccctaaagccaccacaaggaaatgtgcagtttaaaatgatgagccccccagctgggcaccatagtaagacccccgtctctacaaaaaaaagtcttgctctgtcgcccagcctggagtgcagtggcgtaatctcggctcactgcaacctctgcctcccaggttcaagcgattctccttcgtcagcttcccgagtagctgggattacaggcacctgccaccatgcctagctaatttttgtattttatgttatgttatgttattattttatttttgagacggagtctcgatctgtcaccaaggctggagtgcagtggtgcgatctcggctcactgcaagctccgcctcccggattgatgctattctcctgcttcagcctcccgagtagctgggactacaggcgcccgccacaatgcccagctaattttttatattttttagtagagacggggtttcaccatgttagccagaatggtct

SEQ ID NO: 105634 - DNA, 1624 bp, Homo sapiens
gcagcatacttaaattgcttaatctggagctgttaagaaattcaggagggacaaaaatgaggtggaatcctggtgctgttggaagacactgatggcaagctgagatcagtctagagaagagcctgagagttgcttgtggtagcgacagtggctctggtgtgcccagcaggcctctgggctgtgctgctgatggcctatctccccgtctttgctcttatggtttcatggtgcaaaagttacaggagttcttgggtggggagttgagtgacttgatctagtgaattgttttctgcttcaacatacctaaagagtctgacactttctatcagtattgacttcctgtgaccgtggcagctgcttggggcatatcaggacatttggcatggggtggggggtattgtaattggaaaatcatgccccagcacactctcagaatcactaatttggttgtcttagccttcctttgtgccttttcttcattagctagtgtcttgatctgttcctcatgtcttaagactatggcctgcagctccttcttttgtggtcctctactcaaggatctttgacttggtctaccctgggaaatgtatggttttgcctaggatcaaaggccacctgcttttgcctggtggcctgacctggatttgagtcccctacagccttcttcccttcttggcttttgagctcttatcctcttggtttgaaatttgccctccctttatctccatccaggccaaagtagagaaaaaaacagaggcagctgctacaacccgaaagcctgaatctaatgcagtcactaaaacagccggcccaattgcaagtgcacagaaacaacctgcggggaaagtgagttttatttagacccacctctgcaaggtgaagatggtaaaatacttcttccagcctgagccacatgccctctcttgcactttttccctttccctaactagtttctacttcttctcccctatattcccttctctgtgcttgatgactcggccatcagaaaattttttgtattaaccttgaaagttaatagagttgggagcccattagccctttggagaatacatatgtgtataatttttggctggataaaatggatccaaagactttcattcatttccttcacactgaccttgatgtgaaacctacctggtatggatgcaaatacagtgcacccacattcgttatcaagaagacatggcaggggtaatttccaccacctggaaccctggagcccctgtgctttaccttgaagtagaagatccctctcataacgctgctgggtatggagataacttcatttgtcctggttccccgggtcacctcttaactgaaagttaggatgctcattcccaatggaaacccacttagtataggtatgcagcatcaactggagggcagaggtaagctgaaaccacaggttctttccccttgcctctgtaaacctggaaaccaggcccctcctgagtgcttgcaacacctaccttccttagctgtagcaggtaggtgtgcctctgccagagaagcccgcactccagcccttagggaccagcatgggaagtctcagcctagggcattcctacagtgaagaaagctgcaccgtggcttctgggtgact

SEQ ID NO: 105635 - DNA, 1758 bp, Homo sapiens
gccactgcactccagcctgggcaacagagtgagacttcgtctccaaaaacaaaacaaaacaaacaaaaaaagaagcatcttgtagcgtgactccttggggctattgctgacctgcaggcctcattcccactttcctatttccagcccattgcagatgcaaaggctcctgagaagcgggcctcaccatccaagccagcttctgccccagcctccagatctgggtccaagagcactcagactgttgcaaaaaccacaacagctgctgctgttgcctcaactggcccaagcagtaggagcccctccacgctcctgcccaagaagcccactggtgagtattgcctttctctcccatgggaactagggaggggaaaatgggatcttggctttgccccagccatagctctagctagtatcacaaacagctgtgcaggcctgcttacgcaccggtccttagtggactacctggaacagtggtagccctgtgggcctggtacttaacaagccttgatctctgtgtgagcttagcagttgtatgtattcagaaaaatcttgagtgaaggcagaaaaatgtactgctcatgaatttccaggtagaatttactcttgccttagtaacccacagcacctagcacgtggtgctcatgggcttacatgatgataagaagagggcgtggtgctcatgggcttacatgatgataagaagagggctattcaagtccataggcatgtattgacagcctacttttaaggccacatagaaggcttatcagggcagtagagaagaataagactcagtgcctgaccatctaatttaccactccattcccagggactaacacagtccctggctcaaagtagatattcagtaattgttaaataatgaggaatctcactattggatgaactatccaacaggtcagtttgttaaatgttatattaataagtatattttgtacagccattaagactgagggaaaacctgcagaagtcaagaagatgactgcaaagtctgtaccaggtaatagcccatccgccattttgtagagccctaacttgaacccccacctcctctgtggcttaagtctccctttttctctctctccctgaacccgtgttatctctcactcccttctttgcagctgacttgagtcgcccaaagagcacctccaccagttccatgaagaaaaccaccactctcagtgggacagcccccgctgcaggggtggttcccagccgagtcaaggccacacccatgccctcccggccctccacaactcctttcatagacaagaagcccacctcggccaaacccagctccaccaccccccggctcagccgcctggccaccaatacttctgctcctgatctgaagaatgtccgctccaaggttggctccacggaaaacatcaagcatcagcctggaggaggccgggtgggtccagggagcttggggtcctggcatgctggcccctgcatcttcccctccatttccacccactgttcccaggcccaccaaagaagcaggcagtcaggacactggactcagcatcagggtatttcagccggggctctgtagtgggttttgtgccccagcagcagggaggcggggtaggctgagctctgggctttctcttcctgtctcagtaagaaaggctcctgttctagatgttggggtctgagtttacatttttgcttggatgtaaaaggattcttttgtagaagaaacagaggaggcctcagagactctgcaagtgagag

SEQ ID NO: 105636 - DNA, 1168 bp, Homo sapiens
tggtttcattccattatttattgagctcagaagaaagaaatgctaattttaagttgcatctatcctcattgcttataattttactttgaattgtgcaatttatactttttttaatttgtttttattcttgtctgtttgatgttgccctttaaaaaataaaaataaaaaataaacaacaatcaacctaaagcctttggccaccactcaacctgcaaagacttcaacatcgaaagccaaaacacagcccacttctctccctaagcagccagctcccaccaccattggtgggttgaataaaaaacccatgagccttgcttcaggcttagtgccagctgccccacccaaacgccctgccgtcgcctctgccaggccttccatcttaccttcaaaagacgtgaagccaaaggtaagtggtcacctaactactgtgccgaggaaaattgttcccctctgagtgtcagatagacagatccttgttgctaacagacaacagaatcaggctggtggaattgggaaaaggcaagggaaatgggggagagggtgatttgaaaattggcatggctactctggacgcgctgcctatgggttagccctgctccacgaggagcagccaaaaaaagaaaaaagaaaaggaaatcaatttggggcccattgatgcagacattaacattttgaagcccttttatgctcttacctttcccttccctgtttggaggtaatactctatctacttaggttcttcctcctttctctcagctacctactctttacctatttaagcacttattaaccagtttcctctactccacataccagttagatattcttttttggtataattcccacatcaaatgtaattctttgtctttccctgttatcatcctgcagaagttttatccattactattgtgatataactagttcttccagcttatctcagcatgttccagcatgatgtgataacttactttgctttgggcattaggccacctctcactgagctacttctgaagtcatccagttttccaggtcacccacggtttctgtattgcccagaaactggtcacatttggagcagcattagtgttacagaattgctccaggaggagaggatagtggaggctgtggctgcattccttaacatcttgtgttatttgagaagggcctt

SEQ ID NO: 105637 - DNA, 1052 bp, Homo sapiens
tggtatcatctcattgttttctgctcctcccctgtaaatacaactaaatagtctggaaataattgaagataattccataaaagaatatgaggtagaaagaaggcaaacctggtagggatctcaggacttgaggaatggcaatacagtgaattccctgggactgatgaattgattgattgattgattgattgattgattgatggtagagatgggatcttgctatgttgcccaggctagccttgacctcttgacctcaagtgatcctccttgcttgacctcccaaagtgctggtattacaggcatgagccactgcgtccatcccctgggttttctttttgtctcctacatatccctggctgggcactggagaggcctgtaacctggaattaccaacaggcatagactgaaaagaaaaggaaaggaaaaaagaaaacaaatagagaaaatctgttctctattgccaaaaaaacaagaaagaaaaaaacccagcaaagacctaatggtgagccctgtttcactacccatccccagcagtgggctcagtctgcctgcaggtacagtgtcaatgcagcccataagggccttcctgttgtccactccatactcagcagaagctataggcctggtccgcccacatcaccagcaactgcagggaggcctgtcccctaccaggtaacagcaccagtggcttctatagccctggtgtcttgtaatcctctacccaggggcaggagactttcgtaggtttcagaacctctacttccttccccttagcaagagaaagcccccgaggtaggtgtttcctgctcccagcaaccccagcagagatcaaacaggaggtctgcctgggtcccaggcagccagagagcagtccagaggaagctctctattctatgtttccagcatcactcagcccctatgtgctgacactgggtgacacaggtaagtccctacagccctttcaggcagtaccaaaagggattagttagaaccttagcagaatcagaacacaacaggccataaatgcattgcaagggctctaggaaccaaat

SEQ ID NO: 105638 - DNA, 1066 bp, Homo sapiens
tttcccagccagtggtagtataggtaatggaaagacccaacagaagagcacagttcattgaaggagttagtaagttccacatcagacattgcttttgtgaaactctggggatatgtgggtggtggtctctagaaattgcctgatagctgggcttggtggctcatgcctgtaatctcagcactttgggaggccttggcaggcagattacttgaggccaggagtttgagaccagcctgagcaacatggcaaaaaacccatctctatggaaaaatacaaaaattaggtgggcatagtggcatgtacctatagtcccaactgtttgggaggctgaggtgggaggattgctcgagcccaaaaggacaaggctgcagtgagccaagatcatgccactgtgctccagcctgggagatagatcaagatcaggtctcaaaacaaacaacaaaaaagaagttgccttatatatccatgagacaagggaaagggcttggtgagaactaccttctgggagagagaaagcagtttctgcttatgcacagttacatttatttgtataggtcgagttactgcatgcctgtatcatagacaatgcgactttatgaaatatgttgtttactgaaaaatgctgaacttattgaaaaatatttatagtggtctggggccagtggcagctagttacacaagtaagatcttctttgagcttgctgtagaacaaaggcattagccgggcgcggtggctcacgcccgtaatcccaacactttgggaggccgaggcgggcggatcatgaggtcaggagatcgagaccatcctggctaacacagcgaaaccccaactctactaaaaatgcaaagaattagttgggcgtggtggcaggcgcctgtagtcccggctactcgggaggctgaggcaggagaatggcatgaacccaggaggcggagcttgcagtgagccgagatggcgccactgcactccagcctgggtgacagagcgagattccgtctcaaaaaaaaaaaaaaaagaacaaaggcgttaacaaatttgcacagttgttggctatggtttttcccc

SEQ ID NO: 105639 - DNA, 1054 bp, Homo sapiens
gggaagaaggaactcggcactgctggattatatctccatagtaagctggagcagattcctgaaggaagcagcaaggaaaaagggcaggaagattttagtgaaactagaattgattcatgctcgcaggtttgccagcgaggagagaaacagccaggacagacggctctggcagggaagaaagaaattgaggtcactgcaacccagagcactccatcgttcctgtttgaaaagcccccacgtgatggtatgtttctaaattttgcctccattgggaacaagcagacagcaaggaaggaaccaaagtgacagattaccggcagagcactaagcagctttttacagctgggttctgtgactgcctggggaaagcttaattcccttgtgttggaagcttgctgggagtgaggcaaggaagagaacaaagtgaatcttgcagggtcaagctgaatgtcttgctagcatgacagataatgtgaattgagtgtgcaagtttggggtggaatggggtcagagaatggtgggtataaaaactagaccccctttcttgacctcatgtcaccctgtccaacccatcccccatccacccagccctcagctccctgttggtttgaaccagatgattcctgagctctaaatccttcaatcccaactgattgatttccttgcttgaaaatctgtcactttatatagattcacaatgggtttatcagcactaacctcctctcattaagttgcacaatctgggtggaagctctgttttctgtttttgctttggagaacgttttacttttgttcaaactgaaaaagagccctttaaagctagctatttaatattctttctgtgttcttcatgtttgacccaatcttgcttctagttttctctttttgtatgtgttttgagaggatttgtggggagaaaaagaagaaagagaaagcagggagagaaggagagacttgcaacctaataaacagctaaattttgcggtctttgtgacagccttttgtgtctttcttcctggccctttcttttcttccccatctcccatccccccac

SEQ ID NO: 105640 - DNA, 2312 bp, Homo sapiens
tctgatagaatatttccagtatgctatgttattgcaagacagtaacttacagctagacaagaaaaatcagctttgttcaaagtaagagtatagcctgtccttatagtgtaatttttttctcacagttttgttttatggttccttcagtttgaatatacaatatttgagctcaaagcccagggcagcaaaggaccatgctgagttaaatgggggcagtaagctctggtgagtggggaaaactccaagctacaattgttagagtccctaagtctggaggtcagagaaagatgcactgcccccagtgtgttcacatgacacctaacagattattaggctggaaagagcagggcttggtagtggagggagcaacccagctcatccaaggaaccaagtgggggcagggacaggcgtaaatgcataaggggtatgttgtcacacaaatgtcttataattagaatatctatccccaaagccctgatcactgaagtctttaaatgaaccctttattaaactcttccattatgcagagctacagatggagctcttacgggttttggggaccccactcaagtcagttttcaagttagtttgataagttgctatgacagcaaacccactcttcctctgagaatgaatgcctgcaatcttaatactacgttaaggtgtggttttttttttttttttttagtccaattttgaacaatttcctggattcattgttcttcagggttatagctggggattggcaaatgagtctcggttatttttaaaacagttttctgagtggttgaatgtggaagggtgggcatggtatcagataaatgagtgtgtgggtatgcacgtatctatatcagtgaaagccaaaataattactatccttagtgcttggattggcaccatactgtgttttaaattgcagatctaaacagagtgctagttcacgggaaattacattctcagattaaagtagcattttgttgtgcagaaagcagcaggttccttcctttctttcgctttcattcattcttcctttctttctttctttcacatttgtaagtgcatttaatactcaactgcttgaggagagaggggcattgagggagagatgaattttgtcatgaatactggggaattggtgtgatgtcactgcaagctctgtgtgatcgtaggtggtattagagctccaggagcgaaagcagggagagcagtggaggagagacgatgtcgctctcagacaagcagacagcctctctcactgccgcgtacggtcagctcagtaagggcaagcctgcagagtgccgaatggactccccaaaagaaatcagtcaagccggattcgaatggcagaggacagagggcaaactgaatgaaattgggctgaatgtcagcatggacgggcaaccaaaagatgggcttgtgaagaatgccagcttcctggagcagaacaagctctgcttttttgaggggaagctagacaaagagctgagcattgaaatgcaggacaaggactgtcaagaagcctcaggtcaccttgagagcaggtatgtgatttcagagacctgccatcccttggaggggaactcggtacaccagaagacctccgagttccatctgggactcatagaggggccagacaaaaacaaaaccattccagttcaggggaaggtggcagggaagaatggactagagaccaagagccagtcagatctggatttccctggggctgctgacatccctaccagatatgttaaggagcaggaaaccagtgtttggaaccccagctttcatccagtggctcaaggctctctgggctcaagggaagcaactccgggagagatggagaatagcatcacccctggctgcccagtgattggggtggtaaatgataactctgagcagctgaagtgtgagtccccactcctggtgtctctagcccacccagcccccattattgagcattcacccaccaccattccgccaatcactatggtgttcacccaggaacatttgaatgcaagctgtcacatcagagaccatgataaggagttggagaaattgagttctaccgaggaggctgtgctcaaccaagccccccagcagaaaaaggcagtgcgcagggccctgtctgaatgttctcacctctcagttcccccagctgtcaaccttgcagataagtaccctgaactccctgcccgagaagagccttcttctggcctgctgcctccccctagtagcccaatgcctagtcctacacctgggaaactgggagctcctgctatgaagcgctccatgactgtgggtgaggaacagac

SEQ ID NO: 105641 - DNA, 1052 bp, Homo sapiens
tgtttgcttctcatcctttttttaatcagggagaatcatgatttattttcttgagttaaaacatgagaaatgtttctaaaatgtagaatatggtttctgaaatagttttacctttatgtatgtatgtctaaacacttggaacgtttacttccagggaagaaactagattataacttgacaactttatcttttattaacaaggagtgagtgtcatcaatcattgttaatagtagaattattgactttcattgtaatgataattgtttcctggaggcaataactgggaacagttggtcaatctggaaagtagtgttgccttggtaactgataagaaagaatgcagagaaactagttgtctgtcatgtataaaaaccaaggccctgaacaggttaaatactaactccaagcacaaggctaaaacagaaatatctgccagtacatgtactgggattagagacctgcaggctttgccaagagtcctggaaaccaccttctgcccagacacacaggaatccatgcgctttcttcaaactcagacagaatggaatagaacttcacaatatttagctcaaaggacattccagatcaccaccgcttgggttgggttgaagacagctttaatgatggaacggatcaggtcaaatgatgcagatgcagtgtaaaaggaaactacccatcctttcactgagcagatcttttttgaaagcttatttactgtgagtcaagcactgtgcagtgcacccacatggcacaaatgcacagttcacattcctaccttctagaagctcctgggaaagtcatataaataaaagattacagtgtggtttctaaattctaaaaagagatagagtattatgataatataaagaactcaggaggggttcaaagagactttgcagaggtgagtgagtaggaataggacctagaggcaaggggccgggtgcggtggttcacacttgtaatcccagcactttgggaggctgaggcaggaggatcacctgaggttaggagttccagattagcctggccaacatagtgaaaccctgtgtata

SEQ ID NO: 105642 - DNA, 1703 bp, Homo sapiens
cattacttggtataaggattcacaggaggaaagaaaatatttcatgtctagctatgtgcatgagatttttttcaatttatatgtagcttgtgctggtgggactaaatatccaaactgcttttaggttaaatgaaatcagtccacctccttatgaggaaatggtggcctcaaaccagcattggtaggcaccgatttatttgtgtttctagtaatgggaaatgatctctcaatgatacagatacattttttgaccagtttgttgcttatatccattgccccacagttccatgtgggtttgagttttgggcatagtctgtgtccatcaaacatagtccataaaacttgcccatgttgtgttcctcataattttactcttttttggctctattcagtcaagtaattggaatgagattaagaagatgattcctttaagatttagaaatggtagccccgtttccccccacccccaattccccaaaaaagtatacatttaatcgtggcttccctgaatctagctttcaaaaaatgttcccttgtctttgagatttttcacagcctacaagtgacactatttcttaatcactgtttcccagcttgcatgatgtagctactaactccagaatttaaaaaaaacaccaattggttttagtagccagtcaggcttttagagaggtttcatcatgggattgtgttctgcatggtatggacttgttcttttgggtaaagcttgtctatgcatgagtatgtacccactaaggaatactgctgtgtgagtaaagaatgctaaaggttgttatttgcataagacattctcatcttctctgtttttatcttctattagctaccctattaccaaggcagaaaatgaaatagtatgtagagggctttccagcattcattgagatttccagtgttctatccagttctttcgttttggtttctagacccattctttagtttcagcagtgatctaaaagttaacatgtaatttctgtgaaatcccagccatctctttttgctcagtatttccaaagaaatgcagaaagaggatttgtttttcttgaggaagcaagaccagtactgcagaacttttggggccctgcctgggtcaggtcaggctcagagactgtgttagcagtggccttacagagtgggtatgggaaggataatgggtttgggacaaaatttattgtttcttctataaattctaccacacctttcccctaaggacaatgtatacctttttaatagttaaaaaaaaatttttaaactaattgtcgaataggttaatacattcacatggtacaaaggagtatacagtaaaacgtaagttggcctccctccattaaccgccttccagctttccctctccagagcaaccagtgttcacaatagcttatatatccttccagacaatttatgtataataagtaataacatatatatttcctgatttcatataaatgagacgtatacatacatactgatgtgtgctattctttttaaacttaatttttaaagagatcttttaagactcagtataaagaagccaggcgcagtggctcacacctataatcccagcactttgggaggccgaggcaggcggatcacctgaggtcaggagttcgagaccagcctcaccaacgtggagaaaccccatctctactaaaaatacaaaactagctgggtgtggtggtgcatgc

SEQ ID NO: 105643 - DNA, 1256 bp, Homo sapiens
ctcctactcctcaagtagtaaaggaaggtgattcctttccagataccttggcaaaaaatgggcaagagatagccccagcccagatttccaaatcattaatggtagataactacaccaaagatggagtcccaggtcaagaaagacccaagggtccctctgctgttgtgccctctacaagcacaggaggagttgctctacctattacaacagccatagaaacagttaacattcatggagatcactctcttaagaataaagctgagcttgctgattccatgaaaaatgaagcagggatcgatgaagggcatgtgataggagaatctgagtcagtgcacagtggtgcgtctaagcattcagtagagaaagtcacagagctagcaaaaggtcacctccttcctggagtgccagtagaagaccagagcctaccaggagaggccagagccctagaaggatatgcagatagaggtaatttcccagcacatccagtgaatgaagagaaagagactaaagaagggtctgttgcagttcagattcctgacttactggaagacaaagcacaaaagctcagtttttgtgaggaccaaaatgctcaagatagaaattccaaaggttcagatagtttgaataagaaggtagatctgactcttttgtctccaaaaagtgaaaatgataaattgaaagaaattagtctggcttgtaaaatcacggaattggaaagcgtttccttgccaacaccagaaatccagtcagatttcttacatagcaaagtcgaagctcctccttcagaggtggcggatacgttagtaataatgactgcttccaagggtgttcgactcccagaacccaaagataagattttggagacacctcagaaaatgacagaaaaatctgaatcaaagacaccaggagaagggaaaaaggaagataaaagcagaatggcagaaccaatgaaaggctacatgagacccaccaagtcccgaggacttactccacttttgccaaagtctacaatccaggaacaagagagacataagcaactgaagtccgctggtatgaacctgccatggggaaatgtgtgtgcttgtggcttttgagtcagcatcagaaaggcaaagagcttgtgtcttggctccatccagactctaatcatccttgttaatcattggtttgttggcatgaaacctataactgctacggtgtgttttctgcagccaatgtgttccttgtgtcctgcttgaggaggctggtaacttggt

SEQ ID NO: 105644 - DNA, 1420 bp, Homo sapiens
gcaataagttctcagtctaagctgagagtagaggaagagagcaaaagtaacaagtcagtactacaaaaccaagacaagaaattgctgaagcaacatgaatacaaaccacagcctgcaccccacctgaagactcctgtagataaaagccagtcagtaggccctctcaatctgaaaggacccctagcagaagtttctgcatacaatgtagaaacccctttggatatcagacttaaagagggttgctctcctttcttggaccaagaggttatgggtgtagtttcaaaacccacagcagcaaaagaaataccaaatttggtacccactttgatagcaagtaatccattagaatgtaatctaaaagaagggaataatgaaagtaaaatgactaaactgcagaatgtcaaactgaaggagtttcctgaaggagctgaagaggataaagaactaaaaaaggaagcttttcccaacgaaagacaagagatcagcatctttacttctgagcagctgcagggccaagtgttggtacaggtccctggggtagagaatgaaccatttaagagaatggcaggtgatggcaaaagcaggaagggaaggggaagttctgggaaaatgagaacagattctgggaaggtaaaagcaaaatctgagctgccatttcttctggacagccagaaggacggaagggctgttctcataccgagtgagccagtctctaaaactgaaggaatgactactcaggataagagtgaggagctggggctgaattcttcaaagcaaccaggcactaaggctgatctcacggaggcagtggtgatgggggagcctaaagagatgactcagcctaaggtggcaggcaccatgcaggcattgattcctttggaaagtggatcaggcatgactcagacttctggtgttagcacagaaacaggagatgtagtcaaagatatgggtgtcaataaccagagcaaggaaggaaggtgtccatggaaggatcatgaggcagctccctggatttctgaaaagcctaaaaagagaggcaatgaaggcaaaagcaaaaagtttaaaaataattattccacacagcctgctagaatggagaggaaggaagaaatccttaacccaccttttgaagggaaggatggagatactggtagtattccccataaaagcaaggaaataggatttactttccccaaaatgcatgattcttcgttctcacatacaccagatacacccacagtggaagcagttgacaggaagggtggaaattttcaggttaattttgttgagcttgggactcttggggaaaacaagataagcacagtcaaggcttctactgttactgaaccacctgccaaggtgacagatgtgagctgccaagagcaaatccagggggcaggatttgttccttcagtagtat

SEQ ID NO: 105645 - DNA, 1075 bp, Homo sapiens
tttgggaagtacatttaggagcagaatgttgaaatttaacatatttgtctttcaaagtaggatgctctggttctggaatcatgagaatttttctctgaccaaaatgtggattcagtatattttgtgtgtgtgcgtgaagtgacttaagtctggccttctgatctagttcccagaatctgtctggtttgtttgacaagtattagtttaatattggtgacctagtcttagaattataaattttgtccaaaatcatgtatatttaactgaagcaattaataaatttcaccaaaaagaggcaagcactaagaatgaccaatataaatcagatgagatttacaggcagtaagtgcttatttttagaggttaaaagatgtgaaatgtttcatttttaaaagttcaatcctgctacttctgaaatttcaaatattttataaatgtttgaaaacaatctttacctgagatgatgatctgttaaatatttttgctagcgccagttaaaagtgagaaatgttttagaaaagactgttttcctgagcaaattacagtaagtactatatgtattagtgaaaatagcctccttaaattagtcatttatatggtctggtttttttgtttgtttgtttgttttttgttgtttttaagaaacaataacgaggagttttttgtttggaattttagccaacttcatgtattgcggtacccctcccacacaagccaaacaagtttgcagacccagtgaccgcaggtcaacccggcccaagcctgccagggtccctcctgagctgctgggaggctctcctccatggaagactcttgatcacaggctgggccactgctctttgtctgagtcaggttgggtctctggttcatcctcctgtggtgggcctgggaaccaaagaaaaagtattcatgttgactcacttgaaccccagagggatcttggcagggaggcctgggatatagaaagcacaccaataatgatgaagaaaaagaagaagaaaccaaagcaaaagagatattctcaaccacgggctggaggaccttcggatgatgacaatgcagataagcctaaagg

SEQ ID NO: 105646 - DNA, 1173 bp, Homo sapiens
cctcataccaatttaaatcttttttcattggatcattcccacccatttaacaaacgtttgttatttttcccatcttaaaaaacgaaacattgaccgggcatggtggctcacacctgtaatcccagcactttgggcggccgaggtgggcggatcacctgaggtcgggaattcaagactagcctgaccaacatggagaaaccccgtctccactaaaaatacaaaattagccgggcatggtggcgcatgcctgtaatcccagctactcgggaggctgaggcaggagaatcacttgaacctgggagacggaggttgtggtgagccgagatcgcaccattgcactccagcctgagcaacaaagagtgaaaaactccatctcaaaaaaaaaaaaaaaagtaacataactagacataccttcccaacttcagcttccaactaccacttcactcctttgctgccccttgtaggagaactcctcagaaactaatcccatatccaatttctggcagatggaaaatagctgaaatcatgcttctctgaaacgtgtgtggcttttgttattacctttagaaaccgtcacaggaacggggaaaaagtgcagcttgccggccgaggaggattctgtgttagaaaaactaggggaaaggaaaccatgcaacagtcaaccttctgagctttcttcagagacctcaggtaagttaggaaaacaaaatgaactctttgaaacaaattaggggcgatagagtagtgatggtagacattgtctctagttccctgttgtatggtggtaatcagcagtatagtttatgaagtcaattctcttagacagattttatctggtttagacagaatgtcagcttgttatatctttaaaaattactactacagcaaatcaggatacctaattttttttttctccactgttttttttgttgttgttgtcgttgtttttttttttttgagacagagtctcactctgtcgcccaggctggcgtgcaatggcgtgatcttggctcactgcatcctccacctactgggttcaagcgattctcctgcctcagcctcctgagtagctgggattacaggcgcctgccaccatgcccggctaatttttagtagagatgaggtttcaccatgttggccaggctggtctcaaactcctgacctctggtgatc

SEQ ID NO: 105647 - DNA, 1615 bp, Homo sapiens
aaatggcatcagaagagaggccaccagcacaagcattggaaataatgatgggactgaagactactgacatggcaccatctaaagaaacagagatggccctcgccaaggacatggcactagctacaaaaaccgaggtggcattggctaaagatatggaatcacccaccaaattagatgtgacactggccaaggacatgcagccatccatggaatcagatatggccctagtcaaggacatggaactacccacagaaaaagaagtggccctggttaaggatgtcagatggcccacagaaacagatgtatcttcagccaagaatgtggtactgcccacagaaacagaggtagccccagccaaggatgtgacactgttgaaagaaacagagagggcatctcctataaaaatggacttagccccttccaaggacatgggaccacccaaagaaaacaagaaagaaacagagagggcatctcctataaaaatggacttggctccttccaaggacatgggaccacccaaagaaaacaagatagtcccagccaaggatttggtattactctcagaaatagaggtggcacaggctaatgacattatatcatccacagaaatatcctctgctgagaaggtggctttgtcctcagaaacagaggtagccctggccagggacatgacactgcccccggaaaccaacgtgatcttgaccaaggataaagcactacctttagaagcagaggtggccccagtcaaggacatggctcaactcccagaaacagaaatagccccggccaaggatgtggctccgtccacagtaaaagaagtgggcttgttgaaggacatgtctccactatcagaaacagaaatggctctgggcaaggatgtgactccacctccagaaacagaagtagttctcatcaagaacgtatgtctgcctccagaaatggaggtggccctgactgaggatcaggtcccagccctcaaaacagaagcacccctggctaaggatggggttctgaccctggccaacaatgtgactccagccaaagatgttccaccactctcagaaacagaggcaacaccagttccaattaaagacatggaaattgcacaaacacaaaaaggaataagtgaggattcccatttagaatctctgcaggatgtggggcagtcagctgcacctactttcatgatttcaccaggtacgtgcttgtgcttattctcagtatttctctctaccaggttgtagtctcgagaagactaaggacaaacatcatgccaggtaaagtacagacagtcacactgtactttgcaagtttattcatactcctgctctcctagacaactctttcccgcctttaccctcctcccacctccaacaccttttctatgttcattctctgctgattgtcctgtttttcttgcagataagtcaagcaataaaatagaacatcgacaaacttctattccattatctacccaactacttgtatctgtatccatggtctctgcttatgaaagttcccgtttttataagtaaactgttcctgctcctaattaagaccaacctctcctcattttgccctagattccatctcctctttcctactcgatatattg

SEQ ID NO: 105648 - DNA, 1118 bp, Homo sapiens
ggtcaggagtttgagaccagcctggccaacatggtgaaaccccatctctactaaaaatagaaaaattaggccgagtgtggtggctcatgcctgtaatcccagcactttgggagacggaggtgggcagatcacctgaggtcaggagttcgagaccagcctggccaacatggtgaaacactgtctcgactaaaaatacaaaaattagctgggagtggtggcagacacctataatcccagctactcaggaggctgagtcagaagaatcacttgaacctgggaggtggaggttgcagtgagctgagattgtgccattgcactccagcctgggcaacgagcaagaatccatctcaaaaattaataaataaatataataaaaataagaaaattagctgggcaaacaacaacaacaacaacaacaacaaaactgctacaaagtattttaataaaattgtcttctaatgttggaaagggaggtgttaatctcattttgcagatgaagaaattaagactcgcagttttttactatagtatattatgttggttgtggtgttggaactagagttcaatcattaatattttgaatctttatattaccctttatatattatatagaaagtagccagtgaatgttgattaatggcactactgggatatactataccacctactaacaactagctaaaacctgaagaatgtcagcagtgtttcctttaaaacttgtttgcgttgtcggccgggcgcggtgtctcacacctgtaatcccagcacgttgggaggccaaggcgggtggatcatgaggtcaggagttcgagaccaatctggccaacatagtgacaccccatctctattaaaaatacaaaaaaattagccaggtgtggtggtgtgtgcttgtagtcccagctacttgagaggctgaggcaggagaatggcgtgaacctgggaggcagagattgcagcgagccgagatcgtgccattgcactccagcccaggcgacagtgcgagactctgtctcaaaaaaagaaaaaaaactttttttgcattgttttttattagtctgtgtcttcctggcaatatatgcagctgattttaaatatcaaatacctcttaggccgggcgc

SEQ ID NO: 105649 - DNA, 1373 bp, Homo sapiens
ccacagtcccagctactccatatgttgaggcaggaggatcgcttgagcccaggaggttgagactgcagtgaattatgatcacaacactgcactccatcctgggcaacagagctgagaccctacctatctcaagaaaaaaaaaaaaaaaaaagaataggtcaaccagccttcccaacatggcgaaatcccatctctactaaaaatacaaaaaattagccgggcgtggtggcgggcacctgtagtcccagctacttgggagcctgagtcaggagaatcgcttgaacccaggaggcagaggttgcagtgagccaagattgtgccactgcactccagcctgggcaacaagagtgaaactccatgacaaaaaaaaaaagaaagaataggtcatggttatgaccagtgggtacaaaagacatagacttgtgtatttattgcatgtttcaaggtagaaagcaaattgctgcatcaagtattgttgtcatagcctttaattacctattagtaatgcaaagaagcagagatttttgttttcttttctttttttcttttttcttttctttttttttttttttgagactctctctgtcgcccaggctggagtgcagtggtgcgatcttggctcactgcaacctctgcctcccgggttcaagcaattctcttgcctcagcctcccgagtaactgggactacaggcgcccaccaccacgcctggctaacttttttgtattttagtagaaatgcagtttcattgtgcccaggctggtctcgaactcgtgagctcaggcagtttgccctcctcggcctcccaaagtggtgggattacaggcatgagccaccacacccggcttgagatttctctcttctaggagagttctggcagatgatttggcctttcctcccttgttgtacactaagaggaaatgaggcagagtaggaaagaaaggtacccaaggttgagtgttgaatgagaggaccagggattaaaatcaaaatccctacctggctgaatgtggctctgctgccttggggtaggagattgggccacaagtccagctgggtgccaggaggaggaaggggtaaaaagggagtggaaaacccctccaaggacccactgaccctgctggcagacttcttattcaagtgtgaagaaatctgtcagaatctgagggaaccaaagacaagaaaaaagtacaatgtttggacataaatttccttaattcttgtaatgttttaggattctaataatcttctataaggaggatattaaatatccttaaataatttgctgtacttgggaaagtggtttttcttcttcagtttagagctagaatctcagttacctatagttgcctggagtcaattggtagaatgggt

SEQ ID NO: 105650 - DNA, 1047 bp, Homo sapiens
tcctgcctcagccttccaagtagatgggattacaggcatgtgccaccacgcccagctaattttgtatttttagtagagatggggtttctccatgttggtcaggctggtctcaaactcctgacctcaggtcatctgcccgcctcggcctcccaaagtgctgggattacaggcatgagccactgcacccggccctaaatgtgtttttaaaagatgatattttttcctcaaaatctgaacaatgttttttgcagaaatagaaaaatccattcggaatctcaaggagccctcctgaatagacaaaacaatcttgaaaaagaacaaagttggaagtctcatttgttgattttcaaaacttactgaaatgctataataatcaaaactgtgtggtattgacttaaagggagacatatagatcaaggaacggaatggaaagcccagaaataaactcttttatacatggtaagatgattttagacaacggtaccaggaccattcaatgggaaaggatggtgttttcaataaatgatgaggggaaaactggatatccacataaaaaagttggatcctgctgggaacagtggtttatgccaataatcccagcgctttgggaggccaagtgagaggattgcttgaggcaaggagttcaagaccagcctaggcactataggaagacctcatctcttaaaagaaaaaaaaattggccaggtgcggtggctcacacctgtaatcccaacactttgggagtcccaggagggcagatcatgaggtcaggagatcgagaccatcctggctaacatggtgaaaccccgtctctactaaaaaatacaaaaaattagccgggcatggtggcaggcgcctgtagtcccagctactcaggaggctgaggcaggagaatggcatgaacctaggaggcagagcttacataagccaagattgcgccactgcacttcagcctgggcaacagagcaagactctgtctcaaaaaaaaaaaaaaaaaaaaaaaaaaaaaaaaaaaaaggtagtgtgggcctgtagtcccagctactc

SEQ ID NO: 105651 - DNA, 1110 bp, Homo sapiens
ctcctgcctcagcctcctgagtagctgggactacaggcgcccgccaccacgcccagctaattttttgtatttttagtagaggcggggtttcaccatgttagccaggatggtctcgatctcctgacctcatgatccggccaccttagcctcccaaagtgctgggattacaggcgtgagccaccgcgcccagcccacttatgatttttgatagttattgtaaactctcttttatccagaattataaaagttaagaagttcaaatgactactgatatttaatgtcatttggtgagaaagtcacttgacagaaaggtgtgaagaagttattccaaaaggaggtttccatggtatatcaattgttgttagatgctttctaatactacatttattaatttctaacactacatttagtttagtgcagttaaaattcacattcaaagtcttcctaaagtgcctcctgaattatcagataaaatttactacattcagtaacatttaatttgataactttgttatttgataacccagtatgcagtatctgggaagaattcaacaaaatgcgcagttccctagccattctgggttagtgtttgtttacagtagggttgcaagtacaatatgttgactgaattaagacattaaaaatattttatatctaagtaatttgcatagcataaggaactttttaagcttggcagacattttagttaagaacacttaatttaatgtttttagatttcctttttattaaaacagctcagtaatctgttctcaggtttaaagcacagattttaaatactataaggaataattgaccattaactttcttatacataccctaggtttaaagcttttggtaattgaagcaattcttgaattttgttattgtcctcatccctgatgcgaagtgaaacctggcttcatttggattcttcctccttattgacttgataatatggtgggaggctagagggtgttctaggcaaagacacaggactggtccagcaggcacagaatgttagtttcattcctaaatcatgtgtaatactgtattatcctcaattttatgttgatgccgtttccattacagtgaaggtttaacaagacttaa

SEQ ID NO: 105652 - DNA, 1018 bp, Homo sapiens
atgttcaacatgaatcagaatagtgtaacaccaaatgagaacatgtgttttcataaaggggttgaggccaccagtactgcagcgaatttccttttcttctccctcctccttccttctctgagcttgcttttagggaaggttaatcttacaggctacctatgtttctctccaccttactaaaatctaaataatgatagatattttaagtttttaaattgagtagttctgagtaatcctagaatatttttccaaattaaataatcctttattatttgcaagttgggccaaatttttttttttttggagacggactcttaacaatctaagattgtttcaacaggactttcttattcccattcctaattttttcaaactaattgcttaaatctagaaccagttgagattagtactgtacaatggtatgctttgattgtatttatagaaatataacataaaacatggaccatgttttgaaatcttagaggaattctggtttaaaatctgaaatactttaaagttttctatccttttactgattatgcagcttcttataacccccaaggtacagattatttcagcttaaaagaaataattggcaccatgttctgagaaagattttgagatatacattgttttttgtttttgagacagggtctcactcttgcctaggctggagtgcggtggcgcgatcttggcttactgcaccctctgcctcccaggttcaagtggttctcctgcctcagcctcccaagtagctgggattataggtgtgcgccaccacaccagctaatttttgtatttttagtagagacggggttttactttgttggccaggctggtctcgaactcctgatctcaagtgatccacccgccttggccacccaaagtgctgggattacaggtgtgagacactgtgcctggccagatatacattgttttagatcccctgatacagaactacttttgagatggtaagattagaatatcatgaaagtttaaactgaatccttgcagcgac

SEQ ID NO: 105653 - DNA, 1029 bp, Homo sapiens
tgtttatattcacttttttatacttttatgtctctttttgaactaaatacctaaaactgattgttgagttgagtattgcagaatttgataggctgccaaattgtctcataaaaaggttattcctatttacattcccccaaatgatgtaatgaaattacccttgtcaatgctggttatcaaattttaaaaggttttatcactgtaatagctgctcttataccactcgctggatatcagtttttgtaatttccattttcttataatatgcattctttaatgaagcaagtttttaaaaatatgcattctttcttgagcgaggaagaataaatcttataagcttattgtgtgaatgtgaaagggaatttacttatgccaaatgtgggatggagcatatttatggcatctctctggataagtaaaatgcagtttgtgaagacttagcagggtatatgttacatagcggctatttaatagaattctgttgtctttccttccttatttctttcttttatttaaattatattctggttttggactgccttgttcttttagattgttctctttggctgttcctcttaagtaacagaatgaatgatcttttcaacaagaagcttgtgtgaaagatttctgccttgtatttatgaggactaaggggttggacagcatgtttgtggtcttccaaagtaaaatcttgcattttttattttagtagcatatattgtagatattcacttattgtcttaggaataatatctctgaattcttcggtcagcaaggtgactgcagagctaggctggttgctaaaatgttagatatagtcagagactttcagaaaaagttgtacatccccaaattgatctatatagtcaatccccaaattgatctatatagtcttatatgcaattgcatataagatcccatcaagaattttagtataaatcaaaaactgattctaaaatttatatggaaaagcaaagaaacaaaacaaggccaggcgcagtgactcacacctgtaataccaacactttg

SEQ ID NO: 105654 - DNA, 1044 bp, Homo sapiens
tctccatctcttgaccttgtgatccgctcgcctcagcctcgcaaagtgctgggattacaggcatgagccaccacgcccagccaataattttttttaaattgtgtgtttgaatttcccattttagccttcacttaatggatgagttggctgtaaaaatctagcttcaaaatagtttttctcagttttaaaggcatcacttcattttttaaaaaaaatcatttagtgttacaattagaaataagcccatctgtttcttgtaagttggtaagtactgctgaggggaatttccctccctcccttcttgccaccttgccgaggctgtattcaaattcctgggctcaaatgatcctcccacctcatcatcttctttttgcttttcttttttccttcttttgtccctgtctctctactctctccattgtctgttcgttttcttcatctgcctctgtgatcatgaaaatattcgccatgttattgtttaccgttcacatttagggctgccatccacctggaattactttttgtatatactgtgaggtagagctcaaaatatccagttgacccagcaccacttattgaaaagacagttaattcccccactattttgcagtgtcacatttgtcagatattaagtatccatatgcatgtggttccgtttcaaaaccatttttttgcattggcctcttgttttgttttgttttgtttttccatatgttcagcacaccaagtacattggcctctttcttggtgattgtgcaggtaccacaatgttttcattactatatttatgtatttttagtttcaaacatatgacattgccataggttagaaactcatcagttttcagcattttcacatggttcaatccatcagtaagttttgatatccagtagtttaagttcctctaagtttgttctcaaagattatcttagctgttcttgactttttaaattactatgtaaaacttaggatcaacttttcagtttgatttgaaaagaaaaaacctactggactttgcttggggttatgttaaatctatagatt

SEQ ID NO: 105655 - DNA, 1030 bp, Homo sapiens
tgtgaaaaccagtgctaagaaaataacaaaatgaacgaacaccaaaacacccatgtgtttacaaggaaacaagaaaacatggagttaaagtaagtaattgtgtctacttgacagatgttgggttttctttccctcttggactattgtgtttcctcaatttgtaggtttcatgtcatctttttaaaatagtagccgtcttttgactccttataagttatgttgggccaggccaccttaccacatgaattccctccccactttgcttggtatttgataccctgctttcagccaccatggcttcctccccacccctaaacgaagactctgattttgctctgcttgctctaccctacctgatggctttaggctaaattgtttatgctgaccggagtcagattttatttttagagagataattctggtgaccatatggagaactgggtgagagactgtcagtgttcagttgagtctagtgcagaatctaggtgaggggtttgaaccaaagtacatggggatggataaggaagactaagcactctacagacgatgatgataatatgataaattatataggttataatttactgaacacttgccatccctcataacaacttcatgattgaaggccttaacatttttatttatttatttatttatttatttatttatttatttttgagacggagtctcactctgttgcccaggctggagtgcagtggtgtggtctcggcttactgcaagctccgcctcctgggttcacgccattctcctgcctcagcctcccgagtagctgggactacaggcgcctgccaccacgcccggctcattttttgtatttttagtagagacggggtttaaccgtgttaaccaggatggtctcgatctcctgacctcgtgatccacccgcctcagcctcccaaagtgctgggattacaggcgtgagccaccgcgcccggctaacatttttattttatagatgagtaaacagtcatggagagattacataccttgcccaaatttacctagctca

SEQ ID NO: 105656 - DNA, 1004 bp, Homo sapiens
tgattctcctgcatcagcctcccgagtagctgggattataggcgcatgtcaccatgcctggctaatgtttatgtttttagtagccaggctggtctcgaactcctgacctcaagcgatccacctgcctgggcctcccaaaatgctagggttacagacgtgagccactgctcctggcctcattaatttatttatttttattttttatttttttgagaccaagtctaactctgttgcctaggctggagtgaagtggcgcgatcttggctcgctgcaacctctgcctcctgggttcaagcaattctcctgctttagcctcccgagtatctgggactacaggtacgcaccaccacaccctgctaatggggtttcaccacattagcccagccagtctcgagctcctgacctctagtgatctacctgccttggcctcccaaagtgctggagttacaggtgtgagcgactgcacccggctacttttttcatgaatttagaagtatttatcgtaatgattggctatgttcattgttaattctgtgttcagattttttctcttttctttttttcttgagatgggtctcagtccattgcccaggctctggagtgtggtttggcatcatggctcattgcagccttgaccttctggtttcaggtgatcctcccaacttcagccttatgggtatctgggactgcaggcgtgtgccaccacacctggctgattttttttggtattttttttgtagagacagggtttcactatgttgcccaggctggtctcgaactcctgagctcgagcgatctgcccatcttggcctcccagagttctgggattacagctgtgagccaccgtgcctggccctcagatttcttcttgagtaaactcaagcttacttattttcctttccctcttattcactaagttacagagacatgggggtaacaaaccatttgcagttaaagggcagtatctgacccatttgtttgttatatttttgtctgccctttat

SEQ ID NO: 105657 - DNA, 1026 bp, Homo sapiens
tttttagtaaagatggggtttcaccatgttggccaggctggtcttgaactcctgacctcagatgatccacctacctcggcctcccagagtgttgggattacaggcatgagccatcacgcctggccttacgggtattttaatcaaggaacaaaagtctagtgagtctccctttccccagtgtaaaaacacatacagtgctggaggatgtcttaacacattttcctactctgtctcacttgttttttaagtagtctcttcaaatatttgtcattccagcatccctttgttaaaattttcaaatttacaaatacatttatattacctattaaaaagtcattttccattgtttgctgacagtgaaggaagcacctggattttcttatatataggcggcttagctttagtcagagagtagattcttcctaatctcatagtgtcttgttcttcctaatctcatagtgtcttgttctttcctaatcttgtttctgaatttggtgatcaatcctttggctctgtaaacttttgctcttgacagtttttggaatcactttgcttttttttttttttttttttaaagattaagcgtgagtagttgctatgtagcttttagatttccttaagatgtgagaaaatctgagaggaacattttgacccagtggaaggcatcttggcagttcatgtatatagtcaatttgaaaaggaaaccaagtaagtatcagtgatttcactttgtctttctaaacagcacttttagaaccaggttattgtagacttattgctaggagtgagtgggttgagaacaattaaggttaagaagggggattgtagggctgggtggctcatgcctgtaattccagcactttgggagcctgaggcggaggattgcttgaggccagaagtttgataccagcctggataacatagtgagaccctgtctccattaaaaaaaaaacaaaaacaacttagtcggtccccagataattttagtgtacagcaaaacaacaaaaacaacaacaacaaacttag

SEQ ID NO: 105658 - DNA, 2243 bp, Homo sapiens
ccctccgccctccccctcgccacgcttattggccggagcggcggcgctcgccgggtaggcggtggcggcgtccctcccttgcgccggccctcaagaggcgacgaggaagcggccgcctccctgcgccccgcccctccggctagctcgctggctcccggctcctcccgacgtctcctacctcctcacggctcttcccggcgctctcctggctcccttctgccccagctccgtctcggcggcggcgggtaggtgcagccgcaggcggggtccgattggaggggcggcctcctcactgtcccggggctgcccgagccttgccctgcggcagctgggtaccccacggggcccgcccgaggcgtggaagggcggtggccgccggcctgcgagacgcgggggcgtccgagggagggggccaggcggggggctggcggctttgaccttcggagtctttgaggcgcgatctaggggggtctttggagtgaggggggctgagaggtccagcttttgagggtcggggcggtggggccgagcgacatgccttgggctctggatggggctgagccgcggagcgagggtcggccgcagtctggggccctgggtggggttcggaggtgtaggagaactcaggggtcgttttctgaggctttgtgggggtcagttgatgtgaggctgaggtgagccttagtatgtccagtcagggattatgggtggggctgaggggtggtctggagaaccgggccctaggcggggctcttcccccttgcaaaggccccgacactgtgtggggactaaagcgtgtgtctggcagtgggagtgcgaaagggtcacattagggtgggggtggggagggtacagggactaggagaggcagttggaaacattacccagaacagagattgtgatttagcacatggaacaagttctccgccggtgtgagttagatccctttggtgaaattgtcctgtggaggagttgtgagggttttgctcacttccaggaacgggtaaattaaatgcatttgctgctttggggaagaggcagtgattgattacctttaggtttgtgctttaggacccaagctcggatgaaatacgtgttcctcgcgaaggttagtgttacccagctttctactggaaacccccttttctcctttgccttctctggtcctgttacagtattgctccccagggcctctcgattctctctccctggttgcatagcattgcagtgtttcttgcagtgtgtgtgtgtgtgtgtgtgtgtgtgtgtgtgcgcgtgcgtgtgtgtgcgcgtgcgtgtgtatgtgtgtgtgcgcgcgcgcgcgtctcccgcccatttccctgctgctgtgcttttggcaactgcctctgctctttcccagggatggttgtggcattgcatcaggggatatttgtgcttgtaatttgctcactcagcccaggaggagggtgaatagtatgctgtagagatggggggcgggggcagggtgccgtcagcttggctgggtagacagagaaatgggtgtggtgagggaatacagctgctctaggcctttggggtaacactgcccagtcatcagcccaaagagattcaaagagcaccaccagcagctatttttataaatcaatcctgaatccaagctgagcacatggatttagagtgaacagttgtcatgctctattacaagctgggtgtttggtagacaacattaaagttgctaagcaggagactcccatctgtactgtgcagtgtgtactttacttgcaacttttaaactttgcttttctcaactccaaagattgggacatctctcttcaggctgtgtcttttaaattaacgtagtttgctgatccgtactactacttttcaaatgaaatgttttcacctcagttacacacttcctttcaaatttagcttcaaaataataaagctgtcactttttgagcacttgccatctcccaggcactagctatgtttgttaacagatgaggaaattgagactgatgggaagaagaggtcacacagatagttaagtggcaaaaatggtatccaaccaaaccaaggtctctccaacccccacatagtagttcagaaacttcagaattttggtttacattgggatgattcaagtgcttgagaatttattcatgcaaagtaaacaaactcaccagagactgataaaccagataccagttaatgcatgttggaagtattaagtgccatgtgcacaattggatttaatt

SEQ ID NO: 105659 - DNA, 1049 bp, Homo sapiens
gtggaggttgcagtgagcccagatcgtgccattgcactgtggcctgggtaacagagcgagactatgtctcaacaaaaaataataataataaaaaaagtcagtgctgggtgcataggatactgagtaactattccttttcatggcttggttgtgaatttcttggatctccctctgtgaccttgggcaagttgtgtagctcctctgagccttcagttccttatctgtcaaaggagaacaaattccaacctcattgtgagaactcaagggggtgatgtgtgtaaaactttcaatacgaagttctcatgagttctcccagaagccattgctcttcctctttccctaagcagcctgaggtaatctgtgaaaatggttcactattcacttgacccagagaaccccgcaaaatcatgcaaatcaagaggttccaatcttcgtgttcactttaagaacactcgtgaaactgcccaggccatcatggatatgcatgtacgaaaagccacgaagtatctgaaagatgtcactttacagaaacagtgcgtaccattccgacattacaacggtagagttggcaggtgtacccaggccaagcagtggggctggacacaaaattggtgtcccaaaaagagtgctgaatttttgctgcacatgcttaaaaatgcagagagtaatgctgaatttaaaggtttcgatgtagattctctggtcatttgaggatatccaagtgaacaaagcatctaagatgcgctgccggacctacagagctcatggtcggattaacctatacatgagctctccctgccacatcaagatggtccttactgaaaaggaacagattgttcctaaaccagaagaggaggttgcccagaagaaaaagatatcccagaagaaactgaagaaacaaaaacttatggcatggaagtaaattcagcattaaaatacatgcaattaaaaggggaaaaaaaacctttgaattttccctagaactcaataaggctcagagaaagggaaggtgtagaggtgagctgagtgcctggtgctcagaccccagg

SEQ ID NO: 105660 - DNA, 1035 bp, Homo sapiens
gtaatgctagctaagctggtataatctgaaggccatcccacctttctctttaggcagtcaaccaacagaatctctttcttacaaacaatatcattaaccagttggaatctgtctcaatgcgcgtgtaggaagaagtcctctcccccacatttttcccaacaagattgttttatagccaaatgtaactcaaacccgtaacacagcaactagccatctccagtatcactgattcccaccccaagaagttgaggtaagaggggagagactgtctcctgtttaagaaaaacccacctacacctcagtgaagccgtgatggtaaggaggctggcaccagagggcagggatgagtaggcactgaaacaggtctctctagaatcaatgaagtctgccccagctccttggatgaggtgttcttttgaaattcccacttttatggagttagataaggggacaaccggtgatgattcatcactccctgtctctaaaattaaaacatgataaacccagaaagttttaccttcaaaatccaccaagctccctcctgagaaaattctatccagtcatgtccatgccagcacccactcccttctcctaatgcccagggcttccagcccctctcctcacccttgggtggtccatccaacactgatttgatactctttgactcataatatgaccattttttaaaaattagaaaataaaagctatcaatatcacagcaacataaggaagatactcagtggacatgctcctcccccatcctgtggagcccacctacccccaccccccttccctgggaaacctacactgcaacattccagcactgagccgggggtggcccaacagatgctgcctcaagtgctttcctgactgtggctcctataccagccaatgtcatggaactggggtgaggaagaacagggccacacctcccaccaaatagatatcggtagccagtggtgggtctgggagatttagcttatgtcaggcagccaagcctgggtccaacgctctcaccaggacctcagttcttgg

SEQ ID NO: 105661 - DNA, 1117 bp, Homo sapiens
gggactacctcggcttttaatttaaaaaaaaaaaagaagtgggtaagaaaatgcaaacctgttataagttatcggacagaaagctaggtgctctgtcacccccaggaggcgctgtggtactggggctgctgctatttaagccaagaactgaggtcctggtgagagcgttggacccaggcttggctgcctgacataagctaaatctcccagacccaccactggctaccgatatctatttggtgggaggtgtggccctgttcttcctcaccccagttccatgacattggctggtataggagccacagtcaggaaagcacttgaggcagcatctgttgggccacccccggctcagtgctggaatgttgcagtgtaggtttcccagggaaggggggtgggggtaggtgggctccacaggatgggggaggagcatgtccactgagtatcttccttatgttgctgtgatattgatagcttttattttctaatttttaaaaaatggtcatattatgagtcaaagagtatcaaatcagtgttggatggaccacccaagggtgaggagaggggctggaagccctgggcattaggagaagggagtgggtgctggcatggacatgactggatagaattttctcaggagggagcttggtggattttgaaggtaaaactttctgggtttatcatgttttaattttagagacagggagtgatgaatcatcaccggttgtccccttatctaactccataaaagtgggaatttcaaaagaacacctcatccaaggagctggggcagacttcattgattctagagagacctgtttcagtgcctactcatccctgccctctggtgccagcctccttaccatcacggcttcactgaggtgtaggtgggtttttcttaaacaggagacagtctctcccctcttacctcaacttcttggggtgggaatcagtgatactggagatggctagttgctgtgttacgggtttgagttacatttggctataaaacaatcttgttgggaaaaatgtgggggagaggacttcttcctacacgcgcattgagacagattccaactggttaatgatattgtttgtaagaaagagattctgttggttg

SEQ ID NO: 105662 - DNA, 1050 bp, Homo sapiens
ttgcctgtgaatagttgtcaaaattttccatctaggtccatctgtttcagggcttcatattttccacctcttcctaccaactggagataattttttctacttataattattctattctatactaaaagcaatgaaaaaaaaaaaagccctactggtttactcaacgtggacgattcttacaagcataatgttttttaaagccagatatgatagaatacatatcgtatgattccactttatggaatgaaaacactcacaggtcccttgccctaaaatattcacttaagaactcataattaagtattaaaagcagtaatggctagcactggcgtgggtggctgagttccccgttgcccttggtctcggggtcgcggtcggcactgaggctgcagctatcatggtgaacttacttcagattgtgcgggaccactgggttcatgttcttgtccctatgggatttgtcactggatgttatttagacagaaagagtgatgaacggctaactaccttccggaacaagagcatgttatttaaaagggtattgcgacccaataaagaagttacctggaagtaaagactggctgaattatagaatgttcacattttaaagttctgagagaaataaaaccatgaagaatcaaaaaaaaaaaaaaagcagtaatggctaatattacagtgatttctatgccaacacagtactaagtactttctgtgcattaactttttaaccatcaaatacaacctgattgtcccgattttacaggtgagaaaactagaccttgcaggttaaggaatgtgcccaaaatattgaagtaaaacaggacaactccagagtgagagctctttaaccaccatctatgctgttttccctttaaaacaaagctccaggcaagcaaccctgagaagctatttcgggggaaaaccaggcatcagtacagctttgccctggtaaaaagcactagaggctgatacactgttccaagcactcaaggctggaactcatttccatattctttctcatgacacttcccaggttgataaagaaatcat

SEQ ID NO: 105663 - DNA, 1863 bp, Homo sapiens
tgcctcagcctcccaaagtattggaatcacaggtgtgagccactgtgcctggtcagtagttgtatttttcaagcctcatatgatttgacaaggtaaaacgtttaaaaactatgccaagaaaatctggtacctattgtttctatggttggaactcacagaaagttatctgggtcacctctatctgaataaccaaacaatcatgatatgaatcagttttattcaccctcttctcaaatcctatttcccttgatgttatttgcaaataggagaaaaaacagtaaatacgctatgaaaatattaagacttgtacaaacatgacatttttgacaatctaatagacgtaacatcaattctggcaaaagtacaagccatgaatatttgttgcctgacttaaataaagacccaggtactttgtttagtgttttaattttaatgacaaaatggtgttttttgtattatttcttgagaggttttttttttccccataggtttctgtctagattctcctgggccattggacagtaaagaaaagtatgtattcactgctttcaaatgtttatatgtagaaaaaacgtgtctaaacttaaataccttatttaaatgaagttcttcatacactggactggagccctggatttacctgtgcctagaaacactctggaatctcaagaatgaatagtttgtgtcagcaattttcagaactttttctcctttattttagctataattttggtgttctgtttgggtcttacccaaacccttactctgtgctctgacatcatagccttacaagaacatgtggggtttttttgtttgtttgtttgtttgtttctgaggcagagtctcactctgccgcccaggctagagtgcagtggctcactgcaacctccacctcccaggttcaactgattctcctgcctcagcctcccgagtagctgggactacaggagtgcaccaccacacccggttaatttttgtatttttagtagacacgaggtttcatcgtgttggccaggccaggagttcgagactcctgacctcgtgatataccctcctcggcctcccatagtgcccatagtgctgggattacatgtgtgagccaccgcgcccagccgaatgtgtgtattttaagaaaagacatgggtttgttttttttcacctagaagtctagtgttgggggtgctcctgagaacaggacagcttcagaaatttattctcccatctcttgcctaaaatgggagtctgtgactgtacccccaagctacaggctaaacactatctctctgctaatatgaatacctctttacttgttttattctcattatttaccttctgatctcattacagccttgaaaatcctatgagaagaatacattccctacctgtaagttagttccttgtttattttgagctaatacctgttatctgttccttagctaccagcatgaccttgataggagacttaatttagagagtaaaaactgcttttctttagtctcttttgagacaaggtcttgctctgtcacccaggctggagtgcagtggcaaaatcttggctcactgcaacctctgcttccctggctcaagtgatcctcccacctcaacttccagaggagctgggactatatataggtgcacaccatcacacccggctgatttttgtattttttgtagacatgggggtctcactctgttgcccaggctggtttcaaactcctgcctcggcctcccaaagtgctaggattataggcaagagccactattcccagcctttccttagtctcataagtactcaagatgttcggtctggaggaatttgtcctccatctctaacagagctttattaaaccaggaagggttctt

SEQ ID NO: 105664 - DNA, 1009 bp, Homo sapiens
cttctgctctgggctccgcccccttctgagagccgatgacctggcagagtcccgcgagccgctttcttcttcccctctcattggcccagcctagctgccattcggttgagaggaggagaagttgcttactgattggtggattccgtttggcgccaactaggaaaggggggcggggcagcagctggccccactgagccgctattaccgcgaaaggccggcctggctgcgacagcctgggtaagaggtgtaggtcggcttggttttctgctacccggagctgggcaagcgggtgggagaacagcgaagacagcgtgagcctgggccgttgcctcgaggctctcgcccggcttctcttgccgacccgccacgtttgtttggatttaatcttcaggttgccggcgcccgcccgcccgctggcctcgcggtgtgagagggaagcacccgtgcctgtggctggtggctggcgcctggagggtccgcacacccgcccggccgcgccgcttgcccgcggcagccgcgtccctgaaccgcggagtcgtgtttgtgtttgacccgcgggcgccggtggcgcgcggccgaggccggtgtcggcggggcggggcggtcgcggcggaggcagaggaagagggagcgggagctctgcgaggccgggcgccgccatggaactgggcccggagcccccgcaccgccgccgcctgctcttcgcctgcagcccccctcccgcgtcgcagcccgtcgtgaaggcgctatttggcgcttcagccgccgggggactgtcgcctgtcaccaacctgaccgtcactatggaccagctgcagggtctgggcaggtaaggagagaccggcgggcggtgctccgggcccctggcctcggtgtcggcctcggagagatcaggccaggaaacggaccgggagaagggcgagacccgtccgtccgggttcgccgctcggggacagccgggctagggcctgccatgtgcacccccgcccgggcggaatgttgggcggga

SEQ ID NO: 105665 - DNA, 1028 bp, Homo sapiens
tgaagcctgaaaagtttcccctaaatgtggcagcataaaggattcaggagaacactgacttttattgaggaagacaggtcaaatgttgtttggagtcactgcattttttaggcaagtcaattagacaagcttctttttttttttttttgagacagaatgtcgcccaggctggagtgcaatggcacgatctcggctcactgcaccctctgcctcccaggttcaagcaattctcctgcctcagcctctgagtagctgggattacaggcatgcaccaccatgcctggctaattgttgtatttttagtagagatggggtttcaccatgttggtcaggctggtctcgaattcctgaccttgtgatccgcctgcctcggcctcccaaagtgctgggattataggcgtgagccaccgtgcccggcctggcaagcttcttcttgaagaaggatgaacagttctcagcaaagaggagtcatcattcttctgaaccaccataaacattccagagaagaggtagatagaaggctagatcctggaggatgtgctgtggtgagctaggccctcaggcaggtggtggtgcccagcagaaatggcactgtaagccaggcttccctggtcctaggagaatgttttagactagatgtctaggagaagtctgggcactaccactggtcttcatagacctgcatcaggctggtcctaggcctcctgttccagctacatagtggacacctccctctgggctatagcacacagggccacagcgcaactggggctcttcctcctcataccagcgctgttcactgaagtcagggaagaaggctgcaatctctctgctggctgaaaccacagagtctgtaaggggagataagacagagaaggggttctcacatggtagaagcaagaggcagtcataatcaggttcagaatcctgagcctctactctgcctgccccttcagtcctggggcatgtaaagaaagtccacaggccacatctgccaacatggctacaaagaccagaaacacaaatgg

SEQ ID NO: 105666 - DNA, 1027 bp, Homo sapiens
gtgttactcaaagcttctaacatgtgatgggtgcagagactaaaccacatactaagttgaaagcaaaagaaagttgttttggaaaataatatccattttaggaccaataaactattagctgggaagattcttcacccagcttcctcttcctcttctttttgttctttgtttctgttctttggcctgagggggcatgaggatgaccttcatgtagggtcacatgatctacatgctatggctgcttgtttctgagtgcctccacttgaggcttgtccaggtcacacacagtgccctcaccttagtggatttctgtttctgcattgtctgaataggatcacatgtaccttttgaggtcacagaaaggaatggaagaaagggaggaacaaatactggaggaatgtctggagagaaggtctcattggatgatgtaggaagtgggctgaggtcatcaccctcttttgaccactcttaacctcttgacttgaaagaaagggagaacaaaattaggacttacagaattttggagcacagatggcagtcactactgtaggtaacctggtcactgccacaaataggttcactgggcttgatgtaggataaaaaccagcacttatttacattcttgaggcattcaacctgaaggtgagacacacacaactgcttcagacactttcatccaggtcctttggccgttattatgtatagcttgggaggtggatggaatacgagcaccagatcaggagttcagagaaaaggattcagaagcctcagtgtttgaccccaacagttaccacccacaatatgtatataattgcaaaataatatataatctgtgcactctccagactcccataaattctttattaagataaaaataccggccgggcgcggtggctcatgcctgtaatcccagcactttgggagtccgaggtgggtggatcacgaggtcaggagatcgagaccacggtaaaccccatctctactaaaaatacaaaaaattagccgggcgtggtggtgggcgcctgta

SEQ ID NO: 105667 - DNA, 1052 bp, Homo sapiens
caaattcgtggttcgtgtttgatcagtgtctgttttcccaccacgtgtctggtcattcttgggtctctgccccttgtctggcaccgggcagacaggaacttgggaaatactgttggctggcgggtgggttagccaggatggctgcagcagggcttctgaggagctcgctactgagtcaggtccttcatttcctaccttattcatcctggaaccccgcggtgactttgatgttattacccctcccgccagcgaggccctgaggtcccagaaagtacgtgaagtgaccggctgggtttcttggcctcctaccccactcatgccacagcgtcttaggagggctgttgaattttgcagcaaacacgttggccaaagaagtctcccctgatggcattggtctctgtttcagatcatcactgccctggaggaggatggcacggcccagaagatgcagctgggctatcggctccagcagattgcagctgctgtggaaaacaaggtcacagatctataggaacccaggagccacggcctgctgttgcttcagcctggcctgggcagccctggaagctcggaggagaggccaccttcttaggtgcctgtagtgactgacaagcagagttagtggaaggtgactcccagtctcctggtggctctggcctcggccctgctggatccacctcctagacccggggcctcaaggctcatggggtagtacccagcctgctccccgagtccagcgaccctgtgacaccggtctgcagggagttggggactaagggcttccagagagtggctggaagagactccaggcccctggggagactgtactgttcctgaacactggccttggccacactgggattcggagaggaaggaggagagccccatgcttcctgtctgcctcctccaccatccctgacctcagttgagctgcctctggccttgttgctgctgccacatcctaggtctaagagttgaacgcctctcctaggccactacaaactgacccctcagcagggctggctgccacagggctgccctgcctcataggt

SEQ ID NO: 105668 - DNA, 1047 bp, Homo sapiens
gcctcactctggcaggcacttctctctgggtttgctttccccttagttacgcacaagggttcctgtgggaaacccccattcaggcctgctgaacccctcccctgtcggataggtgggaatatttgctcccgatggtgggaatgcaggcttcccgaaactccgtcagcctgacccattcagccaggaacctggggatctgagtgatgagggacttgtgctcactcatttttttctgccatttaccccatagtggtttacaagtgcactgcgctaggtgctggggtcacaatggggaggaagctgctgtccctggggaaggcaggcaggtgaagagacgagaattagggattgtgtggtgcgtggggattggaggcagcagtttctcatgagttgtctctgcccttggcctgtgtcttggtcatcctgagtgcacatgaaccctgatggctcctgtgtgtcctgcacagaccttgaatgcactattggctgtggggcctggggcaggagaggcccagggcgtgcccgtgaaggtcctagactgtgacaccatctcccaggcaaaggagaagatgctggaccagctttataaaggagtgcctctcacccagcggccagaccctcgcacccttgatgttggtgagggcgtggagagcccctggggacctgagccactgttgggcctgggctggccccggaccaactctgcagggacaactcatcactcagggtggggaggatgctgggaggcaggcagaagctggctttggaacatctttcttggacagcctctcatctggggagggggtccctgctcttggtctttggagaggttgagtaaggctgccccatgatggaggggctggtgtccctgtggaggaggagatgggctccactatgggaagggtatcttccagccctgcacccagttctgccttgcccttgcagagtggcggtctggggtggccgggcacctcattctttctgacgaggatgtcacttctgaggtccagggtctgtggaggcgcctgaacacactgcagcattaca

SEQ ID NO: 105669 - DNA, 1775 bp, Homo sapiens
ggtcgtgggatctggctggactgggaagggacagaccgggccaggagtcaggaaacattctctgtaaatggccagagagtaaatattttcgctttgcaggccaagtggtctctgttcaacaactcagctttgccactgtggcacaaaggcagccagggacgacatggaaacacatgaaagtggctgtgttctaacaaatctttataaaaataggttgtgggatggatttggcctggttgtggttggctgatctctaggctaaactgtgctgggctagacggggcatgggtgtgtgtgacttgcttgggacgggacaggctgaatcgtactgggctaggcttgagcttggctggcatggctgcattggactgtgctggatgaggccggggtgtgcctggggattgtcaggcaggcctgggcgagtaggactcatctggccatcctctcctgaccctggggctgagcaggaggaagagcaagcaggccctgagggactataagaaggttcagatccagctggagaatctggagagcagtgtgcgggaccgctgcaagaaggaattcacaggtgtggctgggagaatgggccccgccctccagaactctgcccaaacccactcccatcacacgggattggtgcttaacaggtgcttaacctggcctcttctgcttaacagacctcatgactgagatgaccgatctcaccagtgacctcctgggcagcggcatccccttcctcgactacaaggtgtatgcggagaggatcttcttccctgggcaccgcgagtcgcccttgcaccgggacctgggtgtgcctgagagcagacggcccactgtggagcaagggctggggcagctctctaacctgctcaacagcaagctcttcctcaccaaggtacccccagctgcatcttcctggcctgcccctggccctgccccttctccagggcatggtttctgagcccgcccctctgtccccctaaaccccttttcccatcccttctctttggctgcagttcatccacacgctggagagccagcgcaccttttcagctcgggaccgtgcctacgtggcatctctgctcaccgtggcactgcatgggaagcttgagtatttcactgacatcctccgcactctgctcagtgacctggttgcccagtatgtggccaagaaccccaagctgatgctgcgcaggtctgtgtggctgttggggctgggtgggccctggacagctggagctggggtggggcctcgggctggggggtctgcaggatagagaggcccgcagccccacctgctgaccctggcactcccctttcccatcatctcaggacagagactgtggtggagaagctgctcaccaactggatgtccatctgtctgtataccttcgtgagggtgagggggcagaggtggacagggctcctgtccagggagggtcaggccctccaaacttctaagccctcagccaccatgcagctcggacacttgtgccagagcagagactcctgctcagcctgtcctcagtccccttaagcccatgtcctgtccccttccccagtgtgcgtcatgtcccatacacctctgccacctgctggggggccctaactgcctgtgctctcctaggactccgtaggggagcctctgtacatgctctttcgagggattaagcaccaagtggataaggggccagtggacagtgtgacaggcaaggccaaatacaccttgaacgacaaccgcctgctcagagaggatgtggagtaccgtcccctgg

SEQ ID NO: 105670 - DNA, 2143 bp, Homo sapiens
gagcccacaggaagtactggcccctgccccagagtctggagggaacagattgctagggacccagcctggtttaagctatccctgtgacccctgggccaggagagatgacctgagctcctctccccaggactgggtggtgtttacctgtgactttcctccatccccgctaggccagttggtatgacctgtgactgcctaggaggaaattctatttgtaaattacttcgattgggtggaggaggggagggctttgggcctctggccatggacttgggtcccagaccctgtggtctctgatcccaggtctacttgggcccagggagcgatggccacccatactccacacagagcatccagcaggggtctgcagtgagcagagacctcacctttgatgggacctttgagcacctgtatgtcatgacccagagcacagtgagtgccaggcacaagccagggcatgactgctgggaggggcctctgggtggggccagggacccacttgtgggtgagccactggtgtttggattgctggcctcaggtcctctttgctgtcacagcttctgaaggttcctgtggcttcctgtgctcagcacctggactgtgcatcttgccttgctcacagggacccatactgtgggtggtgcgtgctccttggcaggtcagatttctgaccccatcccagccccagcctcaagcccacaatgctcctgcataattgtcctgtccagaattcctgacccttagaccatgactctcaacccctgatccccagacaccccaattcctcacccccatcctctgcactgggcatcagtgccctgccagggcagacacaggagcctctatcatgcccactctagggccctgcccaggtcctccagattgtaggagtccctaccctatgaactcccagtggcccatgagggtcacagatagacactggtcatctcgcccaggtgcagtcgccgttctgagtgctcgaggggccagggcccagagcagtggctatggagcttccagcctgagctgggctgtctgcaagtggcagccatgagtcctgccaacatcagccgagaggagacgagggaggtgaatgatcagataggcagggccctggtggggagggctctgggcatcaaggtctgggtagagatcttggatcctgatgtcggacatgccagataccacatggcctcacacaagtcacttcttttaggagctcagtttccccatctatttctaactcaggccagagggtgtttggggaggcctgagggctgttgattgctggtgcctgcccacattgggtgtcccataaatgtgagccctggtctgctgcccactagccccaacagtgtgtccctggctctcttggcaggttttcctatcagtgccagacctgccacccctgtggccaggggagtcatattcctgccactttggggaacatcagagtcctgccctgctgactggttctggtgtgatgtgcccctccccagaccctagtgaggccccagtgctgccgagaggagccggtgggtgagagaatgggccagcctggtgggggccagcccctgcttcaggggatgcggtggggttaaagtgtgaatccaggcaaagagccatgaatggatgcctttctctgggtcctcccactccccaaccacctgaagcctccattctgtgcccttggactgtattccctcatcctgggtcctcttccccattcaagggctcaggatatcggctctgggtctgagtgcacctccttgctgcttaaccctggccctctctccccctctgcagactacgtatccgtgagcgtggagctcagatttggcgctgttgtgatcgccaaaacttccctctctttctatgactgtgtggcggtcactgaactccgcccatctgcgcagtgagttcctcgccctgtccccaggcctgggcttccctgtggcgacccttgccccatggctgtgctctgtgcaggtgccaggcctgtgtgagcagccgctgggggtgtaactggtgtgtctggcagcacctgtgcacccacaaggcctcgtgtgatgctgggcccatggttgcaagccatcaggtgagtgtgactttgggctgggccataccgggggggttgggggtc

SEQ ID NO: 105671 - DNA, 1102 bp, Homo sapiens
tgtagagggtgtgtacctgggtgcctttacagggtggagtttgagcagagagagggacctcacagggagaaggccatgctgggggcctggctgggccctgccagccacggggctccttcctagctgacctttcccaggcccctcgggtgcctggctctgctgccctccccctcctcatgtgggctctgaggaggcgtcctctgtggaatgtgtttggtggccaggggccaggctgggcccagctccaccagcaggctgggcggtggggagggggtgcttctgtgctgcctccccggtggggagcccagggcttccacgtgcctgcagcccaggccccggcttcacactcggctttcccgcctgctaggtgactcccacacgggtcatgctgttgtctcctgatccagccggccctgccaggtgagcctgacctcacactagatatctaggagcagcatgactcctacctattctgagggctctcggaggtggggggcagcccttcaggccccacccctccgagctggaacctcttcccatctctcaggcctgttggttctgtggttattacccttctggattcctggcctgaaaggccctgcacccaactcttgtcttgattctaacattctgctggttcaggagacctccctctccttccttcttctgcccgggaaaccctcatccatgtagagcctctcctttcttggggtctgggcccctccttcccatcacctgctcttctgccccatccagaccctgcttcctgggcatggcctctcagcccctcaccctctgatctggggggatggtgagtggggtgcaggtctcctgagagaatcgtgcctgcagagaatgggcagtgttgtctaggaagtgtctcctatttctgaccttgttctagtgtgtggtcctggggtcatcctggacatagtgcctatctaagaagcctggtcctcctctgctcaccccctaggttaggaggagcatcttggcaatgccacagtcctatcccttaccagtggccccagggtgctctggcggccacgtgagccccactctctcgacctctcttcctgccaggtgaccatgcctgctctgg

SEQ ID NO: 105672 - DNA, 1253 bp, Homo sapiens
acgaggttcgagaggcccagggaaaggtgacagaggtgaggaggggagctggggtggctggccccgccctctgacttgggaaatgtgccaaaccagtcacgtggtgctgggtagccacatccagacttgtgtttagcctcatttctcacgtggaaacctgggcttgatgcttctggggtgaaggtctccatgtaactgtgccacctactttccccgaaaacagttactgtgtaccagtaagtccctggccactaacatccactctgtgaggccagcaaatacttcctttgtggaccatttggggattgatggtgagagttacgtggggcttgctgcggtactgttactgtgtgtaattacaacatcttttgtgaagatagagggcactaggaaatgtcacagtgtgaggtggaaagagctggtggtggttgtcaagtcctttgtggtggcagaaatgcattctgtcatctctgttcccactcctgcttaggcatgtagtagtgtagcgtggtgggaagaacctggggttcagctgggactttgagacaaacagtgccatctctttccttggagattgtgagcttggctgagctggtgtttctgggtttataaactggaggccacagcagtgcctttcatggcattgttataaggcataaataaggcaacacacgggaaacagcctaccaacacaggtttgatggacacaaattgtgtgcattgttagctgttttcaagttttttcaggggcatgttatttctgcttgaatggctaaatctcgtgattctgatgggtgtggcccaaggctgcactttgagcaccactgggtgagccaggattagtgtctaaggaattccgtttccaccctttgcagctcacaccccagtgacctcttctgggaatgcctcgctgggaatgcagctgagcctgtgtgggtgtggagagaaggtgcagatggcctccggttttctctttgcaggctgagaaagtgttcatggtggctcgagggcttgtccgagaggctcgggaggacttggaagttcaccaggccaagctgaaggaggtgagggaccgcttggaccgtgtctccagggaggacagtcagtacttggaactggctactctcgagcacaggatgctgcaggtaggcacctcaggaggcagccctttcgcacctggacagtgaccctagcctggcagatcatggaggggccgggtgggaaccctgactggtctgtagtcagaggcctgg

SEQ ID NO: 105673 - DNA, 1016 bp, Homo sapiens
gggggacggcaggggagaaagccgagattgcataggagacagtagctgtcatctctgccaggaatgggtgactttgctggggtctaaaaatgggcagctagtagaggaggtgctgggaaaggaggctgagaaggttggaggaagccaagaggggcagtgatgttgggaagagagggtgttgaaagtggtgccagccatggcggacactgcatgctttgtctgatgaaggatacacctgcaggggtgttatgggatctcagcctgtgtgtcatgggtgctggccttgaggcctgggagtctgactgggctgctggggcctggatggtatgcaccctcatgggcatggaacccagccttatgaagggggcccaggggtttgggtgtggcaccagcttgggatcactgtcacagtgaagttcccttctgcggctctcagctcaggcccactttgcccagaagacatgtttctacccaaccagctgtgttttcaaagccgctgagcttctccaaagacagttcttagcacagcatgatggagaggaggctagggtgctgtggggagcctctgtctcatatcaccttccatcaggaagcccctttctattctgtatctggagctccttcagttccttcctgtctgcagctccctctgcttttctctctgtggcgtggtctgttggccaccaggtgtcgctctcacagccaggatcagtgcttagggactttgaggtgtggtttggccagaggagggtgctgttggctcagctttttctgggaaaatgggtcacctggccacctctttggggtcctcagagtcactggcactcttgggctcaggtgaggcctgattctggataacaggagactccctgctgtccaggtaatgagaagcaggcccaaacatcaaagcaagatggaaaagggaaagatgagagaaacctaacccgttgagcaatggcaggttggagaggaaagagaaagcttatggaagtcgtgaagtgtgagactgagagttg

SEQ ID NO: 105674 - DNA, 1042 bp, Homo sapiens
actgcaacctctgcttcctgggttcaagcgattctcatgcctcagcctccccagtagctgggattacaagtgcccgccaccatgtccggaaaatttttgtatttttagtagagacggggtttcgccatgttggccaggctggtctcgaactcctgacctcgtgatccccccgcctcagcctcccaaagtgttgggattacaggcgtgagccaccgcacccagccaaagttgttatttttttaaataacagtgctgagcgctgggatgctacagtgtccagagattaggcagatgagtacattttttgctgggtacgtactatatgtaggtaccaagctgaaattctagtgagtgagacagactataaccaaagcaaataaatgggatacatgttgcaggtcatgtgatatatgcatggaaaaaataaagcagagaaagtgggtcaggagtgctagggtgggagtgggatggccatatctgatagggtgcatggggaagacctcccaaggggctactatttgagcaggacttgaagaaggtgagggagcgagcagcacagatagcagctgtcgtgaaggccctgagctggggacaacttggtgcgttccagcaacttcaagaaggtccatgtgcttggagtggagtgaggaaagggagactagtgggagatgaggtcagagaggaatgagagccagtgggtaggttccctgtaggccatggaaaagacaggcttttaccttgagagaagtggggaaccattgtagaggttgagcagagagacaatggttccacctgtgtttggaaaggaacactgactgctcgactgacaataaattgtaggggctggaatagaagcagggtgacatctgtcaggaggctcttgggataatccaggctagagatgtgatgtgggtcactgggaccatttggtagcagtggcagaggtgagaggaggagggatcctggatttggaaagccaggggcatttgctgatagatggatgtgaggtgggagagaaatgaggaatcaggggtgatgcgag

SEQ ID NO: 105675 - DNA, 1113 bp, Homo sapiens
tccgattctaccctggcaggacaaccctagctcctcgtacctggcgtggcccgaccaatcgtctgccactcagttgacctctgacctgttagtacccgcccctggagcgccgcatccggtagcgagagttcaacttcctgactaggagccaatcagcggggccgcctcgctgtctacgacagagggtggggcagacgctccgtttccggtggcagggtctggggaagcggcggcaggcgccatgtccggccgcgaaggtaagtgttccggaaccgtgaggactgcggggacggcggggtggggaccgggcggcaggggcaggccgaacgtgctcgtgtcgcccacaggtggcaagaagaagccactgaaacagcccaagaagcaggccaaggagatggacgaggtgagggcgggcgcggaggcactggcgggtgcgggggcgctgggagacaggcctgagttgaacacgctctgcctctccccaggaagataaggctttcaagcagaaacaaaaagaggagcagaagaaactcgaggagctaaaagcgaaggccgcggggaaggggcccttgggtaagtgggggccgaatggagctcaagctggccaaacgctatgagcacctattgggatgagggcgcgggcatgtctttttcctgcctcctgaactgcgaggtctcgttttccgacgtccgctgcagcgaatggtctctagccagtctaggatttgcagcggcagtaagggccgggagctggaaacgaggtctcctgcctcccaggcagtctgggcttccattccttaggaagagctgcagaaacggaaacagtgaaatgtatttacctcagacgcagattcacagttaagtttctcaaagtctgacgtcgtccgcaatcttttgccccaaattcgtatttcactgccttctagtgtttgaaccttacttgacttagaagtttttttgttttgttttgttttgtttgagacagagtctcactctgtctcccaggctggagtgcagtggcgtgatcccggctcactgcagcctccaccttccgggttcaagcaattctcctgcctcagcctcccaagtagctgggattacaggcgcctggca

SEQ ID NO: 105676 - DNA, 1177 bp, Homo sapiens
tgcagcctgggcgacagagcaagattccatctcagaaaaaaaaaaaaaaaggacttctttttctgtaaaatgggttgatatggcatgaggattaaataagccaatctgtgaagtatacagaagtgtagatctagaccagtgcacagccagccactgcttgtactccatctcatcctcattttacctttacctagaacagacagtatcagtgaagctgctatccatgcttgtgttaaagtgaatgcccaatacaaaagccaggctttactaaggtccacagcaggcccgtggggcttctaccgtaagaactatatttttccctaattgtgactatttttcttttgcagccacaggtggaattaagaaatctggcaaaaagtaagctgttccttgtgcctgaggagatggtgaccctttatttcatctgtatttaaacctctctattccctgccataacatcttttgccacgtatagctggaattaagtgttgtcttggagctgttgtacatttaagaataaacttttgtaaaaaaagaaaaatcttacagtggctcatcatctctttagttgttttcactaagtcattcctaccataactgtgaatttaaagtaaaaccagctcagaatcttgccagagtctgttctttggtccttgttctaccctaaactttgtatcacctgaaattaaaccaactcatttgaaaggatggcgttcttgtgtggttgtatacctgacagaataccttacatgagtttagtggaagaatttgcacttttttttggtgggggagggggtggagtctcactctcacccaggctggagtgcagtggcatgatctctgctcaatgcaacctccacctcccgggttcaaactattctcctgctttggcctcccaagtagctgtggttacaggcacccgccaccatgcctagctaattttttgtatttttagtagagaggggtttcaccatgttggccaggctggtctcaaactcctgacctcaagtgatctgcctgcttcagcctcccaaagtgctgggattacaggcatgagccactgtgcctgaccagaatttgtgcttttaaaagaaaacccatctttatgttgtcacatccaaattgccgtatattttgatgagacttgttcatctgttcatgtaaggcgtctgctata

SEQ ID NO: 105677 - DNA, 1035 bp, Homo sapiens
gacttcactgccgacgacctggaggagcttgacaccctcgcgtcacaggccctgagccaatgtccggccgcggctcgggacgtgtccagtgagtgctcctcgcggccttttgctcggagggagttgtcaaccgcgccagatccccttgatggctgtggcttcggaacctcgcggccagcactgccttttcgcctttttaaaatatgggaacaccctgatttaagcagcggttgtcttccagaaggtcctttgattttagggggaaatgcattagccaggtcaaacagccgatttgaaacacagaaggctaagttgacattttacgttattttctaaagtttaggccacttggttcttggttctaagcagagatccttggaacacacctaccaccaccatcagaaccatcactacccatgcatggggacccattcttgtgacaagtttgagcggctttagatcttatgaagcccactgtctcccttgggcagtgtgagcatgggaggagccagacacaggcaagagatgaaataaatttattcttttatacaaccagtaaactgtgctaggtgcccaaacgtgaggaactgcagctgaccttacaatgaacaaaatacaaaaactgtccttcatggagcttacattctagttgaggagtgagtgaagtcttgaggactcccagaaagagaaatgttttgagtgcaccttgcatctgtacttgggtgtctcaaggcaccttaaactcaacacgatcatttcctggaaacccagtcctcctccagcacttctagcatggtgccggcaaagcagacattcagagaatgatgaccagatgttccacaaggaagtaactagcacgactctccatccagtggcacaaagcgactcttcccctttccttgactctacatctaatttatttggaaagcatgtcaagcttaccttcttaatccttctctggagtctatcctattcacattgcttctaccagctgcctgatctgtgttaccatgagtcctctcttgaacaatggtc

SEQ ID NO: 105678 - DNA, 1119 bp, Homo sapiens
ctcccaactatcatgaagacaggtgttttatgttacaaataagttaggattcaaagacattaaataaatggtgggctggtatttaattcttttttttattttttaaattttttgtagaggcaagatcttgctattttgcccaggctggtctcgaactcctgggctcaaatgatcctcccgcctcaacctcccaaagtgcttaggattacaggcctgaaccaccacacccggccagggctggtatttaaaccctcacaaactacccttacaatagagtccagtatctttttagagtaccatattgtctttcagaaagaaagctaatgtttaatattttaggacatttatgtcacagcagactttcatatgtatttttcattgtttgtcttttactggcttgtgattttgaagcccagagatatttttgtgtatatgatgggaccactacaagcatgtttcttttgccttccagctccaatcattgcagtctgaactccagtttaaagatgcagagatgaatgaattaaggacaaagctccagaccagtgaacgagcaaataaactggctgctccctctgtttcccatgtcaggtaatgatggtgctggagggatagttcagttttgcattatttagtaaaaaatctgcataacagtgtcaggctggtcctaaatgaaggccatttagacccctccacctgggcagagatcctcttttcctgaaggattcagaggtggtttagatgaagcttgcatggtttgagacatcacagcataaaggcctatactctagaaatgctgcctctgtatggcactttataaacataattcttcaggactagaaagacctggaaaaatgatctccaaattttgggggtgggctagtctctacttttatgtaatttgtttaactgattttgttgcaagcatgggtgtattttagttccagctacttggaatatttttttctcatttgctttctggggacccttgtccaacagccccatcctttgtggtcagatgtgctcaacttgttttttttttcttttttttttgagacagagtctcgctctgtcacccaggctggagtacagtggtacaatctcggctcactgcaacct

SEQ ID NO: 105679 - DNA, 1044 bp, Homo sapiens
agtagagacaggtttcaccatgttggcctggatggtctcaatctcatgacctcgtgatccacccacttcagcctcccaaaatgctgggattacaggcatgagccaccgtgcccagcctctgttttccttttgtagtccagcttttgagtttttataactcagtccagattgaggggatctgctgttttttagagagagacaatctaacatcagtaggttttcagactgctatgtcagtgtatcttataaatcggatacattgaccctcttcttaccatcaacctttcaaatccttggccatcataacacttctgagaaactgtagcccacttacatttttggcatctagcagctaaaggggcagtgtacagtagtgttacaagcgggcagtagagcccagtagcctggatgtgagtcccagtaatgctgttaactggcttatatgatttgggcaagtcctttagtctctgtgcctcagtttccctatatgtaaaacagacctaatgataaatccttgtagggtcactgaggaacaaatgggctgatgcgtatagagctcttaaaacactgtctagcacgtaacaagcaccatgtcaatgttagtggtcactgttttatctaattgcctcattttgagtgaggcaaacagcttgattttcttttcctttccttgtatgagttcctgttttacataaggaaggtaaaagatgcagggctcttgagccgctttggctcttgtttgttccaagttcgaagaagtagaacagcgtgtgttttaaactcattgcatgtaaaagtttctaatatgcccatgcttctgggctcaagttttgatttacattttatcacatttcagatagtaagccccacagtctgagaggtgactccataaaacaagaagaggcccagaaaagctttgttgacagctggagacagagatcaaacactcaaggtaccagaatccctgcttctcctgcaggggcctgcatggctctgagtaatatgcagaagaattgcccaggcctctgagaaccggtgccccgg

SEQ ID NO: 105680 - DNA, 2037 bp, Homo sapiens
ggacagttggcatccaaagaatccttactgtttccttctgaaagccaccgaaaagatctcccatgtcagaaccttctagagtcatcttgtcttctgcaggttccattttgataaacctgctcctgaagcagcctttgatcccagggtcatccctaagcctttgccacctcctgagtagtagttctgagtctcctgctggcacccccctgcagccaccagggtttggcaggtaagcataagactcctggaaagcttgtttgggaaggagcttcctggaagcaaattcctttctggccctggccagcctgagaagtctgtgggaagggcaggcagcctggagaatttggcaggcaggctgtttggggctcttgaccttatctccatcccacacttaatctatttttctttgtgtttgttgccagtaccttggctggaatgtcaggcctcaggaccacaggttcttatgatgggtcattttccctctcagccctgagagaagcacagaacctggcattcactggactgaatctggttgcccggaatgagtgctcacgtgatggagacccagcagagggaggcagaagggccttcccactctgccagcttcctggagccgtgcatttcctcccccttgtacagttcttcatcggcttacactgccaggccctgcaggacttggcagctgctaagagaagcggagcacctggggactcaccgacacattcctcctgcgtgagctctggggtagagaccaaccctgaggactcagtgtgcatcctggaaggcttctctgtgactgcacttagcattcttcagcacctggtgtgccacagcggagcagtcgtctccctattactgtcaggagtgggggcagattctgctgctggggaaggaaacaggagcctggttcacaggcttagtgatggagatatgacctcagccctaaggggggttgctgatgaccaaggacagcacccactgttgaagatgcttcttcacctgttggctttctcttctgcagcaacaggtcaccttcaagccagtgtcctgacccagtgccttaaggttttggtgaaattagccgaaaacacttcctgtgatttcttgcccaggtattaagctgcataggagtcatgattctttgtgggtctcacctgacctcttaaggtctaacccatggcacttgtactttgctcacatcttgacttatctacactagttagttctaaggcttggttcagggagttctgaagtgatgggaagtggggccaaatgggagaaccaaggaagtggtttatttgatttaattctgcctctgaacaacaggtaagcaaaaggcacacatgattaaaggaggctgctaacctctgtggaggagggccctgccccaggacaagggttaagacaaggggcctctgaacctgagatgtgggtaaggtgaagaccacacatcacaagcacgttgaagtttagtggtttccctaaggaagcagaggatgtggagagggtctgcagcccacgggctgaccttgctgggagtctctgcctgtcattgtgcccatctttagcatgcatctggggtggcctgttcttcttaaggtttgtgggtagtatattatagtgaacctagcgaatgaacactgtgatcataaattcctcccttgggattccagagccgcaagattggggagaactgtgaacacaaccagcccaccccctcatccagtaatccagtctccctcagcactctaccaaagggtcagtttctatgttggaatgattccactggctgaatatatcttaaatcatctcatctctgagctcagcactgctgtttcctagatctgtttccatctgaatatttttggttggtctggcccatgctaaaggtggtactcagctggacacagcactgcagtgtagtgtgggcagtgggatcaggcagactcaggactcaagtgcccagcaggggcccagctcatagtggctgtttttttttgttgttgtttatttgtttgtttttgtttttgttttgag

SEQ ID NO: 105681 - DNA, 1128 bp, Homo sapiens
gggcatggtggctcacgcctgtaatcccagcactttaggaagccgaggtgggtggatcacgaggtcaggagatcgagaccatcctggctaacatggtgaaaccccgtctctactaaaaatacaaaaaagtagctgggcgtggtggcaggcacctgtagtcccagctactcgggaggctgaggcaggagaatcgcttgaaccctggaggcggaggttgcagtgagctgagtttgcgccactgcactccagcctgggtgacagagcgagactcagtttcaaaaaaaaaaagttcttaacgctatcaaaaaataacttggaaaccactgtggtgtacataaaagtggattttccttgcagtaccttctgcaagtggcagatattggacatcttacagcccaataatgaaaccaggtaataaccatgttaaaattccagcttcccacaaagggctgcacaccctggcaactaaaaagcattgaactttttgtctgctgtgcaggatttgccctaaagtgagttcaccccacatagtgagaccttgcttcctaaggacacactgagggatatcttgaccttctgtgcttagaaactgcagatgtctgaaggggtacacacctggccagaccccatagagtgtttcagaattgccctcctccccacccaccaggccagtccatcgtgctcccccaggctatgtgggttgagcaaacagcagcagttgccttggggcttggtttattggggtaatagctttccttttgcccctgagacctggggcagtatgcccagaacccctccctcctgcacaccccacagtaggcacattctcccactggcagcagatgtgttttctggcaagtagagaaaatggctttccttgccctgtgagaggtctcataagatccagccatagccaaggccatgtttgtcacctctggaggcctggtcagtccttctgtgggcacagaacatttctctcccacctaagttaggacctgcatccctgtttgggagcatgtggaagccaggcatcccagatccaggaggtcatcccacttcctgggcgatgctacaccagataagggcctgtcctctcagctgcagcagtcttgcagtggaagtgcccac

SEQ ID NO: 105682 - DNA, 1065 bp, Homo sapiens
cgcactgtcagccactgtctgtgcaacatcaccgtgagcgctctgaccacctgagagagggggggtgcagactgaggcctggtgccaccatggcctgcaccctaacaatccgctcagcctagccacctcacgtgagggggtttgcagtggggcctacagtccttgcacggggcccccttaccaccagagctgccagctgttggcccctacccactcacctccacattacactggcagttggagccagtgactgggggcaaggggctctgcacaccaagcttagccaggagccacaccacctagaacaagaacagagtggttccatcctgggcagaaggagaccagtccctgcgagggttttcttaagcttctataagagttcacttgcttcagcaactgtttgtctgcacaaatggggtccaagaagtggtgtgggaccttcccagggaagacccaggacaagcactcatgtgtcaccagcaacccacctgcctccagccccctattctgcccccacgtcccaaagccaagacaggatcagtcatcaggcaactctgccaagtcctgtctgcattgcatctgtgtggtgcacagcccccaaactgagtttacctctttagttgctttatcaactcttgttactaaaatgaattaaagctccgtttctcctcagcggaaagaaaggagattctgttggttcttaggatggggtggggacagtgtccagaaggggctctggagtttttacctcttgttccagctggagccattgtgtctccaaggccactctgtcaggccgtgatgtgatgtacatgtacagcagcagcaggaggcagccttctgaaaaggacagcgcacctctcactcagggtgccctttctcataaagagcgtgggctacatactgcagaagccctctgaggcccttgaccctgttcccaccccaacccttcccttgatctgcaggagcagtctagatgcccgccccaccctgctttacctgagtgggaacagagctgaggtgccagctggtcgtggtccgccagcagggagaggagctcaacag

SEQ ID NO: 105683 - DNA, 1019 bp, Homo sapiens
tgtgaaggtaagcctgccagaggccatcctgcccagcccccatggcttcttccagaggttccccaacaagtcagattcctgggtgtcccctcagcaggcccccgcccactgcagcctgttccagcactggggccattttcttttatcttcctgcctcagttcttctccaagcatattgggatgccttttgcatctatctgttgagtgtgcctggcagagccacggtttttccagaaatagccgtgtctgaattgcctttgtatcactttgtttgcagtagctgagggagcagggcctgggtgtggaagggactggttagttcctgcggacgttgggggaggagaggtgggacctgccctaggccctggcacctttgggccctcaccaggaacctctcctttttgtctcagaggcagccctggatgacctctgtgccgcggaaaccgatgtggaagaccccgaggtggagtgtggctgaggccctgagtgtccagccacatggtggcaccagcaccactcctttccttaccacatcaactgattaaagcagtgaccagcaggaactgcccagagaactggctggccttgtttcctgagtctgatctgtttggcggagtgggaggggtggagcaggacccggaccctgagtggctgggatccttcttcctgtccctggctgttgctgagcccgtccccatggtaactgatctgccttgaggaaggagccctgccctgcctgtggaattgtcctgagtcattgctttgggctggggccatgggaagaaaccattgtgtggcagggaaggaggtggctcttggcccaggcctaaaccaggaaagcctgggaaactgggacccacaggtgggcatgaaagggccgcagcaggggctcccagcagtgtgtaagaccgggagctggtctggcaccactgccctggtccttccagctgcctgtcactggtatgatggccccggtgcattgtgccaccagcaggccacagctgtggatcttggaaggc

SEQ ID NO: 105684 - DNA, 1748 bp, Homo sapiens
tcctcccatgcctctgagggtgggacaagcgggggagacccagggagagacagttacagggactcacatataccccagtttacacaagaggaaacagattgaaacaggtgcaggccacccgacaaggaagtagctataactgtattgcccagaccccttctggcaagaggggcatgccttgggaaggtgtggatgctggtctggggaggggcgaggtgccccgggtcacgtctagctctttggcaggttcggagcgaccttggccgttggcctgaccatctttgtgctgtctgtcgtcactatcatcatctgcttcacctgctcctgctgctgcctttacaagacgtgccgccgaccacgtcgtaagcgtgcccaccctgccccactgtgaccccctggggtggtaagggaagctgaccaggccctgctttggctaagctggagggatgggtggcaagcctggctctcaagacctggggagatggaggagggtcctgactggaattctctttgcagcggttgtcaccaccaccacatccaccactgtggtgcatgccccttatcctcagcctccaagtgtgccgcccagctaccctggaccaagctaccagggctaccacaccatgccgcctcagccagggatgccagcagcaccctacccaatgcagtacccaccaccttacccagcccagcccatgggcccaccggcctaccacgagaccctggctggtgagtgcccctgccaactctagccctgcccgacttcccgagtctctgccagcatccctcgggcacccatcccaaactacatcactcaacaggcctctgcccctttctgcttgcctgccactcacacggcagcccaccatgctcacagccaaccagggtcctctctgctttcaggaggagcagccgcgccctaccccgccagccagcctccttacaacccggcctacatggatgccccgaaggcggccctctgagcattccctggcctctctggctgccacttggttatgttgtgtgtgtgcgtgagtggtgtgcaggcgcggttccttacgccccatgtgtgctgtgtgtgtccaggcacggttccttacgccccatgtgtgctgtgtgtgtcctgcctgtatatgtggcttcctctgatgctgacaaggtggggaacaatccttgccagagtgggctgggaccagactttgttctcttcctcacctgaaattatgcttcctaaaatctcaagccaaactcaaagaatggggtggtggggggcaccctgtgaggtggcccctgagaggtgggggcctctccagggcacatctggagttcttctccagcttaccctagggtgaccaagtagggcctgtcacaccagggtggcgcagctttctgtgtgatgcagatgtgtcctggtttcggcagcgtagccagctgctgcttgaggccatggctcgtccccggagttgggggtacccgttgcagagccagggacatgatgcaggcgaagcttgggatctggccaagttggactttgatcctttgggcagatgtcccattgctccctggagcctgtcatgcctgttggggatcaggcagcctcctgatgccagaacacctcaggcagagccctactcagctgtacctgtctgcctggactgtcccctgtccccgcatctcccctgggaccagctggagggccacatgcacacacagcctagctgcccccagggagctctgctgcccttgct

SEQ ID NO: 105685 - DNA, 1023 bp, Homo sapiens
ggtgggagaggaggagctaaagggacaggctggactttgctccttgcatgtgtgtcagccagggccccagggtcgccctctgggcctagatggatgcagaagctcctcctggaggctggtggaacagggccggtgggttaggtggaagtgggggtgggggtgctgctgagctagagtgtggttggggcccactgaggctggggtggctcttagaccccctagtggccaggctgcattctgaggtcaggccctgtaggcttggctcagggaggcagctctgggaggcaaatggggcacctctgcttcccctcctccccggcccccgccccttggctccttggctgctagccggctgctgggcggggccatcctgtgtctttaagagggtggaacggggcttcgcgtctgtgcttcctgtggctgacgtcatctggaggagatttgctttctttttctccaaaaggggaggaaattgaaactgagtggcccacgatgggaagaggggaaagcccaggggtacaggaggcctctgggtgaaggcagaggctaacatggggtgagcttgggcgccatgctgcgtgtgtgtttgagagacaaacactgagagatctctggagggatgataacggccttgcggtcgcatgtcattgatggcgtgtgaatgtgtgtgcgtttctccattcctgcctctggttgggccggaagacacctgtagtctgctggtcctgttttagggccttgtcctggacggcctggggctgatggctcctgctttgagagtcctgaggggtgcttttgagcctggagtctttagctctgtccctgggctgtgctgtggggccctgctgaagttgtgcagtcccagggcggggtagggtgggacccacaccctccttgggcctctgttgggcagaggctgctgggggatgccctacagctaacaaagctcctagagtttttggatgtgtttgatgcagttaccaagcatttgccttttgttggaataaagcttgggttgggcat

SEQ ID NO: 105686 - DNA, 1030 bp, Homo sapiens
agagagcaagactctgtctcaaaaaaaaaaaaaaaactttgtggaaatgtaggccaggtgtggtggctaacgcctgtaatcccagcactttgggaggccaaggcgggcagatcacgaggtcaggagttcgagaccagcctggccaatatggtgaaacactgtctctactaaaaatacaaaaattagctgcgcatggtggcgggtgcctgtaatcccagctacccaggagggtgaggcaggagaatcgcttgaacctgggaggcggaggttgcagtgagccaagatcgtgcctctgcactccagcctaggtgacagaggaagactccatctcaaaaacaaaaaaaaattataataaactttgtggcaatgtggttactgatttgtaacttcatcctgttgtggtcagagaagatcctttgtatggtatctgtcttctaaaatctgctgagacttgttttgtggcctaacatatgttctctcctggagacagtctggtggacacctgagaggatgtgtggctttgtgctatgagatcccggtgtgggcagagtccacctctggaaggccattgaagccaccggttcatagtagcttctgtgcacgttttgtggtgccctaaggtagtgtttgtgctggcgctcggtggggcttcattgtgctaatcacaaggtttcctgtttgcagcgtgcctgccagtgtagagccggtggagcagctgggctcggcgctgaggtttcgccctggctacaacgaccccatgtcagggtaagtaaagcctgctggctgggtgcatcttcctggcaaaggtgacaagagggctcaggggggccagtgtgcatctgggggactgggatgattcggtcattggggtggagcccaagaaactgtcaccatatctgaccactaggacacttgctccttatgctgtgaaggtgtcttcattagtgtgctggggtggtggggacgtgggtgactgtggtcgggggttgacaattgaagggccaggggtccggggtacattgacctagat

SEQ ID NO: 105687 - DNA, 1030 bp, Homo sapiens
gaatgtgagcggagtgtggacaggttggagagctggagtgatcttcaggactctgcagtttagaccctgcttggaaactcgggccttgatcctgaagcagtgggaattaggggaggtttgagagcagggtgtggccccatcagactcacattgagaaagttcaccctcctatcaggaggccagtgcactggtgagggagagagggagcccagttagggcagctctgttgtggcccgtgggatagggcaaggctgagggggagcagtggccaggggtcagaaggtggcctgtggctagggtggctcagagacggtgcagcatgtgtgtgtgtgtgtggtctggtggctgtgccagggagggcgctgtgtctgctggggcctggcccgtgggcacaggtgaacagatgtgtttctcctctccagcacgtggtgaggtgtgtatggcttcccgtggactcagcctcttccccgagtcctgtccagatttctgctgtggtacctgtgatgaccaatactgctgctctgacgtgctgaagaaatttgtgtggagcgaggaaaggtgtgctgtgcctgaggccaggtgggtgcaccagtgggtcacagggtgggtggcttgagcctgtgccccacaggagagtatgtggaagagagatagctctgcccctctggcctctcagccctctcaagatggtggccagagcattggagcagagggtttagggatcccctgttctgggctggaccccctagacctgctcagttagtcccctgtccatctcctccctaccctgagggctccagcttgctgagccttgggctgagcaggtttcttagaggtccttggcctcagctggtcctgtgactcaccccgggtgtgtacctgtgccaagatgtcctcagggtgggtacttgggcttgactataccccacagtatgcgcatgcccctgaggggtatcctttgttcagaacccgcttgtggagcctgtagggtgcagtgcgtaagcatgtgccccagtgtgagctctatctg

SEQ ID NO: 105688 - DNA, 1049 bp, Homo sapiens
tgaacctgggaggcagaggttgcagtgagccaagatcgcaccactgccctccagcctgggcaacagagtgagactccgtctcaaaaaaaaaaaaaaaaaaagaaaagtgagctaggtcccataagatgaagctggcagttctgctgccttggtatctgttctagccagctgggaatatagggggctgtattcagatccttccgtgcctctagcctggcatcttctctggctggcacactgacctgtggcacatggatggtggtgggtgggctatcagagggactgtccttgtgggcatcagtctgggtctctggtctcaaccccttgtggtccttaccctgagagacttctagatgcctccctccctgatcctgcccacagttcctgagcaccagcgctgtgccaggccccagggccctaaagggctcagataccacagggcttcttctgctgtaagtgatcagtctagagagaagagtgtcattagtgaggtgaccaggattgagggtgaggggtgttcccggtggccatggagatgccttggggaaaggactcattgaggaagtgactttttagctgggctttgtatgatgaaaagaagttcaccacagggagggcatgcagtggggctatgtgttctgggagcactgagtgatggatggggtgggagagatgtaaaaaggttagggtatggattcctggatgacagaggcagggtgttgattaccctgctgggttttggtcctgtccttcatgcggtggggacccccctagccatgtttagccagtggcaagttcggttgactttatgcctggtggtgcacatcaggatgaaaagggctggagagatcccactgtgtctgccagagcccaggcgggcctggggaagggggacatgccaacggtggcttgaaaccagcatctggggccactccaggagctgtgtggggatgctaggaagccaagaagatacgtctgatgccagtcccatgccctgaggctgagagaccacaggctgagagggaggggtgcgctgggagggtcccagc

SEQ ID NO: 105689 - DNA, 1925 bp, Homo sapiens
ccgggaggtggagcttgcagttagctgagattgcaccactgtgctccagcctgggcaacagagcgagactccgtctcaaaaaaaaaaaaaaaggccaatgcaactggtggcaccacagagccctcctcttgtggaggtgaggaggcaagatccaaggagtcctagggtatacgtttgtaacattatttgcaaatgtccccagctctcaggggacccaagagctaatcacagccctgtaatagctcctctttctgccccctcacttgccaccccctgcagggccagcagccagaaatacttgagggagagctagagggaaaaggcaggccaggtggctttgtgcccaggagtaccagtcttgtccttgatgtaggtggaatgcatcttctcaagtgagaacccacacttggatcacatggcagcccattttgaaactctgaacgcttttgctctcctgggactgaggccatgggagctatttggccctgaggtgcctgtcctgtccacaaggcagggtctgtctgaggaggaccttctttcctcaccctgttctaatgtcacatactcctggtttctcccactaagacaggacatgggggtcctctgcctgtctgtgaatcgccccaccctgtgccttgggccctggctggtcagtaatgccactgtctgtctcagcaggagtggagcaccagcaactgttagacctcgcccagaagcacctcggtggcatcccatggacatatgcagaggacgctgtgcccactcttactccatgccgcttcactggcagtgaggtatgctgccttttgggcaggagtagtgctcagctgggggcctgtgggaggacccccatgtgcatggttatcctggtgactccagagatacctcagcagttgggaaggggttctgtggctgctgcatcacaggcacacatgttcacacacatacaccctctacccacacctgccaccttttctgttcccctggcagtctggctgttcctcagccttgtcatgtactgtttcagatccgccaccgtgatgatgctctaccttttgcccacgtggccattgcagtagagggtcctggctgggccagcccggacaatgtggccttgcaagtggccaatgccatcatcggccactatgactgcacttatggtggtggcgtggtgagtgccagcgcgagcatgggacctcgccttcagggaagagagggtgctggggctgtgtgctcctgtgcgtgggggtcacagtgtgcgttgaagacaagagggtgggtgctgaccacctatccccctggcagcacctgtccagcccactggcttcaggtgctgtggccaacaagctatgccagagtttccagaccttcagcatctgctatgcagagacgggcttgctgggtgcacactttgtctgtgaccgaatgaaaatcgatgacatgatgttcgtcctgcaagggcagtggtaagtggcagcctggtattcctaggtgggatggcggctttaaccagcacagtgggaggctgagagatgacacactggctcagaatgaataccacccacccccccactttaggatgcgcctgtgtaccagtgccacggagagtgaggtggcccggggcaaaaacatcctcagaaatgccctggtatctcatctagatggtgagtcctacagctcagcggggaggggtagagtacatcttgccagcgacagcaccaaggtggccactgctcctaactaaccaaggttagaaaggaaaactttgaagaccacgccatgccccatcaccccacccttggagatgcaggcaggtgtgagacaggtccacagcccatcactgccataataggtgaccatagaagagagggctgtgatctgagtcagcatgaggtcagggaggtccttgtcaacctgaggctgga

SEQ ID NO: 105690 - DNA, 2528 bp, Homo sapiens
caaaaaagatattataggaacaatatttagtgtgataaaatatacagtctaaaccaatagtcccttccttaatgatgaaaggataaaatcattgccagaacaaaggcagcgtgtaatttttagaaaggaaaaaataagttgttatttgcaaatgatatgttgtatgcttagacaaaaacaaataattaactgaaaattgagagtgaatttaaggatttgtatgctggtgagaccaggtaaatgtgcacagttagaagtgtccctgtgggtccttgatagccaatcaggagagcaatgatgtggtgtgacgagtcattcggctgcccctgttttccaagcatgactgtgtccccaagcacaggggtcctgctggggcagctctccctgactccaggattcataagtccctgcctggggcttgtactgagtcactcaggtggggtgtgagtagggggctggggagtggtttgtttgtaaccttttctggtggcttcttgaccaggtgggagtgtggattgatgttggcagccgttttgagactgagaagaataatggggcaggctactttttggagcatctggctttcaaggtgaggctcttaaagtctgtctcctctgggcttagggctgcctgttgtccctcctgaggatgaaggtcagaaaaattagcctgattatgggcctcagttgcggggctgatgtctggctggctttcctaaaaggagccacatgagcttaacctctcctgagtgggcacgtatctgatgagcccctgcctgaggccctcagagccaagaggacccaaggaaccataggagccccacttttcaccagagaagccaggcctgtggaacacacgtagatatgcacatgcattttaacaaacccacagacatgggcatgcatgcttgcttatgaaatgttcttctctggtggaatatctaggcatcccttggttgtaaagacccatgttttttaaaggaatgaaaaacatggagaaggattatggggtgggcagggccatggagccatagtaggcaacctagccagctgcaatgtcacaggtatgtgtgcagaattaacgtgtgtgtgcacaccaagagatagcaccactgttctccacacacaggactaggattgggtcccacagaggccactagcatgtattcacaaacatacagtcatgggaatggcatgggaggagtgggttctatcacttgaacacaggtgtgggcttacctgaccatggctgtcaataaggaggggggaggtgtactggtaatgatccccacagcttgttggtaagctgttacaggagctttaggcaacacttgctctggccatgcccttcagtcctggccctggctatctctgttctgttggcgcatgatgccatggttttggtcacctcaaggcctgcttagtgcttggtaaacagactctgggatctgtgtccccagagtctatgctgagggaggtacctgtggaccagtggtcctgctgggtgtttagcctctgaggacagggttcttgggttcctgtgtagctcctgattgttctggttgatatctggttccagggaacaaagaatcggcctggcagtgccctggagaaggaggtggagagcatgggggcccatcttaatgcctacagcacccgggagcacacagcttactacatcaaggcgctgtccaaggatctgccgaaaggtaacacctggaggaagaggcggggacagagggcagggaagcagaggacagctacctaggagcccctggctgaccacagaatcatattacccttagcgtatggctttgcagctgggcaactaggggtgggcagcaggagatgccaggcctggggattttgtgctgtcgttggtctgcagtggtccacctggcacctaaacatgtcctccttgcatctagctgtggagctcctgggtgacattgtgcagaactgtagtctggaagactcacagattgagaaggaacgtgatgtgatcctgcgggagatgcaggagaatgatgcatctatgcgagatgtggtctttaactacctgcatgccacagcattccagggcacacctctagcccaggctgtggaggggcccagtgagaatgtcaggtgagagttggctggccttgtggggggatgcttgctccattctggcctggccagaccctttccaggtcacatttttagttggctagctgtcggggttattttcctgagttatgcaactggagacagtttctgtatccatgtggtccagtgagtcttttttaatggctttgtgggcttcacttgaattttgggctttgttttaaggtatgttttggtgcatgtcctgacagtccaagggcgaagtgtctgggtgtcccctccatgtggtctcttgtctcctttgtggatggctccgggagctttgatgctgcccttttgagagtcccacagtgttggctcacgccttctcagagaagactatgagcctgtcctgaagtcaggcatgaggcaagggcagacaag

SEQ ID NO: 105691 - DNA, 1037 bp, Homo sapiens
gtactgcgcctgcgccgcgaccgccaacgcgcccagtctacgcttgcgcggcgcaacagggccgactgcagctggaagatggcggcgtccgtggtctgtcgggccgctaccgccggggcacaagtgctattgcgcgcccgccgctcggtgaggtggtggcgagagcgcggggcttcgggacagggcttcgggaagcggacaggtgtgggctgttagcagtggcaggtcgaggtggggaggacgcggggtcagggccgtgggaaggtcacggcggagggcggggaaaggtatctcgccgcttgcctaggggcggggttcgggggtcctcctgaggacctgggaggtggggagcgatcccctgaccgagtcctcactcgcggctgttcccttccacagccggccctgctgcggacgccagccttgcggagtacggcaaccttcgctcaggcgctccagttcgtgccggagacgcaggttagcctgctggacaacggcctgcgtgtggcctccgagcagtcctctcagcccacttgcacggtgagttggggacgcttttggggagagggcctccaggttgggcctgccgtcttttccctggttggggtgtgaccttgggctcgagtcttcccgtttgtggtttgggttcggacccaggaccactcaccccgagaatggccccattccctaccctagccacgccttggcttcacgggacaatcttcactataagccaacattatttagcatataatgcccgttaagtaggcggccaaattcttttccagccttttgttaaggagcccatataagggaagtgatcatgtctcctcttataatgcggaaaatgggattcagacaccttaggtgacttgcaggggtccaggtctgtcagcctcactgcccaaggtcataatctccaggctagaccagaaatacattttaggaagcaaatgcattttaacagtacaatgaaatgtgtgattttccaaaaaatacaaattctctaaattgacacaagaaatcttgagtcacagata

SEQ ID NO: 105692 - DNA, 1067 bp, Homo sapiens
cacatgtctcatgaggaatgccatggacccagcagctgtgggctcgagggtgttgcgccgatggcaggaggagtggggaggctgggtcagatattcttcagggagcgtcgtgatatgccacagaatctaggcttagattctcaggcctagatgaagaccttgaatttgtagatcccacaagacttcccccagagtctgctcatgggtagaggaaagggatggggtatatgggagaaaatcaaggggtcaaaggcaggcgtggtggtacgcgcctgtagtcccagctcttcgggaggctaaggcgggaaaatcatttgagcccaggagctcggggctgcagtgcgctctaatggtgcctgtgaataaccactgcattcagcctgggcaatgaagcgagaccccgtctctaaaaaaaaaattgaggggtcaaagaggatgccaaacttaattagagactgagacagggcagggtgccgaggtgtctgcatgcgtttcatgtggatgcccgtgtctattctggcctgctcctgggccccctccccactcagccctggctgatgagaatgggacagggactcccttctcgtgtccctgtgcagcgtcggcccaggaggtagcagagcagtatatgcacatctgggtgtgccctcctgcatgtccccacacatctgtcattcctgtctttgcacacctatgtgactcccgcatgtttgtgtccttatgtgtcccatgcatgctccccatctgaccttgcgtgttctcgcgtgtctgtgtgcggccagtcctgccttcactctctcatgggtggccctggcagcatgtctggctccccagcaggtgagctcaggagataagatggaagatgcaacagccaatggtcaagaagactccaaggccccagatgggtccacactgaaggccctgggcctgcctcagccagacttccacagcctcatcctggacctgggtgccctctcctttgtggacactgtgtgcctcaagagcctgaagaatgtaaggacgggggcaggccaaggcccctcgagcttccacactgaccctgtaat

SEQ ID NO: 105693 - DNA, 1021 bp, Homo sapiens
gtggaacagtgaccagccacttctaggaagtcttctcacacccgtactgtcccccgtcaggagctggtggccctgggcctcagtaaccttatcggaggcatcttccagtgcttccccgtgagttgctctatgtctcggagcctggtacaggagagcaccgggggcaactcgcaggtgggctttgggtgtgggcatgggtgtgggcatgcacattgctttgcctggggaaggaggtctctcccctgctcactccctccccgaacaggttgctggagccatctcttcccttttcatcctcctcatcattgtcaaacttggggaactcttccatgacctgcccaaggtgagcccccacccagccaggtttcaggtcttggccaggccagggctctcaaatcagccagtctaggttcaggcgaggggtggggacacaaggttaggttctgtttttcaaggctgagatcttcaaggtgagatttggagacaagggtcaggggctgggtgggggtttgtgtctggggtactgcctgagtgcttgggcttagtctggctttgcctcggtgaggagggttgtcagcatcgggtgccctcaatggcccctggtggcactgtccccaccccaggcggtcctggcagccatcatcattgtgaacctgaagggcatgctgaggcagctcagcgacatgcgctccctctggaaggccaatcgggcggatctggtgagtgcactgggagcccagggcagggactgggcagccccatggctcctcgccgccctccaaccgctgccctctgttctcagcttatctggctggtgaccttcacggccaccatcttgctgaacctggaccttggcttggtggttgcggtcatcttctccctgctgctcgtggtggtccggacacagatgtgagtccgccatgttggtcccctcattccagctagtgagagagtaccacagggctccccgcagctttccccacatctctggggacttcaggctccttcggacccctctgtt

SEQ ID NO: 105694 - DNA, 1033 bp, Homo sapiens
acgcctcggtttacctctgctgattttctgcaggcggctgcccctctgcagcaaggggtgggggcgggagccggcgcgaccccagtcccttgggctgtgcggaaagccgctggtgtgacgcccgagggccatcccgggccacagggaggcagctgcgtgcggaggagcccggccaggagatgtgccggcgggggtgcgtggggcacgggagtccctggcagcggcccgtggactagctgctttcagctgagtcccgagtccacccagctccactgatcccggagtgagcgctccggcctttctggccccagttgccttcctacagggaggggccaatgatcaaggctccgccctccaaacgcgggtcccaagttgtcgggggagggagccctttaagaagacctgagtgactcacgtaggaaaggagagggggctctacgatctccttgagatagcggtcccaagagtctctgaggatcttccttgcacccactccacactcctccaacagtacagccaggttagaggcgcttcccaggtgagttcctgtccctcaaatgggatcctctccccaggtcagggcttttcctagatcagaactttcctgactggtgaaagcttccccaacaggctagagttttcccccaggtaagatccttctgtgagatctattcccaggtgacagcttttccccattccacgtgggagcctcgcccgaggtcagagctttctctatgggagagtaccccccaggtgagaaccctctccctctaggtcttttcttcccatgtgagatctttctctgacttcaagtaggtgcctctgggcagagggaagattccccctgtatcagaacttgccaggctgataaagattccctggtaggtcagagatccctctaggtgagattccccttgaaagcttctattcccaggtgagctctttcccccacttcaagtgggtacttccctttccatgtgggagcctctccctctaggtgagagattgccactccaagagcaagctccttctc

SEQ ID NO: 105695 - DNA, 1050 bp, Homo sapiens
gagacgggggactggagggagacttttatacgttttgtacctttgtaaccagagagatgcttatgttatttttcagcttttctgtctcctggggggtttgaggctgggctgggagggggagggagatagagggagagatgcagtttgaccccatttgggtcctgagcaaaccctatgctcatctctctctccttcctggggtggactcagatgggtgggacacatgccttcctccccctattccacccccaagttgatctgagtatcgtcaggggcccaaagtacagaattgttctttgctttttattgaatgctccaaaggccaaacttctggggctgggggttggtcttggaaacaggggtcctctgacttcctcatgggggcttgctcataccgcccctcctggtggatgtgtgtgtttattatgtggagtccctgccacttactgccttatgacctaggactgatgctgtggggtgctggtggagcagctgatgtcgtgtttacagagcaaggcttccctgtctcccacggggaggggctcgggcctctagtcagacattcctgcagagggtcggtggaggggtcattcacctgcccctgcagcaagcaaaagttgtctgtggtgccatttgattccctgacactgccccctgcttgaattgattccgaagggtagggtgggaaggtgagcaaagggagcagaaacaagggaattcaagacccagaatgtaggtgccactgcctcctatgtttacaggatcctccgtggccctaggcacctgggctgcaggaagtgactccgttccactcctcctttattcccttaaaaagggaaaaatgactgttacgaccctgttcacaaaactcttacttttgctattttgtctgctgtccagaactgaagactttaaaattttgttactgtttacaagtccagattcaaaaaatgtttttactttgtttacaactcaaaactttgagttttacactttgtttacagtagataattttttttcctttgtttccaagtgaaaggtagggaaagt

SEQ ID NO: 105696 - DNA, 1039 bp, Homo sapiens
atgacctcctgtcctactggccagccctgggggagtgcgaggcagccccctgtgctctgcagacttggggctctgaaaggcgcctggggctggacaccagcaaggatgcagctaacaacaaccagccagacccggccctgaccagtggggatgagacttctctgggccgggcccagcgccagaggaaaggtacagtccctgagccctggcccacaccgcagacacgctgggggctgctcatgccctgagccaagggattgcagcttcctcatcccaaactgagagctcttcttactctgacctagggcgcttctgcttctctagcctgcttcacggtcctcagggactgctcctgtcctgacctgggaattctctgtccccctctaccctggccagcaccacagggggaccacaggcgaccactcctgccccagcccatctgtttttcagagaccctaggagctgcttccccctgccccccacccagatcccagagcccgtgctctgatctggaagatttctgccccctactctgcttttatggggacccggagaagaggtttctgccctcacccttgcatcacagggacctggggactgctcctgtccaacccggggggttcctgcatttcagccaggcctgcattgtcaggacctgagggctgcccctcttctgacctcagggagtttgccccatcccctgcaccatgagacctgcccgccctccccctgccccgggaccacaactggaagatgactgcccttccactctgacccctgtcctgctgcctctctgggaccaccagggttgcctctgctgctccccaaggggttcctgctcccatccctgtgttggaaggatcccaagggctgccacacccctagactcagcaattcctgcctgccctccccctcccacacaaaccctgccccccattttcttcctctcacaggcatcctgaagaaccggttgcaatacccactggtgccacagacccgaggtgcccctgagctgtcctggtgccgtgcagccaccttg

SEQ ID NO: 105697 - DNA, 1045 bp, Homo sapiens
cacctgggctggtgagtcgggatgggggccctgagaagccagagttttaggctgcttcagggttagctcacactctgtccctaccacccccagggacctggggcctacaacaacacggctctctttgaggagagtggcctcatccgcatcactctgggcgcctccaccgtctcctctgtgagcagtgcccgctccggccggacccaggaccaggacagccagcggggccgcagctacctcaggtgagaggaagagcctccttgtgagggaacactcagcttagtccagccccaccttaccagggcttggctgaccaggtcctagggcgggtggctccacccatcttggccatctggggccctgcttctgcctctgccctaaatgcttcccaccacacacacccagggatgccattccacccgcagctggctgtgcactcaaagacactccagcctccaaggcaccccatcacatccctctttcatggtgggggggctcctgcttttccagggacaatgtcctggttcgacatggctcagccgctgaccacactgaccacagcctccaggctcatgctggccccactgacctggacgtggccatgttccatcgagatgctggtggagttggggcctggggcagggaggagggaggcagaggatctctccccatccccttttcttctaccccatactgggagcagtggctgactggggtgggacgatctcccccagggtccctgcctcaggaggcacctacctctccagccctggttctcccagtccactcctgattcgtccttccctctgataagtcccagcccttctgctgctacctccacttcaagccccggttcctgtccccaaccctaacccccttgccgtacccacctctagaccctcaactccaaattcccttatctccaagtcccttacctctgaaagtacttctgactttcccaactccaggcgcagactccgactctgacagtgacctgtccttggaggaggagaggagtctctccattccatcttcagaaagcgag

SEQ ID NO: 105698 - DNA, 1004 bp, Homo sapiens
ccctggatccccagctcaggctcctgctgttctcttgggaagtgaaggtcctgggctctccctctgtccttgtcctctccagccccgcccccttgcctgttggagcccctctgagcacctgtccagacctctcatgcctgccctatcccctcatacatcctcaccacctggctgaacccaattctatctctgtcttcccagaatctgctgtgggccggctctgcactgcttgccccagagacaggggacttgtgggcggcgctggggcagcgggcccctgggggctccccaggcagcgcgggactggtgaggcacctggaggagtatgcagccacactcgcaaggaatatggaactcacatacctgaatcccatggggctggtgacgcctaatatcagtgcgttgtgggtggggtagggcggggcacagcaggggggccatgaaagggcaggtacctgaaggtctgaggggctgtggctatcaatgccaatgttaatggcaggagactcagccaccgccctcagcgttttgtagggacaggctccgagctggtagcacagaaaacagattgtgggactcaggtgcgggatgcgagtaagagggagtagaacccttggcagggggaagaggtccatgatgggcctcccctttctttctcctgggtagtgctcagcattgaccgcatggagcaccccagttctccccggggggcccgtcgctaccctcgctaccatagcaacctctttcgaggccaggatgcctgggatcctcacacccatgtgctgctgccttcccagtccccacggccatccccatctgaaggtgagagcccctaggggacccctgggccaagtcctgtctctctgtccccccaaccagatactatgttgccctcctgccaattttcccctttctagacctccccagtgtcagaccctcccacatctcccctccaccctccctcccatatttcccctccaccctccctcccacatctcccctcc

SEQ ID NO: 105699 - DNA, 1012 bp, Homo sapiens
ctcttaccaaccccactcatcgaaagaaaatgggaaatggggctgagatcttggtctctttcagcccctctggacactaaagtcctgtccagcacttgtgccccccaacccttgttctcatgtccgccatgtgctttcctctcccaggctgccaagccaagctacacttttgtgactcaggcccctgcaagaacagtggcttctgctcggagcgctggggcagcttcagctgcgactgccctgtgggcttcggcggcaaagactgtcagcttagtaagtgggcagcatggggcagaggggcctgcagggtcagatctgttcctggggcaggggctgtaaccctgtttctcttatccactcagctatggcccatccccaccatttccgtggcaacggcacactgagctggaactttggaagtgacatggctgtgtctgtgccatggtacctggggctggcatttcggacacgggcaacgcagggggtcctgatgcaagtgcaggctgggccacacagcacgctcctttgccaggtgtgtccaccctgctcacccctataccctcagttctcagtctcttaggccgccactgacattcttgtgggttcaggttggtcacacagcatacttttctgccaggtgtcccaaccacacttgaccctgctctggaccctagcccttgattctctttccatcattatatcctctgcaggtgcagggctccagcatagctctctcttatgcaagctgcaccaacccacccacaacacctggtcctatcctctgccccctgaccccatatcagcaacatgatgtcccctggcacagtgccctttgtgccaggtataaccttgaccccactgttctgacctctgatattcctgacctctgagccctctgatctcacctccaagtcccagcccacatggggctctaaccccagggctatgcatctctgcccacagctagatcgggggttactgtctgtgacagtgaccaggggctcgggccgtg

SEQ ID NO: 105700 - DNA, 1080 bp, Homo sapiens
tgaatgaagatcggccaatgggtagcaccatagtggtcatcagtgcctctgatgatgacgtgggtgagaatgctcgtatcacctatctcctggaggacaacctgccccagttccgcattgatgcagactcaggagccattacattacaggccccattagactatgaggaccaggtgacctacaccctggctatcacagctcgggacaatggcatcccacagaaggcagacactacttatgtggaggtgatggtcaatgacgtgaatgacaatgctccacaatttgtggcctcccactatacagggctggtctctgaggatgccccacctttcaccagtgtcctgcagatctcagccactgaccgggatgctcatgccaatggccgggtccagtacactttccagaatggtgaagatggggatggagattttaccattgagcccacctctggaattgtccgtacagtaaggcggctagaccgggaggcagtatcagtgtatgagttgactgcctacgcagtggacagaggtgtgcccccactccggactccagtcagtatccaggtgatggtgcaggatgtgaacgacaatgcacctgtcttcccagctgaggagtttgaggtgcgggtgaaagagaatagcattgtgggctcagtggtggcccagatcactgcagtggaccctgacgaaggccccaatgcccatataatgtaccagatcgtggaggggaacatccctgagctgttccaaatggacatcttctctggagaactgacggcactcattgacctagactatgaggctcgccaagaatatgtgattgtggtgcaggccacatctgctcctttggtcagccgggccactgtgcacgtccgcctggttgaccagaatgacaacagccctgtgctcaacaacttccagatcctcttcaacaactatgtatccaaccgttcagacaccttcccgtcgggcattattgggcgcatcccagcttatgaccccgatgtctccgaccacctcttctactcctttgagcgtggcaatgagctgcagctgctggtagtcaaccagaccagtgggg

SEQ ID NO: 105701 - DNA, 1045 bp, Homo sapiens
cacgtcctcaataaagatggcggcaacatcttcggtcctcagagctgccatgcgcgatgggttgtaccaccgtgtttcgggcgccggggcagaggtggagcgaaccatcggggcggccgggagccatgttggagcggcgggaggcggcagcagcgtcggggatgctgtggtgggggcggaaaaagccagggccgcacgccggaggggctccggccgcggagtagatggtgcccagagggcggcgggggtgcggagagacaggcggaggggcgggggcccggggcggcggcaggggcccgggagggggcccgagcggcggggccagcccaaggcccggaccggggcggggggcggtggaggccgtgcagggaggcgggggatgatggcgaggcggccgccgtggcggggcctcgggggacggtcgacccccatactcctgctccttctcctctctttgttccccctcagccaggaggagctggggggcggtgggcaccagggctgggacccaggcttagctgccactacggggccaagggcgcatatcggtggcggagccttagctctttgtccggagtcttccggggtccgggaggatggggggcctggcctgggggtcagggagcctatcttcgtggggctccgagggagaaggcaaagcgcccggaatagtcgagggccccctgagcagccgaatgaggagctggggattgaacacggcgtccagccattgggcagccgcgaacgagagacaggacagggaccagggtctgtgttatactggcgcccagaggtctcctcttgcgggcggacaggacctttgcaaagaggtagtctgtcaccaggggctctgtcctcaggggtcccgggctcggggaacagctcgcccctcccttcagactttttgattcggcaccacggtcccaagccggtgtcctcccagcggaacgctgggacaggctcccgcaaaagagtgggcaccgcgcgctgctgtggggaattatgggcaacagggagcaagggtcagggcgagagagccacgaca

SEQ ID NO: 105702 - DNA, 1047 bp, Homo sapiens
gtcacccaggctggagtgcagtggtgtgatcttggctcactgcaacccttaacctcctgggttcaagcaattcttcctgcctcagcctccccagtagctggtattacaggcgcctgccaccacacccggctaattcctgtattttcagtacagatgggatttcgccatgttggcccggctggtcttgaactcctgacctcaggtgacccactcacctccgcctcccaaaatgctgggattacacgcataagccaccacgcctggcctggttactacttttaaccctggagacattctgcctccttttcatatccaaagtcaatgacactgacttccagtcacaactcctttctcactggggtgcggaaggcagggaagtattcttatgagatagtgtatttcagtaaaaagcacaggtcctcaggaagctgaggcagggacatcggacagcctttgtgacttgctgtgtttcctgtcatgatgcacacacaaaccctgtgggaacggcaggactgtgctgtgccatctgtcccagtgctggcacctaggtcaaacaaggtatggccccatggcagaagcctctgctcacttctgcaggagtgcccaaggtgggccctggcacctgtttgtaagagaagcagaagccccagctgatgaagttacatacatgctgactcctggtagcaagcgtgctctgaggggactccaggacctcttcagcaaacacccttgtggtggcctcacaacacaaaattacaaccaaaggcagattatgattagtcagagaagtcctcttggggagggaactgtctttgatagaacacgtctatggctgcgtggaaggttggtagatgtgatatgtgggtaggcagtaggaagggcaatgagacagagcattaagccaccccaagaaaggggagtgtttgggtagagttgagaagaactcaaattttgggggacagtgagggggtttgggctgacttcctgggtcagaagtttctgaagctgcagctaggaatgggtgtgtaagtgtgcaggtggctcaca

SEQ ID NO: 105703 - DNA, 1087 bp, Homo sapiens
aggtgttcagccagtcgtttgtaaggcgctcgtcggcacctgctgaaacgcccccacctgacagccccatcctcaaagactgtcttaattactcatggcaggttctagagacttaaggggaaaagctgctttcaaggccaccacatgtctgtgctccccaaccagctctatctgccttgtgttcattttgttattttgtgacgtgagactgcaaagaccaataaaaacatattttataagaacaaaaggcctgggtgcctacccgtgtgggggcactgtgggaagcctttgctagggtgtcttgtgctgtgtggtttgttttgtttgcccctttattttgctttgcttacccagtcttcccttactcttggatgcttcttaaccctcaggcaaacctgtgttccccctgtattcaggctctgctttaaagcaagccatgaggctgttggagtttctgtttagggcattaaaaattcccgcaaactataaagagcaatgttttcagtcttttaggattagaagaattacataaaaattaataaacattttcaatgatggaaaaatgtgtcttgtaattctttggctcttgcctcgttgagtacatcagagaggaagactctcagccatgtttgctccctaattgcttgtcttgtatggtgtcatcttttctagctgttttgatatttgttaagtttgcagatgagtttggggcctctggcaacatagagactaaggaactgggtaagaaaaaaacaaatgttacaatcatgttacttacaacgcttcttcctgctaaattaaaagttctttctgctcctcacccccttccaggtgtggtatctgtgcgctttgaagaagatgaagacaggaacttgtgtctaatagcatatccattgaaaggggaccatggaattgtggacattgtagataattcagactgtgaaccaaaaagtaagctcctaaggtggacaacaaacaaaaaacatcatgtcttagaaacagaaaagacccctaaggactgggtgcgtcagcaccgtaaagaggagaaaatgaagaggtgagtgtagacagagggcaactctgggct

SEQ ID NO: 105704 - DNA, 1105 bp, Homo sapiens
ggggtttcaccgtgttagccaggttggtcttgatctcctgacctcgtgatccacccgcctgggcctcccaaagtgctgggattacaggcgtgagccaccgtgcctggccgagataattattttttagtgacgatttagcaacctgaaaaccttgggtctttgggatatgacctcagtatcaacacagaatatttgaatgctggttaatatatttgttttaaactgtgatagaattgaaatcttgtagccacattttgaaagtttattcttcattaactagtcttttctcacctgattttctacaagagagaattttccaaaaggttagttgtcgttacattaagaacttgggttttgtttgacatgaaatgtttctacaccagcaggtctcagatgaatgttcaggcgtgggtccttaatttatactccccagttaatgcagacttataaggtggaaaataataaatgcaaagtaaactaatattagccagtgcttggaatgcattttgtaaagtgtgcagcaggccacattttaataattgtactcaccatatgattggtgtggatttggatgatgattgcagtgggtgccttatgagttctctgctgatctgtatgcgttaggtattcatgacacagtagtgatttgaggcacattttgtggagtgcctactttatgctggtgctcttgtagatcctggagattcagcagtgaatactgcagtcaaaaatctgaccttatggaacttgttttcaagtggaaattgggtgggaggagacaattaacaagacaagtaagaaacgtagagtatgtcagacggtgataagtgctgaggagaaaataaagcaggggtgccccagggagtggcactcacttttagatagagtggctgaagatcccattaaagagatgacatttgcttagctagctgtggtggtgcacgcctgtagtcagagctgctcaggaggctgaggtgagaggatcacttgagcccaggagtttgaggctgcagtgagccgtgattacgccactgcacttttagcctgggcaacagagcaagactctatctcaaaaaaaaaaagggggggtgacatttgcacaaag

SEQ ID NO: 105705 - DNA, 1055 bp, Homo sapiens
ccaattctttttgcagcatggggaatcaaaggtggcatgccaagttcaactcagggctgaggtatccacattgtccacatcaggcaagccctgcactgacggttgagcctcatggagaggagcatgtgttggaaagagatccctttgttaactgttttgtggtgttctcttcaatgaattagagctcatgccccttttctggctttgctgttgattttggatggtagagaatattcctgagagccttccttttggcccccagcttatgccacccactctcttctcttggttgaattctctgaaggaaaggttcatgtgctattgtcctgttagtcaatagtcttcatatataattgtgttacatatattgctgtagactctcagaaatcagggtagagcttttcctttgagcagtttaatgagtgaattcagcagcaaagtcgcaagaaatggttctccagccaggagaggttatgtttatcctctgattgcccgttttctctgcacacagtgatatcgtattcagtgagaggtgctgttggcacccagcagcaccctgggcacacagcatttcatgtcatgtcacagtgtacaagctaccctctaattcagaaagaagagcattttgcacagagaaaaataaaaagatccatgaatgtcatcttttatcttttattttcagttggctgatgttggaatttttgttcttgtcatgaacttgtaaaccaatcttgccaagatacaagttgttttggtttttcactacaatgacctcttgttcctcctgtcttgactgctgacgttcctcaatgattctattgtctattttatgggaagcagccttcccataggtttccttttacacactgcagggctatctttatactttaaaaaaaaaaaaaaaaaaaaaaaaaaggacaagaactgtcactaacctcatggaggggtttgcgtaaaaccatttagcccaccttgagcaaagggtagattccgtgttgtttttttaagctcactgtaataaaataaatctaattcagcattattgtgctacctca

SEQ ID NO: 105706 - DNA, 1013 bp, Homo sapiens
cctcacctctttttaacaatgcagttatggatgtacaagcattcgagaggcttctggggccctgcatggacatcatgaagaggaacatctcacactatgaggaacagctggtgaagatgtttggctccagcgtggatctgggcaacctcgggcagtaggtgtgccacaccccagagccttcttagtgtgacaccaaaaccttctggtcagccacagaacacatacagaaaacagacatgacagaactgttcctgccgttgccgccactgctgccattgctgtggttatgggcatttagaaaacttgaaagtcagcactaaaggatgggcagaggttcaacccacacctccactttgcttctgaaggcccattcattagaccacttgtaaagattactccaacccagtttttatatctttggttcaaaacggcatgtctctccaacaatttaagtgcctgatacaaagtccaaagtataaacatgctcctttcctctcttgctgctactcttgcttttggaagttaccacagggtctgcagaaacctgttgtataactgtagacactctctaatggttctcaaaggaggaaatgtagccttcagtctcctcatttgtcctttgaggaagtccacatttgttcacagttgcagcctttggttttacagtgggaaatggtggtggatgatatggacatatgtagcccagtggcattgtactttctgctgacagctgcacacattacagctgtctccaaacccacagtgatgcttagggaaagaccctgctcaggacccagcaggtcagcaccccagagcagactgataggtccgtgggacccatgttagagcagaaaatttgggctcagcacattttactgttagtagagagccaggaaacgttttctgggttggggattttgtgggattttttaatttttttagtaggttttgtttaacctctgtgcagtttgtatgaatgaattgctatacatttataaggagccagggtctgg

SEQ ID NO: 105707 - DNA, 1048 bp, Homo sapiens
aaaaaaaaaaaaaggaggagggaaccactaacttaaggtacaaatagtacttaaaaagaaatttgttggccaggagcagtgaatcactcctgtaatccgagcactttgggaggccaagatgggaggattgcttgaggccaacagttgaaggctgcatgagctgtgatcattcctctgaactccagccttggtgacagagtgagaccctgtctcttaaaaaaaaatgtggggggcatgggggattttgtcactgtaaaatgttgttcaaggcgcagtctcaaatcagagaaatagcccaagtttgtggctcattacctaagagaagcattgtccttatttagacaagattgggcatgttcagaatggtatggctgtagattaccttgaaaatgttaggactccgagctctaggtaaaaagcagacttttctgatcaaaccagaccactgagattagtccatggagtttacatggtacagttagtgaattttctgcaaagtgaattcctcagtaattgtgtagagtatgctgagaacagtgtatgtgtgtgcaactggacatgcccagctgtgatcctggagtcagcctaggtcatgttctttgcctgctgtagactaaatcaaacaaggatggtgggaaccaggaggtcgagattgcccgctgccataaggggcagtactttggagagcttgccctggtcaccaacaaacccagagctgcctcagcttatgcagttggagatgtcaaatgcttaggtaagaaaagttctttatgcattaatattctttttctaacatgtaatatttttttcccatcagcaagccttgacatattctgccatcttttactgctgtctaggcctaggcagtttatgtgaccaaccagagatggatgaatggatgctttcagcaaacatttctgagtactgatgacagcctgtgagcaagacaggcatgcaggttctttagccgtatgaaaagaactgatgtccagggctgtgggagaatggggagaacaggagctgctggactctgtaaagtctctaacct

SEQ ID NO: 105708 - DNA, 1304 bp, Homo sapiens
attgttttggattttttaagtttttttaaatcctggattctaaggattaaatgattgttttattctctcttttggtgaggtgtctcttttttttttttttttttttttttgaaatgagggtctcactctgtcacccaggctggagtgcagtgacatgatctcggctcactagaggtgtcttttttgatattgaacagtgacagtgagctcataaatgtttaggtgttttctgttttgggttctatttatgacccataggtggcacctattgagtgctagatagcaagcaacagcatgtgggcatctggctggctcaggctataggtcctttacttccagtgatgactcaagattgaagtatcattaaacacttaattaacacagtaacttacatattcctctaatatttgctttggccagttaattaaaccatagatgttcctgtatataggcatttactagaattttcatattctttcttgtaggaccgggtgacttttagaagaatcatagtgaaaaataatgcaaagaagaggaagatgtttgaatcatttattgagtctgtgcccctccttaaatcactagaggtaaagtggcttgaataagaatctgttcatggggatcaggaaaagcttttaaaactattctgttgttaggttttcaaatcatactattctaatcctatttctgtgctgcatagctattgtgactttcaattaaggtcttttccttttatttgtgaatttgttgtttcaggtgtcagaacgaatgaagattgtggatgtaataggagagaagatctataaggatggagaacgcataatcactcaggtgagtgagggctttacgcagctcctttcctggaagtcacccctgaagaactagtacatcatttatctcaaaaacttcttgccggacgcagtggctcacgcctgtaatcccaacacttcgggaggctgaggcaggtggatcacttgaggccaggagttcaagaccagcctggccaacatggtaaaactccatctctactaaaaatacaaaaattagctgggtgtggtggcccatgcctgtaatcccagctacttgggaggctgaggcgggagaattgctggaacccaggaggcaaaggtttcagtgagtcgagattgcgccactgcctccagcctgggcaacagagcaagactccatttcaaaaaaaaaccaaaaaaccttctatgttctcccactgttgggagctcttattaccaggtaatagatcatacttcagaggactattatgtagtcctctgaagcttattgacgtc

SEQ ID NO: 105709 - DNA, 1084 bp, Homo sapiens
gccaggtgaacaagcttcccaaagccttgtgagagtccacagcttgtccctctctaccagtgctgtcctgagtcctcagcacaactcatatttgaagagcaatcatttagagtagaaagtctcctttaggccaggcgcagtggctcatgcctgtaattgcagcactttgggaggccaaggccggtggatcgcttgaggtgaggggtttgagaccagcctggccagtatggtgaaaccccgtatctactaaaaatacaaaaattagccggatgtggcagtgcatgcctgtaatcccagctgcttgggaggctgaggctggagaatcacttgaacctaggaggctcacgcctgtaatcctagcaaaggttgttgcagtgagctgagaccccgccactgcactccagcctggacaacagagcaagactccatctcaaaaaaaaaaaaagaaagtctcctttacagttagtaaggagtgcagggtgtgctttataaacatgttatttgccagtgtcaagtgaattgattccttgaagaattagccatggtactatagtcatttgaatgtttgtatttgagcctgattttactcatgaatacactgccctgaccttaacccctctggctcagatctaagtattaggaaaagattaaatatttgggcttgacctgctcaccctactgtgtcctaacctcttgagtttagtatcctctggctggtggcagtgaggtgggtgtccttctgatctccttagtcctgaaagaaacactctcactagagtttaacaccaataagatattgcttcacctgatatcttccattaatttaaaataaaatggtttttggagctagataataaaaaggaaacaaaaatagtttttttatcttaaagtaatttcagagttacagaaaagttaaatagtgcaaaaaattaatcataggcctggtgcggtggctcatgcctgtaatcctagcactttgagaggccgaggcaggtggatctcttgaggtccggagttcgaaaccagcctggccaacgtggtgaaactccctctacttaaaaaatacaaaaattggccagtcgca

SEQ ID NO: 105710 - DNA, 1009 bp, Homo sapiens
tctgatattttcacctagccttatttcatagtacctgccccaagatcacacattccagatacttatcaatttgacagtgaagtcttttattgctgtaacacataatggccatacttactttgtagtctcctgtaacctgctgggtctgtgactctgatgtttctgacttaatgatcctctcctccctcccagattcaggcttcttcaggagaaagcaagtacactggtaccttggactgtgcaaagaagctgtaccaggagtttgggatccgaggcatctacaaagggactgtgcttacccttatgcgaggtaacctttcaggcctccacttgaggtcacctggggaggtcacctgaggtgggtctgctgcagaaggtcttgcctggattgccagattagccttggcaccatgcatgtcacatctctgacaatactggcagtaagcatctccccctggccagcatggacgtagattaggatgaggggaccttccatctttcccaggtgtctgcaggggtagaagtcatggcatcacagttggaggggagtggcaagtagatagaaatcatctctggagggaggagtgggaagaaagtgtgacttggggacagtggtgatctccctggttttgagaagtatgtcctgttatagtggcagtaggaaaggcagagacagtctcactcttgtcctgagctggcagcttagaggaaggccagatacaacaactgtgcttataactgtgggcatgtcacttgcccacatggactttcacactgagagaaaaccttatttatttttttacttatttttattttattttttgagatggagtttcactcctgttgcccaggctggagtgcaatggcacagtcttggcttactgcaacctctgcctcccaggttcaagcaattctcctccctcagcctcccaagtagctgggattacaagcacatgccaccatgtctggctatttttttgtatttttagtagagatggggtttcaccat

SEQ ID NO: 105711 - DNA, 1023 bp, Homo sapiens
caccctctaactctcttcctggatttttctccgtagtacttattactacttgatacactatgcattttttagttatttatctttgttatggtctgtaaattccaggaggacagggacctgtgtgttgtactaccaggggtgcctccagcacctagaaggacgcctggcatatggcagggcgcaattgatctctctggagtgagtggatgaatgggagctcagaggaaacatggaagtctgggaaggcttcctggaggaataggcccgctggcccacactcccaaaccccgcccatgcggctttgcgctctgccacgcccatcgaagcggggccgaggccggaagcagccccgggcggaagccctaccgtgccaactgggccctcctcccgacctgccccgggctcgtgccccgcccacccaaaagtgggtgaaaggtcggcggcgccggcactgcagctggggctgagaagccaggacggcccgagaactgacagacggagtgacagacggactgaccatggccgaccagccaaaacccatcagcccgctcaagaacctgctggccggcggctttggcggcgtgtgcctggtgttcgtcggtcaccctctggacacggtcaaggtgcgggaggctgggtcgcaggctttggggaggaggcccgggcggggcgcggaaagcatggtcccccgcgaggcgcggacgctgggcagaagaggggcatgtgtgagcttccgtgagaagtctagggaatctctctttcaggggtgggcaggaagctgtaccttgcgccccaaagagccaggcggcggcgcaaagtgagcagcctctaactgcctgtcaagagctctgatgtaaagttccctgtcccgcagtctcttctgaccctgcgccacttctttagggatgggaaggaataaacgtctctccatagttttggtttcagccaacactaatattatcgttaaggttgaaacaggtcccctgtaaagcctgccccaggaagacaactaaagacagagcg

SEQ ID NO: 105712 - DNA, 1007 bp, Homo sapiens
acttttagtacagacggggtttcaccgtgttagccaggatggtctcgatctcctgacctcgtgatccactcgcctcggcctcccaaagtgctgggattacaggcttgagccaccgcgcccggcctgcacaggtgtcttgaatatgtatatacgcgactccagtatggttggaaatgatttgatttgttgtctatggaattgcacaacctggagccttcctaacatcagcggcttcatactggcatttccattgtggtgcagcaacaatctgagtgagcctccgtctctagccacatcatttgacaaccggtcccagaaggtaactggaagtcatgatgacaactcctatactgtgaaaagaaactgcaagcaaggcagttaagatgcaatcttgcacggtgaccgtaagtcggagaactgcgcggcgaacgaggcctcggcaggggaagcgaaagcctggtgtggttgcggctctggggccaccctgcgaccgcctcggggtgtaggcagaatttcccggcccagctcccctctgaccagatagcggccgagaaacaatggttatctgctccactgacgccaggatgtcttctccgtgcccgatcccggagtacaaacagtgaaatgagaagccggtgagaaacgcgctggttaaaaacatctcgacgggagacgctggtaggcgaatagtggctccagacgcggtcggcgcctgccgtaccctggtcagactctgggtcagagcgctaagtttcaaggaggcggcgctaaacaggccctctagccgggagcctgtcgcgacccgagcgaccgtgggtcgaccccgatccggaagtgacgcaacggcgccaagcacttccggagctgtggggacgactcttctggaggaagcagcgcgggcttgaccggcgtcggcccgccgcctccgctgccgcttcgccccaatccggtccctctggcccggcctgacccggtctggcttgttcgggctcagcggccgcgaggcc

SEQ ID NO: 105713 - DNA, 1525 bp, Homo sapiens
atgaagaggactatgacccaaattgtgaggaagaggaagaagaagaagaagacgaccctggggacatagaggactattacgtgggagtagccagcgatgtggagcagcagggggctgatgcctttgatcccgaggagtaccagttcacttgcttgacctacaaggaatctgagggtgccctcaatgagcacatgaccagcttagcttctgtcctaaaggtgagcagtgttgtaaactccagtgtaatcccccccagttaaatctaaggatgagctgttgttaattaatgtctcctccagactaattgaatggccttgtagcttgaaaccaaatttaagtgtatgtcaacatcatttggacattttgttacatttactttgttttctaatatatgcatgtctaaggtcctcagattcccaaattagtaagaattagaaagtaggggtgggacagattcaagaaagatgtaccataccagaaatgtgtagtagcagaattgcacaactttgcacgtttcaggaagtgagttttcagaattttatgaggttgatacaataagcatcagaatcaccatcttctgtacgactgtgagtgactgataaatgtcttgagagtatacagatccctctggtttgccctgaatagtcattgcctttgggctaatgagctcatttgtttcatgtactgattttaataataattctttcttatgcttgtatttcattgatttagggggtgttagtatggaaattgtaaagaatgaacaaagttgattaccccatcagcaagcattttatttaacacataagctaaaacatacctttggatgtcttgtaccttaggccagttattatcctatttacattttttatgatcattttgacagtttcccaacaagcatgtttccttctctaacactggccattatgggaaattggaaatatttctctttagtgttttcactaatcttttttcatgaattgttacttggattttgtttctgattaaattggaggtcaaaagggcaccttggcatgatgtcaaccaaataaattttattggaacttaaacagaaataactaaggtgtgccttgtatgatttctataaaatttgctttatctactagtttagggatttttttttttttccccagatggttggcaaaggctaataccttgaatttagatactcaggtctttattagcaactggctggaagctgaaagctaagttgtttttttttttgtgtgactaatttctagaagtgattgtagacttcctgtcttgtgctgagcagaaaactctgaagaatgaggacctatggatcctctgggtttgggatttctgcactatggctataacaaagctgctggacccctgcctccagagggcatttccctggtagaaaacaataatcgggtttctcttcctcaccatgcacacctctcccttgttgatcaatagttttcttttgctttagtcatactgtcaggttatatacaatgttggtatttaaaataagaaa

SEQ ID NO: 105714 - DNA, 1058 bp, Homo sapiens
ttatgcattctgcttttttcatgtatatttcaaacatttccccatttttactttgtcctcataaatactttaaatggctgtgtagcatgccatcttgtttttgaactgtaatttgcttaagctttctgcattgggcatttaagtgagtacctatgtattacagttgttgggggactggttacattgttgtgaatgtctttatggatatgacttttatgtctgttgggccttgtccagagtctgggctagtggtcagatgattgggttccagtcccattttttccatttaatataatatgacctcagataagtctgtcagcatctctatgcttgagtttcctcatctgtaaaataatgataacacctccttcacaacattaaatgtgatgataatgcagataaagtgcctggaacatgaatgttcaaatcgattttgcttggtcatggtagaagcggggcaaaagtggaaggatgggagtgttatttgtcttggttccttaaaacacattctcagggttgtgtgtcttgaatcatagggtaggagcctacacattgaggatggttctgggcaatgtattgctgactggtgcgtctgagtgtgcgtatgatattgggtcatatactttggattattttaccttcccctagagcctctggttctcttctcctgggacccaccaaaagaaaagtaaaaacaacacaaaatgaactttgaattggagccgggaaaaagatacagggaaataatagcttgtttgtacctgtatttgtggttgactgcaatgtttggtcttatgcctatgttaatagcactacttagtgtttacttgttttgggggttcttgttattgagacacctccgtactttaattttgccttgctccaatctaattatctttttttttttctttgcccttgctgctctaggaaaaatttgaaggattagatttgtcttccccaaagagggaagaattgtaggaaagatttgaaaaaggtgcagaatgaggagtattttgctcctcctgaaatgtatctgccctctaactttatttcttaaa

SEQ ID NO: 105715 - DNA, 1039 bp, Homo sapiens
aaaagatatgctggctgggatttacttcacaataatctgaagggaggaggggagggctggaatggagacatagtgggtctggccaccagctggttaatgggtttcattatactcttcactttggtagatgtttgaaatttttcataattaaaaaaaaatacccttatggtcaaggaatgattacgttagtatttttacattattatattttgtataaataaccttatattgagtgaggtctttggtttttttggtattgattttaatgattggagtccatagcaattagaactgaatcaaggttaggctggtgagaagtcttcaaatgtgtgtttattaatcagacttaaaaacatatataacatttgggtacctcagttacaagtcaaccctccttccatgtccctgtaaagaaaagtggaatgggcaaagttatgatcaggtgccagagagtgggccttttagaggctgagaatatttaggtgtgaagtatgggagaaatgaaatcctaccacttaaattagattcaggggtgagcctggtttagggtcagaagccctatgagaccccactaccaccaccactactgatgctaattttgccccatcgtaggctggtgtttacttactcctttgtctctgtgctttaaccttctttcttcctcttgtccctttagtactttcttgcctccctccacatcatcccttgtcccccggacccaaatccatctgtcttgatctctttaggctgattttcctatatcatgtcccattctagccattctagcccaggcccagaagctggcccacagttcactacctttcttcatttctgctttttagtgagtgaccactagtgtttgttaacaaaagtgattggaccacgaagtggcaggctgaggcatgaagacccattcatgtagccttaaaagatttcaggcagttggcaagtaagaattctaaataaaaattgaaactaccacctgtattttttcaggccgttgatgctcactgccatcagctgcatcctccctatggca

SEQ ID NO: 105716 - DNA, 1455 bp, Homo sapiens
tgatagaagacttgcttgaatgcggtggaggggaagggacttggtagaaatcagaaaataagtttgtggctgttattaacaaacttcaggtggacttgcaatttgtgatctgaaaaatgatatcacaatctgcttacactgaataaagctgaaacagaagtagggcagcaagtcacagaattgctagtctaaacccacaagcaaattgctattggaattgccttacttaagatcctgaaccctgcagccgtctccttgtagcaagcgggtcagaggacacagagattcaaagttttatcttataaggtagtctccattctaagctgacagtttgatttcagttctctagtctctaacacccttagactgtggaagaaagtgcctccagaacaaaatgctgagattgtagatttgcatgctgctaaccacgtcagtaacagcgactaaagcattcatattcacttcattacatctctgtgagaaaatcttagcattattggcccacagcctgaatttccccctggtcttcatcctccattcctcagtcctgcttgtgaagcaggcatagaactgtgtgacacatttactatgttattcatttaaaaaacagaaaggagaacttgactcccaagcagccatctactctaggtttctaggccagtgtaaccaagtggtaactactgaacatgttttgagggcctgtgtcagatagtattttccaaaggtcatgagcaaacaccttctgtcatccactatagtctgtgcattttagagtttcagtcaaaaacagactatagaggatgacagaaggtgtttgctcatgacctttggaaaatacaaatgaccataaacaaagtcctttttgacatgcatgtagcacatgcttcctgaaataaagatctggaaaccatctgagagtattgacattgtaaatgcaatggcaaaacaaagccatattggattgagggctacgggtaatgcagagcaatgtgtagggtaaatgagaacagaggagagagagctcatttcaagctggaaagaaagctccccagtagcgtctaacccattgtggtgcaggtttggaggactcagggaaagtgggagcatgggctgcgcttggtctctgctcagaccccatctttgactctgtgaaagccttctctggactacccagaaacttgagggtacccttcactcttcacaataaactttatgcttgcccccacttttctaccttgctcatacactttccttccctagctcccggtaaaatgagagagttcttatctttggggcttatgttcatactaaggggcaggcacaaatgtgattgcccaaagacagtccagggagtgagaaggcaggcctaaaagctgtgcctgtggaaaagtgatgttggtaaggagctggctgaatgggagcagaacatccggtgaaatactcagaagccttggt

SEQ ID NO: 105717 - DNA, 1043 bp, Homo sapiens
tgcaccttctgaggttctttagtagctataactatgtgctttaaatgtcccctgagagcatatagaggccagaaaggctgcccacaaatttcgaaactgtccttgcaactaggactgattggctgctgggaattcagtgattttaaactgagttttgggtttttatattttgtttgttgttttctggtgtttctgtagggtttatgcaaacccaggcctggggattttctacaagtaacaggcctaactagagatgtgcttccggcgtacaacctcctacagcagcttgagggaacatatatgacatgaaggaaactccagccctgttgcttatattattaatagatgctaggttgttatttactgtaaaatgagtgtctttaagtttcagataaaattaattttcttgaaagatttattaatgaaaacaaagattgaaaatcaagagattcatgaaatcactaagattgtaagagtctaaacttaaaagacaaagcagagaaccaagaggaggaatttggtaatccagcctgggcttggcataatagacatgaatgtatacagttctcaaaatgcgaaacactttaaaagaaaatgcagttataattcgattttttttctttcttctttctaggtatctcattcagttgctaaacttatattagttaatttccactggcaagtttcagagatattggacaggtaaggtatttgggggaggagagagaacattgcccatagctcccctctccgtggtgattattgtttacattttggaccatattcgactatattccaatgtgcatagtatatttttaaaacattggattctattttacatcctcttctcttaatatgttgtgaactttccccatgtcttcagtatattcttctaccccagttttaatactagcacagtattctatcatagatattccatactttttccaaacctctgttgttggacagtgaattcagattttctttcccattgttaatttttaatcagtgcctttctaggtaacacgcgccaacatctttta

SEQ ID NO: 105718 - DNA, 1106 bp, Homo sapiens
tgtttgtttgtttgtttgttttttgagacagtttcgctcttgttgcccaggctggagtacaattgcatgatctcagctcaccacaaccactgcctcccgggttcaagcgattctcctgcctcagcctcctgagtagttgggattacaggcatgtgccaccacacctggctaattttttttttttttttttttttttgagacggagtctcgctctgtcgcccaggctggagtgcagtggcgggatctcggctcactgcaagctccgcctcccgggttcacgccattctcctgccccagcctcccaagtagctgggactacaggcgcccgccactacgcccggctaattttttgtgtttttagtagagactgggtttctccatattggtcagactggtctcgaactcccgacctcaggtgatctgcctgccttggcctcccaaagtgctgggattacaggcatgagctatcgcacctggccccatcaggttgtttttgttcaacaggagtctcttgcatggctcaggactgtccactccgtacaccagaggactttgtgtttccattgcttcccaatgaagaattgagagagaaatacaggcgctacctcttcagggactatgtggaggtatggccagcctttgttctgccctctgtcttcccgggcctaccttccatcagagggtcaccacagttacttactttgtagactaggctgacattaagtgatagtgttcaaagaaagcgctccatggctttaaaaaaagtttgaaaaccactggagtgatagtgaagagtacaggccttagaatcagacacaccattgtgtgaaacttggatacttcctttctttgtgaccactcttttttttgcgtgtgtgactgccttgctgtgttgcctggctggagtgcagtggcgcaatcttggctcactgcaacctccgcctcccaggtttaagcgattctcctgcctcagcctcccgagtagctgggactacaggcatgcaccaccactcgcagctaatttttgtatttttagtagagacggggtttcaccaggatgatcttgatctcttgacctcatgatctgcccccctcggcctcccaaa

SEQ ID NO: 105719 - DNA, 1882 bp, Homo sapiens
agctcactgcagcctgaaatttcaggcctcaagcagtcttcccacctcagcctcctgagtagctaggactataggcaggagccactatgcctggtgcaattctatataaacttagatcattccagtgagttgctacctggtttaagctaaacgttctaaattcctctttaatatctggcttacgtttggtcttcacatcctttctgaatttatatagccccttcgtataagtcatcagctgggagaacagaaagtgtttgaatattcagggggttctgatttttagacagcaactaagagatgtcctcattgtttcctcttggtgtgttcacagagtcattaccagctccagctgtgccctggtgcagactgccccatggttattcgggtacaggagcctagagctcgccgagtacagtgcaatcggtgcaacgaggtcttctggtaagagtgagtgtgagtgctgagcagccctgggctcatgccccatcctccaaagcaccactgctgttgctccatgtgagggcggcactggaagaggcagggtctctgagccaacagaacagctgtgctccaagtgggtaggtttatgtccagcatctcatattccactaggtcttcaatacatgctcagtctggaggcaaggaagtgacacaggttcttggaaaatgtgttgtggcttatgctactaggtctcatggcccagagattgtgtgggatgtatctgcctgcatagctaatcacatattactgtgtttgaaagatataaacttgaacattttaatctttctctgtcttggccttacttggctaatttttgttaaactaagtcataaatatattctacatctactcaaggttcacttcattcagtagataccatgggaataactaaagtttaccgaaggcttaccaggtgacaggcactatcctgatcacttaccctgcattatcacaactgtatatgacccttatattctctctttttttgttgttttcttgagacggagtctttctctgtagcccaggctggagtgcagtggcacatacttggctcaccacaacctccgccttccaggttcaagtgattctcctgcctcagcctcctgagtagctgggactacaggcatgtgccaccatgcccagctaatttttgtatttttagtagagacagggtttcactgtgttggccaggctggtctcaaactcctgacctcgtgatctgcccgccttgggctcccaaagtgctgggattacaggattgagccaaccgcgcctagccatgacccttatattctatgaataaatcaaggtacaaggtaaacctagtaaatcgtagagccataatttaggcccagatctgtcctaatcatacctccctggaatattcatggtggggcttcagagaaactacatggaaaatgtgatgtgtgtgtgtacgcacatgcctgcatttcaagacattattgacaccaaaggttaagaatcactaatgcagtggttctttcattttaaatccggcagcccccaggatcacagcagattcagaagactccttgtaattgttctttatccttgtgtcccactttatgaaattctttccctgggtatttgcctgagggccttttctagccacaaagtactgttggcctccacaaaagaaaatttcaaaatatggaagcctagcccgacgaatattggagtgtcttttttttctgttttaagtttcagtgtcatcagatgtatcatgaccctacagattttgcacgttctggcatttgtgcattcttgtgtgcatatctgactgggagatccgatgagactcccggaagtgggtctcaatcctgccttaggtctgagctaaggagtccttctcagagc

SEQ ID NO: 105720 - DNA, 2380 bp, Homo sapiens
catctctactaaaaatacaaaaattagactgggcgcggtggctcacgcctgtaatcccagcactttgggaggccgaggtgggtggatcacgaggtcaggagatcgagaccatcctggctaacacggtgaaaccccgtctctactaaaaatacaaaaaattagccgggcatggtggcgggcacctgtagtcccaactactcgggaggttgagtcaggagaatggcatgaacccgggaggcagagcttgcagtgaaccgagatcacgccactacactccagcctggcgacagagcaagactctgtctcaaaaaaaaaaaaaaaaagaaaaaagctctaattcatgatttgttggcttggataaaaggaaaattttgaacatgggaccctgacttaatgaatatttgaatgtttttcttttccaattttaagtttcaagtgtcgtcagatgtatcacgcacccacagactgtgccacaatccggaaatggctcacgaagtgtgcagacgactctgaaacagccaactacattagtgctcacactaaagacgtaaggaccgtattttacctctcatggatttgccctccttagtgctgcccagggccttgccttggagatttgccatctgagagcagaatacccagagccccaggacccttcctgaggactgggggtttggggaccctcacacagagttggcagctcgtagcagtttattataggatgcattgggtgcatattttctttattatgatgaaatgccaaaatgccaggaaagggggacccaaagggggagctaattagaagagaactaattatgattgaacgcctaccagcctttaacagccctgaaagggaggtggttaatagccacacttgatacatataaggctgtaatgcaagcccagacctgcacgatactcattttgaagtctcccatgggaaagtatggcctgtgggctctaggggccactgtaccctttgtcagtcactcgccgagtcagtgcactcacaagcacagttacgataacgacattattaaacatagtcgacttcacggcagtgggagatcacagcatcagactggtgtcttcattgctgcctcaggttgctggcatctctcaaatgggagagatgagctttagatgtggtttccttgccctcttctcgaagcagaagttcaggcaagctgaccaggactgaatccattgtggcagctcctgtgcttctttggcagtcctctcaagaaggcaggctttctgctgattcaacttgtgcttaatctgagtagcttcatggcaggggcagatggtggaagacttagtggggttcagctggtgcttgaagcatttcaaagctaaatgtgctgacctcatttccttgaattgctgttccagcctcagcgacctgccacatttaagtgaggtgctcctccccagaagtgctcacaccatgagcaactgggcacaggtgccaggagctttgtgtaatttgtcttaaaaccaacctggtggtgtgtgagcctaatggcacccttctgtctcctcagtgtcccaagtgcaacatctgcattgagaagaatggaggctgcaatcacatggtgagcagaagcctctgcagtttgcatgtgtgacatggaagctttggtcagtgtgcccttaacgtgttttcttctgtttccctctgacagcaatgctccaaatgtaaacacggtgagttccaagcttggtgtgtaaggcccagtggcactttcttgtggttgggtctccgttactatttaagtgagtacttctgccatgaaatgacaaaacatagaagaacctcagtcacttaacagtcacagtaactggcataaagtagctttttatttttattttctgttttttggtccctcttataatcccactgctatcttgctaacacatatagtcagaagtcaagtttgggataaacctcatgatcctcagttatccaagaagatgatttcagggtgttgctttcatttttttgccaaggcaggtaagtagcttggggcttatctgtgctacgttgtagatacctttaccagaagtagtaaaataatggttttcccttgccgttttacaaagtttctagtgggggttttgatttagcctttcagacctccttcatccatcaggaataatttacatagctagaacccatgtatgccatccggccaggtcaactgaagaaacagaatcccttcaagtagaaaatatgtccaagtgggtcttctacgcagctgctttgatgctcaacaggagcccctgacagtttcttttttttttttttgggagaaggagtctcactctgtcacccaggctggagtgcagtggcgcagtcttggctcactgcaacctc

SEQ ID NO: 105721 - DNA, 1049 bp, Homo sapiens
tggacaggttagaaggatggactgaagaagacctgctcttgcactttggggaataagttagaggagtctgtggccatgtcctgccagcaaggtgtctatcctgaactcctgtgtagacctctgcaccttcatgggactcctgtggttttcttcttcttctgtgccctgtagtgggaaaaccacaataaaagcttgcagctagaggcacagacataccagcggattcacgagaagattcaggagagggtcatgaacaatctggggacatggatcgactggcagtacctacagaatgctgccaagctcttggccaaggtatctaccacttcactcatcttatccctggtccagtgcctggctccgtcaggcacagacctctgatagtgggaagctctgttgaaagagggtattttagcaccctgtgcagcctttcatgcttctgcttgtggatccacattttcatgtgctgtgcccattaaggacccagtcctctgatggatgtccaggggatttataagagtgttgcactgcctctgcctgcagggaaaactagagcacttttcttctccttttgtcctgtttatgtatcactcaaaggaaaataaaagattgtctgatcacttgaggtcaggagtttgagaccagcctggccaacatggtgaaatcctgtctctaataaaaatacaaaaattagctgggcatggtggtgcatgcctgtagttccagctacttgggaggctgaggcacgagaattgcttgaacctgggagtcagaggctgcagtgagccgagatcacaccattgcactccagcctgggtgacaaagcaagactgtcaaaaaaaaaaaaaaaaaaaaaaaaaagattgggcagggtgcagtgtctcacgcctatgatcccagcacttcggaaggccaaggcaggtgcattgcttgagcccaggagtttgagaccagcctgggcaacatgagaaaaccccgtctctacaaaaaaaatacaaacgttcgcctggtgtggtgatgcacacctgtagtcctggctacttggaagg

SEQ ID NO: 105722 - DNA, 2541 bp, Homo sapiens
aaaaaaaaggttgtctttggctaagcattgagatagatgtgttgactctgatgtcctactcaagagggaaaatccattgaggcagctgctgataatcagtttgtaaaagaaactgtgggtgttctgtgaccatcgttgtttgttttttccctcatgtcttttcccaattcatcctctatttggcctagtatcatttctttcaggcctatatctatagagctgggctaatttgcatgttgagggtaggaattgtaagagccacctgagatgcaggtagcttagaatcacagacacaggttccttctcttctctcctgttgcagtgtcgatacaccctgcaatacacctacccatatgcatattacatggagtccggacccaggaagaagctggtaaggcaaagcaatttttctactctgtcccgttagcctcaaaggtgcccttctctaccagcactttgcaggagagtgaggaccagaccttggtcattgggagggcaaagttaaaacaaaactctaattgcaaaattccacttctgctctgggcacctccaaaatagatctcaggtgctattattttgtgtcatataaggcacatgcacctaatcctctgaacaactgtatttaaagggcgattggctaaaaaggtctgtggccagtgggaggccagtagtgcccatgcttgggagggatatttagcatgcatgtccttaagatatatttgactgttttataccttgtttaattcttcatcttagagttgaatttgaatatgaatttattgttattaccaatagtgttaataaactagtaattaacatttttgtttaaatgctggaaaacagaaaagcatttacattgtccagagagaaattaccactgtcagcattttccagccttttaaaattaacattgtgtatatataatcaaggttatatataacattttattgttataacagtttattgttatagctgttatgatttacctgcctggtaaataccattttgttaatggttgcataaatgtgtcattacatgattgtaccatcacttgggacatttattctttctttctttcactgctataaataggacattgaggaatatttttgtgcataaagctgtatatcttcttagatgtatgattactaagtatttaagtttgaatatttttaaggctcttgatttgctggaggactgaaaaaaatgaagtgatagtgtctgagaatattcatttgacttattttttacagcatccattccctttcatgttgggagtgttctctttagtggcttaaattctttgcctgcctttgggagtgtggagggtggagtggaccttttgagggtcgagggtgaatgtggccttgctgtttggatagccttttgtttggattctggctctgggcacagggaataacactactttctgaggacagtatcaggattgtctgtagttcctgtgagcctgaggtgctgcatgtgcccacccccgtgtacaggccctgccccagccacagcccactcaccttttgaccctcctgctctgcctatacagtttgaataccagcaggctcagctggaggctgagatcgaaaacctctcatggaaagtggagcgtgcagacagctatgacagaggggtaagtgcctactgtcctcttggattctatattgcaggtagaggactggcatggtaataggtgacagcgttgttggcttgtgcactggtagctgctgctaagaatgggaagggcagtgtttttgactccttggaggtcctggagggtgtttgtggctttggctactccttgctcccaggcctgggccatgcaagcacacaccttgtttctctgatgcaggacttggagaaccagatgcatatagcggagcagcggaggagaaccctgctgaaagatttccatgacacctaagttgggatgtggatgtgccggggtgaggaagatgtggctgcaaggtctcccggctgccatactgcatgctgcaggctctgcctttcatgaccccaggcaacagccagggccccactcctgagagacactggcaacacctcttagttgatttctgttttcttctcttttcactttttgtttctaccagggtagaggccatgttgaactggcctcttttcaggacttttatttccccctggatggttgttgggagggagggaaagtgttttctgaatggctattaatagtattagatcattacaacttatgtaactttcaaaggttgtacaattatacaaaaaaaaaaaaaaggcaaactataggataacacagagccctttttgaaaataaattggcattggagtgttttaccctctagctgttttacttagaatgtaacatatgctgcctacccacctcaaaatgtctgtactgcaagagggccctgggcctctgctttccatattcacgtttggccagagttgtagtcccaaagaagagcatgggtggcagatggtagggaattgaactggcctgtgcaatgggcatggagcacaaggggtcacagc

SEQ ID NO: 105723 - DNA, 1044 bp, Homo sapiens
taatggggcctggcctcctagggtaagtataaggattaaggagttgatgtgtatgaagtgcttaggacagtgccttgggcagagtctgtgctacctaagtattttctgctgtaattactattaaaaaccactccaggccaggtgtggtggcatatgcttataatcccagcacttttgagcccgaggtggaaggatagcttgaacccaggaaattgagaccagcctgggcaatatagggagactccatctctacaaaaaataaaaaaataaaaaaagctccaaccctggtgctgagtgaccattttccttcctcttggcaatgactggaactttgtgctggaagtgtaactgagagaagcggcaggccactccgcaggtagcagtgctgcccttcctccagtcagctcctctgcgtgcttcttgtcctccagtgaagaccgctctcccaggaacaagggaaggaagcagggcccatgctcctgctctggaagtgtctggggctaccagaatgtgggctccctagatgtgaggctcaggttctagctccaccaagccacctaccagctgtgcctggtgtgcaggcagccagccactgaagccaagccccaggcctgactgatctttactcaggggtgtagaggcatagagtaggcactaagtgaacatttgtaccagggaaggaatcaaggaagcaaaggacacctgggacatcttttcagagaccagtatctgcccaaaacctgagtaaccctcactgatcttccagcactgggcaactcagccctggtcagatggccagcacccatctttgcaggaaattggaggggaaggcccttggactggcctgaaacattggatgtcttgtgctgtttttatttgaataatgctgaaaagttaaaatgaaagcaagaagcagccaccatctccccactttaaatatttatacccagtaaaaagtagcaatcaagcctctgcccttcaggatcactctctagccttcagtcccaacccaaagatgggtcagcccatatccaggttagctct

SEQ ID NO: 105724 - DNA, 1051 bp, Homo sapiens
gaagcgcctaaaatggtagtgctgctacctgtgctaactgctggggaggggtgggcagggaagctgtcatgcaagtggtgccccctctggtaataactctcaggaggtttctgaggtgtggtcatcaccctcatgcccaaattctggaccaagagaggaagatacagcagttagaaaggacttggaacagtggctttgcggctggtgaaccagagtgaagaatctggccgtgacctgtggctggatggctgccacactgctataggccccagaacagaggtggtgacagtctcacagcccttgaatgtcccccaccctcagaggaatctgggccaaagagtggaaggtgatgtccttgggtcagccagaataacatggagcaaagataccaactactcttccagaaccccaagagggtagaacccctgcttaatggtttgagcagggacagtggagaatgttctcatgagagggggtggcctgactttcgttgctaaggtgggctggtaacgcagtaggcagggctggcgaagtaggttccacccaggatgaaacctggggtcatgaggaactccccgggggctggccctgcttgcaccctggcgtatgtatgtaaggccctggatgaggcccagcactgcctgctctctcctcaccctccacaggccggagagtggccaccactctatatagccaggctggaaggccagggtcctggccatatggctcaagcttcctttggagaaccttctctggccactctaatagggggtgggcctctttcttcttagggccaaattagggcttaaactgagaaaaggaactgctctgggtcttcctgtaaggcctgatgtgacagaaaccaggttcatctgacccaaaagtccaggtgggggacaagtgtacaaggcccctcagtgcctgaggtcaggggctgctgctgcctttggggtaggtagggaagtgcagcctgccactgttgcctcccaatatgggcttggtgggcattgatggtgggtgccctgtgcaggagtgctgagtctgcaggagt

SEQ ID NO: 105725 - DNA, 1048 bp, Homo sapiens
atcttgattccacttagagaagctgaagctgtgcctccctcccctgtcaagccagttctttcctcttcaggtggctgttctggcccagccccttcccatccccaaggagcccttcagcgcgccctgttgcttctgctagcctacctttccctgccaggcccttgctcagggccatggcatttaactaagtgcacctgtgatcttggccaaaaaaccattgcaactcacagtaagagactgggtttcggggaaggaggggctagggacattttggcactggcctgccctattgtctcccatcctagtctgtcctggtccctggcaacaggaacctgggcagcttatcctgcccacaggtaagcccctgggagcatccacaactggggacctgctcagtgccccccctgccttacagctacatgacagtgctgttttatttgaacaacgtcactggtgggggcgagactgttttccctgtagcagataacagaacctacgatgaaatggtaagggtcaactgggctattactcttgtgggctggcaggggcttagacaagtgaagtacacacctctccaggtctaaggatgtgggcccaaattattccttgggcatatctggttggtttccctttggtcacccttggctggcctggccatagagtggggacaggttgaacaccccaccaccctgctgcccacagagtctgattcaggatgacgtggacctccgtgacacacggaggcactgtgacaagggaaacctgcgtgtcaagccccaacagggcacagcagtcttctggtacaactacctgcctgatgggcaaggtgagggcctatggccaggcctggggggggtgccctgagtacagcttccctttacccagcccccgtctgccacaatggagggctgtttctggctgctttccaaatagttttctgctcctggtgcctcccaaaggccatccttagtgactttagcagactgccccaggacctgtactgcttattgggttatatccatccctatcattccctgatgccccagcc

SEQ ID NO: 105726 - DNA, 1057 bp, Homo sapiens
tagacgactactcgctgcacgggggctgcctggtcacgcgcggcaccaagtggattgccaacaactggattaatgtggaccccagccgagcgcggcaagcgctgttccaacaggagatggcccgccttgcccgagaagggggcaccgactcacagcccgagtgggctctggaccgggcctaccgcgatgcgcgcgtggaactctgagggaagagttagccccggttcccagccgcgggtcgccagttgcccaagatcaggggtccggctgtccttctgtcctgctgcagactaaaggtctggccaatgtcttgccccaccccgccagccgcgatacggcgcagttcctatattcatgttatttattgtgtactgactccatctgccccgtcaaataaaaaaccacaaggttcgagccgccgggcccgacaaactccgggtcggcgaaacagagtccgcgataggtgcagcgggctggcagctgggagcgccccgcaagcgtcacgtgagggggcgaggggcgggatgcccctccgcgggccccgccaatgatgagctggattgcgtgggacgaagggtcgtcattggacaaccgccgcgggcgccctggtctctgctacctgtagctgagggcgctgttgatgggcagcgcggcgcgctgggaaggctcgttctcgcgagagttcagctcccttcttagccgtggctgcctcagcacctcgaggatcgacatggacgctctcgaggactacgtttggccgcgggcaacctcggagcttatactcctcccagtgacgggtctggagtgcgtgggggaccggctgttggcgggtgaggcttggcttgaggcacgcctggtggaaagggggaaagaaacagcgcctcccaggggcggtgccacagggacaaaaggggtgccctgaggagaaggacgggcagcaggttgaggccgatcggaggtgggaagggagccccggagatggcggggacgagggccaacctgaagagggcggggcccgagagacaaagctgatgtggccgccgcggcgcttcataaa

SEQ ID NO: 105727 - DNA, 1313 bp, Homo sapiens
ggctcactgcaacctccacccgctgggttcaagcgattctcctgcctcagcctcctgagtagctgggattacaggcacgtgccaccacacctggctaattttttagtagagatggggttttcaccttgttggccaggctagtcctgaacccctgacctcaggtgattcatccgcctgggcttcccaaagtgctaggattacaggcgtgagccaccgtgcctggccgagaccaaggattttcttttttttttttttcttttgagacagagtctggctttggctttccaaagtgcccagattacaggcgtgagccaccgcacccggccgagaccaaggattttctaagattcaagctgcaggattgtgtgtcctgatgcattcataggctacatgccgagaagtttccctgatccccatctcttccctgtgggtcatcagagttaggtacctagctctgacatggctctttgcctctatctaggtgagggtcccgatgtcctggtgtacagcttggactttggtgggcatctgcggatgataaagcgagtgcagaacctgcttggccactatcttatccatggcttccgggtacggccagagcctaatggagaccttgacttggaggccatggtggctgtgtttggaagcaagggactccgagttgtgaaaattagctggggacagggccacttctgggagctttggcgctctggcctgtggaacatgtctgactggatttgggatgcacgctggcttgagggaaatatagccttggccctgggccacaactcagtggtgctatatgaccctgtagtagggtgcatcctgcaagaggtgccctgcacagacaggtgcaccctctcttcagcctgcctgattggagacgcctggaaggagctgaccatagtggcaggtgctgtttccaaccagctcttggtctggtacccagcaactgccttagcagacaacaaacctgtagcacctgaccgacgaatcagtgggcatgtgggcatcatcttcagcatgtcatacctggaaagcaagggattgctggctacagcttcagaagaccgaagcgttcgtatctggaaggtgggcgacctgcgagtgcctgggggtcgggtgcagaatattgggcactgctttgggcacagcgcccgtgtgtggcaggtcaagcttctagagaattaccttatcagtgcaggagaggattgtgtctgcttggtgtggagccatgaaggtgagatcctccaggcctttcggggacaccagggacgtgggatccgggccatagctgcccatgagaggcaggc

SEQ ID NO: 105728 - DNA, 1068 bp, Homo sapiens
ctgggcatggggcctgctcacagacagcatggagcagggatgggctgtctgtgcccatgctcagcatgccttgaggggaggaggtggtggccgtgggttcctgatgtcggtgcaggagctgaaggtgagtggagtgctgccaagaatatgcccgactccccatgacaagacagaactttgtaacaaacagtaccaatttattttggccgtgggtttttgctttttttccagttgatgactttgtgaacattcccaggtattggagcctctgtggccttaaatgtggctcagtggagggagacccagcatagccaggccagtatggagcacctcacgcacagctctcagaagctgcaggcggacgaacatctgaccaaagaggtgtggtcgaggctcctgaaagagaaagggcctgctggtctcatcctctgcttcctttgcctttaccctatacctctctgcacgtcccaccccattttgctgtgtgctcacccccaggatgtgtacccggttgtagtaggagctgaaatccatgctgagctgtaccaggaacttgcatatctagagacagagactgagtcactggcccatctctttgctcttgtgccccaggccagaataaagaatagagtgtagagtgtcctggttgtctatgcctcaccatctctgtgcgtacagcaatgtggagccccggggctgtgcagtccagcactgctgtccggctcagcagatccggaaaggggaggatactgttgaagagcaacaaccactcaccctgttggggagaaaggtgctgggaggggaagtccaggcctccttgtgccagctaccaggagggacactcacctcatcatgtagcagtgagaagtccagactgctcacaggaggaaaagtggggtacagaccttgttccatactacacttgtaactctcaaagagtgtggcaagacgggcacaattatacatgacaaaggtgccactctttgtgcccttcgtggagatactgctgtcagccagagccaggaagagctggggaatagaagcacagctgcagagagagaaggcagc

SEQ ID NO: 105729 - DNA, 2796 bp, Homo sapiens
cacgcggaaggggcgctgggggcggtaggtcgaaagcagccgacagggctaccactggcgcacctgtccacttacggggaccaccgccgcatccccgccccagctagtcggtcctttccggaagttccacctccctaaatttttttccggttccgcttactccttccggtcaccatggcgaccaggcgccttggggtcggggagacgctgggggccctcaacgcggccctggggccaggcggtccggtgtggatcaaggagacgcgcacccgccacctgcgttcccgagactttctggcaccgcaccgcgcgctgcaggcgcgcttcgatgacggccaggtgggcgtgagccgggcggggccgtgcggccgggagatgggccccgtgccgtggctcttttacacgcccgttctcccgcaggttccggagcatttgctccatgccctcgcctgcctgcagggccccggtgtggccccggtgctgcgctgcgcgccgacccccgcgggtctgtctctccaactgcagcggtccgccgtcttcgagcgcgtcctcagcgccgtggccgcctatgccacgcccgcctcgcctgcctcgctgggccagcgcgtcttactacactgcccagcactgcgcagctccccctgcgcactccgcttgagccagctgcgtacggtgctcgtggccgatcacctggcgcgagccctgcgcgctcacgggtgagcggggccgcggggccggaatggagaaagtgggactgccgggtacctagaaagcgagcggcgccgcccgtggggactgcggctggaggtgggaagtcgtggcgagctggaccaggtgctcagactgaggcggccgccctcccttcgcagggtgtgcgtgcgcctagtgccagctgtgcgggatccgcacatgctgaccttcctgcagcaactgcgggtggactggcccgctgcctcggagagagcttcctcccacaccctgaggagccacgcccttgaagaacttacctctgctaatgacgggaggacactgtcccctggcatcctaggcagactgtgtctgaaggagctggtggaagaacagggccgcacagctggctatgaccccaacctggacaactgtctgggtaggacctgaagcctagcagggccagaaaaggcaggagggggttaggggcacatctctgcttcttgtcagtctcagcacctgtctgttctcttttcagtgactgaggatctcctctctgtgctggctgagctgcaagaggctctatggcattggcccgaggacagccacccaggcctggttagtgactcccagccctgtaggttctcccaaaccaagtatactgtacttccacagttatgattgtcctcccttaggctggggcctcagatactggtacaggcggctgcctggttgtacatgttgttagctgtgaggaggagttccagcaacagaagttggacctgctttggcagaagttggttgacaaggctccactcagacaggtaggttaataatgatggtggagctccccaccacctaacccccaacctcagagggcccttgaaaacccaccgaggggcttgttagctgacagaaaccaacacttgaccttgggggagttgctggacttgagagggcatgtacagcaggtgcagaggctctggggaaggggggtctgtagacacatcccaagaacactgaagaccaggttgagaaggatgaaccatgcgtagcctgagtggctgggtagacggaggcactcaacctggcagttccaatttgagggagtctgggctgagtagaggcaccagatttgggctcctcaagggacttcctggagagtagcgccaactaggctgagcccctgacatctttctgacagaagcacctcatctgtggccctgtgaaagtagctggtgcacctggcactctgatgactgcccctgagtactacgagtgagtgaggctgggaggaacaccaacctaagccagggtaatgaggggggactctttacccaggaccctgcccactggccttcctctcttccaaacacaggttccggcatacccaggtgtgcaaggcctcagcactgaagcatggtggggatctggcacaaggtgtgcctgggaaaccctggctatgttctgggttaggggcaggttttttgcatccctgcccttgcctgcagactgactgaccaaccctatactccctcagacccagcctggacagagatctttggtgttctctctgtggccaccatcaagtttgagatgctgagcacagccccacagagtcaggtgagcctgggagcctgacagggccagtgttggggcacagggtgtggtggctgccttctctctctgcagctgtgcttctattccccagctcttcctggctctggctgacagcagtatctccacgaagggcacaaagagtggcacctttgtcatgtataattgtgcccgtcttgccacactctttgagagttacaagtgtagtatggaacaaggtctgtaccccacttttcctcctgtgagcagtctggacttctcactgctacatgatgaggtgagtgtccctcctggtagctggcacaaggaggcctggacttcccctcccagcacctttctccccaacagggtgagtggttgttgctcttcaacagtatcctcccctttccggatctgctgagccggacagcagtgctggactgcacagccccggggctccacattgctgtacgcacagagatggtgaggcatagacaaccaggacactctaca

SEQ ID NO: 105730 - DNA, 1079 bp, Homo sapiens
tggagcatcaccttgtcctcgttcactctgctcgcgtcctgggagtcccccgtcccccgtcttgatccaagtcaagggcctactggcgcgagagtcgctggcccccgcgcggggtttgggcatctcggcacgccggctctgtcgtggcctcaggggaacattgtcgctttcgctacccgcggggccgggcgagcgggaagctcggcacagtgggagcctggtggtgggtctcctggggccggtcgcaatgggtttccgggggtcccgcggctgctctgtggaccccttcggcccctggtgctccgggcgctggcagcgtcaccggacaaaggccaccgagcgcgggggtgtccccgaggtggacgcgcgggtttacttcctctccggccccacgggcgcgcttccctcctgacggattccgaagcccgccccaccaccgtcaccgcaccagtggcccaggcttcgtgggaccaacagggctaatcctgccccacggatctaatccggatcgggacccggtcccaggggaggcccccacctccccttctattgttctgtggcccaggtgagcgtcttgttccctctagactccgtttcacaacctactcccgggtcttcctcctgggactggggatgggcgggttctgatgtggccccagggcgagtgacctgggggcaggagctcccccgccccccgccaacggctggacagcgggcaacggaatcccaaaagcagctgttgtctccagagcattccagctgcgcttggatttcgtcccctgctctcctgcctgagcagcgccctggcccagatggggtgcccctgacccccagacatactttactgagctgcttgggtctcagttcctctcagttgcgccctcaggctggaggtgatgggtgtagacgtgggagagccgaggctggtggccatctctggaaccctggggaggattggcgagggagggtggacccaggacctctgggtagggctgcaatggtagtgactcccccagggctgcctcagcccgcatctcgctaaagatagccctcttacttcctggggaaaaaccacccca

SEQ ID NO: 105731 - DNA, 1042 bp, Homo sapiens
cattgggctgcaaagaaaaggccagcatcagcctgtctagcgccaggcctgtgctccccgcagcatgccccagtcccgggactcaccgtgtcctgcacttccacagcaatgccccgctgcctcatggcttgaagcacctgggactgcagcctctcggtccggtctccagtccccaccaccacgatctctagggaagggtgggtgtggctagtctacagttctgttgagaggctgcagtgggggtcgccttctggggcccagaacacctctgttctccctccccttccccagtacctatccggggctccagcaaccagaagagggaaaagctgtcttcggtgatgtcctggtgggatcccacctgtgcagggaggaggcacatttaatacgacaaatccacgcagcctctccccatctccatccactgcaggaggagacagaggaaagccaagtttgcagggaccaagcagggtgagggcctgtgactctgggcctcagtttccacactgcgggccaggactcacgttccactgcaccaccgagtgcgggagcagagcgcaggggccgagcacgcggtttccgtttatcatgaagccgcggctgttgtagctgtcgatgtacattgcctgagcggcctcgcgttgcagcagagagatgcgcgtccgctgatacagctcgtcatccgccggcgagagccgatgccctcgccgcggggccctgcggagggaaagggtcaggggcgcggggccgggccgggcagcccgagaggccggaaggtgctgggctggcagtcgccggccctagggggctggatggtcgagggcgcggggtccaagctcaccagggaagctcaacgggcggacagcgcagcgagggtcgcgctcggtacaagctacgtagcgcgagagcggtggccatggctgaccaacgcgcggcgaagtcgtcaccggcgccgttagtccccgggttgggagggccctgcggagcctgacccagcgtggctgcagcgccccctgcgtcccggagggcaccgcacagctcg

SEQ ID NO: 105732 - DNA, 1036 bp, Homo sapiens
ccttttcagaaaagccgcttctcatacctgcaggcagaaggaccacctgtgaggtgagggcaggagaaaggaggcatgaggtatggcagaggccccaccaaggacagggtgacttacgaatggaggctatggacgccaccttccacctgggctgaggacgttctcttctcaaacttaagctccccagagtacatcatggctctgaagaagggcagaggtcaaatgtgggtagctggccctggaccagcccctctacccatgtcccagctccccaagctcaccggacttgggtcaagctcttggcaccaatgtcctggcatgagtgttggatgccagcaatcaggtaagggacaaatttgtggattgaccctttgtcctgcacagcaccagacactccctgggccactttgattttgtcagcttcactgcagggagaggcagagacacgggcaaggtcacagcagagatgagactgtcagtgcaggattagggtggggtaactggcttgcctgtcccacctgaaatatctgttctggctgctgaggtgcttgtccatggcatcgagagaacccataccgcgatatttctttagccggatcccatcggaaaagaagtattcaccaggggcctcagtggtggcagccaggagagagcccatcatgactgcggacagatggagtgcttgggttagagcctaagcagcactagggagggggtcccactggccttcacgggtactgggcctcacctgtggaggccccaagggccaaggctttcgcaatatgacccacattttggattcctccatcagcaatgaccggaacaccaaagcgccgtgcatactctgacaccttgtacactgctgttgcttggggccgcccacaggccagcactgttgagatggaggaacacatgggtggatagggttaatggggacgggcagtggaccctgtggccatatttaggacccaggagcttttggctacatctgcatcaggactgcagcttggctgaggaacagacgtgtctgggatgg

SEQ ID NO: 105733 - DNA, 1094 bp, Homo sapiens
gggtgggcaaggccaactgatacacagaccatggtttgggggtggtgctcaagaacatagctccctcttccttctggggtgctgatagggcaggaccttcttccctaggcaggaccttttctgcccacatcttctgcagtaggcatagttcagggaccaactcctttgtgtggtccttgctctcccacacaaccactgcctgctccacacaaccacagcctgctctcctacacaaccactgcccttatcttgcctgagctgcccaccattcagggaggaagggctgggcctgacctcagtgcctctggggactaactgcacggtgactcctgccccatctgataccagctggacgggggctttcccggctgctaagactgcatgtgcctgaggctgccctgggcactgcacacatgcacgtgcacatgtgggggtgagtagaggtcagcacagctgtttgtactatttaaggcagatgtggcagcagccatcccagacacgtctgttcctcagccaagctgcagtcctgatgcagatgtagccaaaagctcctgggtcctaaatatggccacagggtccactgcccgtccccattaaccctatccacccatgtgttcctccatctcaacagtgctggcctgtgggcggccccaagcaacagcagtgtacaaggtgtcagagtatgcacggcgctttggtgttccggtcattgctgatggaggaatccaaaatgtgggtcatattgcgaaagccttggcccttggggcctccacaggtgaggcccagtacccgtgaaggccagtgggaccccctccctagtgctgcttaggctctaacccaagcactccatctgtccgcagtcatgatgggctctctcctggctgccaccactgaggcccctggtgaatacttcttttccgatgggatccggctaaagaaatatcgcggtatgggttctctcgatgccatggacaagcacctcagcagccagaacagatatttcaggtgggacaggcaagccagttaccccaccctaatcctgcactgacagtctcatctctgctgtgaccttgcccgtgtctctgcctctccct

SEQ ID NO: 105734 - DNA, 1864 bp, Homo sapiens
ggattcatcacagaccctgtggtcctcagccccaaggatcgcgtgcgggatgtttttgaggccaaggcccggcatggtttctgcggtatcccaatcacagacacaggccggatggggagccgcttggtgggcatcatctcctccagggacattgattttctcaaagaggaggaacatgactgtttcttggaagaggtgggtgccactggcagagtagatccaagctctagcagcccaggttgaagacaaggggcttctgttgtctaagacatctctgatagcctcttctctctgggaaaggagtgtcaaaccaagtttctgactcctttattgggttcctgcatcctttccccaccagaggctttcaaactgcccaaatgcttgctagtattcatgctttgttcttttaaacccctaaggtaggggcagtgcttgaggtctgccctgattttcttgccattgttcctgtgttgtcctccttattccatagtgtaagagggtgctccctgtgccatgttgtcctttctactcatccctcactcaataccatactgctaagaattattgggatcccttgaggaagggtgttttgggtgtgaatgtatgaacgtggtggtccatagaacttcacccctgtaatctcagtactttgggagactgaggcaggcaaatcatgaggttaggagtttgagaccagcctggccaacatggtgaaaccccgtctctactaaaaatacaaaaaattagttgggtgtggtggcgcgtgcctctgagctcagctacttgggaaggaaagaaaagagttaactggtcatagtcgatgactggcccttcttcacatctcacctcccacgtagataatgacaaagagggaagacttggtggtagcccctgcaggcatcacactgaaggaggcaaatgaaattctgcagcgcagcaagaagggtaagtcctagagctgggaaagggcctggaactaatgcctagggtcctgattcatgtcctgccctgaccacaggaaagttgcccattgtaaatgaagatgatgagcttgtggccatcattgcccggacagacctgaagaagaatcgggactacccactagcctccaaagatgccaagaaacagctgctgtgtggggcagccattggcactcatgaggatgacaagtataggctggacttgctcgcccaggctggtgtggatgtagtggttttggtgagctgctacacaggtgggttggggcaataggggcagctgccacatcacagtctgagacttacttcttgtcctaggactcttcccagggaaattccatcttccagatcaatatgatcaagtacatcaaagacaaataccctaatctccaagtcattggaggcaatggtaaggcaagattgtgccctgaaggatgtgtggtgggagtgggtaagctgggctcccaccttaaccttcacatgagcattttcctttccttcaccatagtggtcactgctgcccaggccaagaacctcattgatgcaggtgtggatgccctgcgggtgggcatgggaagtggctccatctgcattacgcaggaaggtaagaatatactttgatagggcccacagagaccccagtttcaggccccacataccttggaaccaagcactcttatggggacaatagagccctccaataggggcaaccctggggccaaattggcctcttggatgggtgacatggctggaagcaagacaaggtcttgtcatccatcacctgccactcccttgcctagcctggccttcttgctcctgctctgcaccttctctaaactctggtctgtttgttttatttagtggctcccaagatccctccagacata

SEQ ID NO: 105735 - DNA, 2316 bp, Homo sapiens
ccttttacctgacacctgagccagtggtggcccccaacagcccaatctggtactcagtccagcctatcagcagagagcagatgggacaaatgctgacgcggatcctggtgataagagaaattcaggaggccatcgcagtggccaatgcaagcactatgcactgagatgccttggccatggcacaagagaaaccagccaggaaaaaccagacagactttcacactaaagaagaggcctccatttttttttttcttttttttattggtgtagttacgaagcctttcaggctgcttctgtttaaaatataaaagaaaactttgccccctttgcatcttcataaacctgctgcggcagactcctcagccgatggtggctctgggtttccttgagtgtcatatgtcctagaaagttgctggctgactcttttttgtctggggcctggggaaagggcttggactgtgaaaagaaatgtggcccctttccatcttcaagagagatggaattaatgatggatggaccctggagggaatctccccagccgacttccactgggctgacagactttgctgaccacaggggaacgatgttcttttctttcttcatgatcagacataaacttagcatcttaatggaagaaaaatgaggggaacttcaattatgatttattaaagacaatttctattacaccctcctttatgacaagtgacattttagatgtaaaagtaaaaactttaccatgccttttttttttttgttggcctaacattgaggccttaaaacctgaggctcctgtgcctgatggaattcttgtaacatacacttgtgtatcatataaagataccactctgtttctcttatgtattcttactctagttgtttattaagaatgacaagcacgtcttttcaacatgttagtgaacaacgtctctttattttggggaggagcccggcgggacagtagaagtaaacccttgcctgttaattgaactggccgaggtcctgcggggagtgtggggtgggacgtgaagtggcagctcctcagtgacaaggccactatgtgctatacgcatgcgctgtttcttcagcgccagctccgcccccgccgcagcgaggcgggtaggttccgcccgcgcgcactacgccctgacgtcagcgtcgcgcgcagcgcagtgacgaaatcggctggtttatattggcgcggcccagacggcagaggtctctgcggcgcggtcctcggagacacgcggcggtgtcctgtgttggccatggccgactacctgattagtgggggcacgtcctacgtgccagacgacggactcacagcacagcagctcttcaactgcggagacggcctcacctacaagtgcgggcctatggggctcacctgggcgaagagaggggcggcaccctggggaaaaggccagatgggggcttccgagagccgccttgggcgtgggcgtgggggacaggtttcgggaattggccacccacctccggggctcactttgagacatctggagcggtgcttggggtacggagaagcatctcagtagtgcttggaatctcaggccggagattccatgctccagacacatggaattgtcagggtgccaggagcactgatgacagctcggtggcagaaaaggtcccctgtacccatttccaccttgtgctgtgcctgtgacacacagactctgtcagtgccactctctgctcacatgcgttacgggttgattggtacatggggatggagtctcatgctgccctaagctgagagctttactcccaattcactcccttccctcgcagtgactttctcattctccctgggtacatcgacttcactgcagaccaggtggtgagtatgatcaggaattgggtcctgaacatcaaggtgagctaaggtgctactatcacctggtctctgggctaactcaccagattgggcttgggggtggattttataggatcatgttgcttgttagcatgcaggtcatacaaaagtgcctttttgtgggggactcagtaacaccttgaggtgtaagggatgctttcccacactggttgacgtttgtctcctcaggacctgacttctgctctgaccaagaaaatcactcttaagaccccactggtttcctctcccatggacacagtcacagaggctgggatggccatagcaatggcggtgagccccatggggtgtgggggaaggagcaaggactccatcgcctttccccaaaggcattcagtcctgcttcttgtcacttagtagtagtctctttttatcctgtagcttacaggcggtattggcttcat

SEQ ID NO: 105736 - DNA, 1075 bp, Homo sapiens
taaaaacacttccagaaagctaaatttagaagcagccttgctctggctttccaaaggtgtgtgatgtgcctagcactgatagaaaaaggggtcccgggtccctacagtcacctttcatgaaaagggtatgaaggtacagagaatctaccttcatcacatattgagcatggccctgcttcctgaccttgaccttttgtcactgccatcattaatctaggtgagactcctctcagctttttctcccttttgccccttcaatggtttctcattacatagtaattcttttatggcagacaactcctttgatgcactcccccttgctaacctcatgtctgtggagctcttagttccctagccacactagctcctctccactcaaggacatcatattatgcctcttctcaacttaaacacagcttatcagggaagcatttccagattccccacctcttccctgtgactgtttcctcggtagcacttatcactgttttttattttgtatttgtttaactttaattgctacctgtgtcccctcctatctgtaagctccatgggtaggaaatacttttcctgcccatttttttaaatatcagcacctagtgctgacctggcactagtaacccttgaataaatcttgaatggatggatgaataactgttagaggatacagcatgccaagtacttaatagaggtacagcacagttcgggggaggggggtgaacccaagtttagggccccactgtaatggccatcattattgggtagaaaacacaacatgaggctgggcaccgtggctcacgcctgtaatccaagcactttgggaggccaaggtgggtggatcacctgaggtcaggagttcgagaccagcctggccaacatggaaaaaccccatctctactaaaaaatacaaaaattagctgggcttggtggctcgtgcctatggttccagctactccagaggctgaggcaggagaatcgcttcaaccaagggggcggaggttgcagtgagctgagatcacctcactgcactccagcctggagacaagacgccatctcaaaaaaaaaaaaaaaaaaa

SEQ ID NO: 105737 - DNA, 1544 bp, Homo sapiens
cggccttccaaagtgctgggattacaggcatcagccactgcgcctggccggccttgctttttagagacagttgagatgagagaagacttggtaagggcaaacgggcgtgcatgccagttctttgggtcctggaccacctttgaaaatatgcaaagctctgtacactctcagagaattatgcatatatgcagagtttggtttatagttttctgtacttcactgtctctgagggcagtctttttgccctgtgttagccttggattagagggtaacaacaatcatgtaaggctgtggttctcaagtgtggtgttagaagtgctcatcatcaggttccacctcagaaacagattgggacccagctatctgtgttttaagaagctttccagatgatttttgccacactttagggagagtcccctgatgaaatttatactcctgtgtggtccttatgcttcacacatcccatattgtacctttgagagaccacctgccatcctcttgttgtgacagtactctattcctcctaggctatgtcttgcccagccacgtgactgaggagatgctatgggagtgcaagcagcttggggctcactccccctccaccttgctgaccaccctcatgttctttaataccaagtaagtgttctagaggctccactgctggcatctgtccagtgaagagtgtggaagctatccaagaggccttctgaattcctctgacatatatttgagaaactgggctactgaaagccctaaccccacttggctgcattttatttggtaaccagtgaggcaaacacccttgccagacccctaccatccatcttgatgtggttcctgcactggacactgcttgggtacgggcctgcccagatcttgggaatgtgggcagtggctcctctgaagcaccagtgggcagaggatgagtcatggtatcctcccggcacccctccctctgccttgcattttacttgtgatccaggtacttcctattgaagacagtggaccagcacatgaagctggccttctccaaggtcttgcgacagacaaagaagaacccctctaatcccaaggataaaagcacgagtatccggtacttgaaggcccttggaatacaccagactggccagaaaggtagggaaaggaggcagggatggcaaaaacaggtgctacttgtcctgccctgtcctgcccttgtgcctgtgaggctagtgataagtgtaaaggttgggatttgctggataaaattctccactcccttctccccagccaaaaattccaaactttcctcctagaagcagagaagccccagacagaatagctgcctcttcccttagtagtcactgcccatgcctcataccttccctcccccgaccctgtatttcctagttgggctggctgaaagcctaagtttcctgatctgggcctgaggtaaggcagtctgatgccaggtctgtggtggtggggatgtgtgttttatagttacagatgacatgtatgcagaacagacggaaaatccagagaatccattgagatgtcccatc

SEQ ID NO: 105738 - DNA, 1039 bp, Homo sapiens
aaaattagctgggtatggtaatgcatgcctgtagtcccagctacttgggaggctgaggtgggaggattgcttgagccccagaggttggggctgtagtgagtcatgattatgtcactacactccagcctgggtgacagagtgagaccctgtctgaaaaacgaaaagaaaaaaaattagctgggtgtggtggcacacacctgtagtcccagctatttgggaggctgaggcaggaggatcccttgagctcaggagtgcgaggctgcattcagctatgattgtgccatcacacttcaatctggtctacaaagcaagaccttgcctcttaaaaaataaatacataaaataaataataaaataggaaaacaaacattattcatcctactacctaaacttctattacattattggtaattaccttgactttttttttttttttttttttttgtaattcacaaagcatttatgtaacacttttctttttgttaaacctgattttcatgaaggtaatttattcaaaacagagtcttgtgccagcatagaggttttcttctcattgttccctgcactaactacttatttgaaggagtctagctagaataatataccaatgtagttaggttttcaggacatctgtggtgaagcataacagaaatttgcagactggcagttcaagggagcagaggtggatttcttagtgtttgaaggctcttgaggagaaacccacagtataatagaatagggcttactggttgggacttattctgttgcctagtcttgagaaatgtctgcctcctagttttttcctctcttggtggtcctaacctaagtactatgtgaattgctttacatgctttcattctttgctctcccagtcctggaaggcagataccatcatctccatttacaggcaaggaaactgagtctcagaaattaaaagacttgcacatgttgtttaacttatacaatatctaatggaaggctgaccccagagcctattcatgatttttgctaacacaaaataatgcctttcttgggtgaa

SEQ ID NO: 105739 - DNA, 1754 bp, Homo sapiens
taaacccaggtactcgggaggctgagacaggagactcacttgaacccgggaggcggagggtgcagtgagctgagattgcgccattgcactccagcctgagcaacaagaggaaaactccgtctcaaaaaaaaaaaaaaaaaaaaacatttaaaagtgcagccaaggctgagaagcactgcactagcccagttgcagtgctgcttttgctgtccctggggcaagaggtagaactccaaagcttcttaaaagtaggacagcaatgagtagagaaatattttcttaaataaatgaactatacataacatttttctggcaattttgcagaaggatctaatataaaacaatattgacacattttcatggtttctctcctataggctcaaactgtccaggttgctgaagttgaaccacagtcacagccacagccttccccagaacttctgcttccaaattctttgaagccagaagaagggcttgaagtatggaaaaactgggcccagaccaagaatgctgaactagagaaggatgctcagaacagattggcacccattgggagtgagtgtcttggaagaagagtgggctgtgtctaaaatgcaatggtactaaagtaacaggaggacaaaatgccagaaaagtggtgtctcctgtcttggggacaagagagcaacatctgtaatagtatgttgaattcaagcctagtaacaagcagtactgaccttgtgtacataataagcaggatatgtggggtttgcccaaaaccaggcatttttagacatacgggtttcaggagttgaccctaccagacctaagcagagtggcttctgggaggaaatgggaaccagggataggcactcaagcccttctttcttggcattaggctcatatactcatgttataggccagttctgacattacaggcatgaaacattctagtagatacaagtgagcatttctatcccagcaccctgatgggcagtatctgttctgagccttccagatatggacccccaggaccttcattcatttttgaggcttccgttgcagggcgccaactgctgcgattccaggaagatctcatctcctctgctgtggcagagttgaattatgggctctgtctaatgacacgggaagctcgaaatggagaaggtgaaccctatgacccagatgtgctctactatattttcctgtgtattcaaaaggtaggaaacagatcttcacaagaacatgtttgagctgtgttcctattggatgtttgctagtttagttaataaattgataagcaagaagttaaaataaggaagttctctttcaggtatacagtgagttttaaaatacacatttgttgttttttttttttttttaagttttaaaaacctacacgttcactttagaaaataacagccggggccgggcgctggtggctcacgcctgtaatcccagcgctttgggaggccgaggcaggtggatcacttgaggtcaggagttgaagacgaccagcccagccaacatggtgaaaccccatccactaaaaatagaaaaatttgccaggtgtggtggtgcactgcctataatccctgctatttgggaggctgaggcatgagaatcgcttgaacccgggaggtagaggttgcaatgagctgagatcacagcattttactccagtctgggtgacagagcgagactctgtctcaaaaattaaaaaaaaaagaaaagaaaagaaaaaaaataagagccaggcaagatgtctcacacct

SEQ ID NO: 105740 - DNA, 1057 bp, Homo sapiens
agacagtgcccacctgtacagtgccactgggaccattactagccctacaggagaaacctggaccatccctgtttattctgcccagccccggggggaccctcagcagcagagcattacccacattgccattccccaggaagcctacaacgcagttcacgtcagtggctcacccacagccctggcagctgttaagctggaggatgacaaggagaagatggtgggcaccacatctgtagtgaaaaactcccatgaagaggtagtgcagacccttgcaaactctctctttccagcacagttcatgaatggcaacatccacattccagtggctgtgcaggctgtggcaggcacgtaccagaatacggctcaaactgtccatatatgggacccccaacagcagccgcagcagcaaactccccaggaacagacaccaccaccacagcagcagcagcagcaactccaagttacttgttcagtaagtgaagacttatcagtagggcaggcagcctggtccctcagggcccagtgcagcacagagcttgcctcgcaacctctggcttatttactgctgttactcttacagtgatgcagtatttagtatttgggagaagagggggagaaacatcacgtgaggctatgcaacagaaaaaagagtttatcctggtacctggaggtaaatgagatggccaggaattgctttggagttttggagacattttgggtttaagtaccatggacacttctttgtaatctcttctcaggaagagtaaagttacaggtgtagatgaatgggacacctcaagtgtgtcccagtgctgtttccttgtatcataagtaaatggttttagcaaaacacttgtagtttatcacatagattacaaactcatcactggagaggctgtgagattgttcattctgtttttcatctttgggcacacagtgtgggtgaattagaaaagctaaaataactcataaggagcctgttaaaagtgatcaccattgggaggcttgaatatgccgtctatgtggtgggacctcccaagagtttttgtgttacggg

SEQ ID NO: 105741 - DNA, 1017 bp, Homo sapiens
ggctggcttcaagaattgcttgagcctgagaggtggagattgcagtgagctgagatggcaccactgcattccagcctgggcgacacaatgagaatttggggaaaaaaaaaaagaaccaaagttttgatatttccttgttagactccagcatgtctgtaatcccagctactctaggaagctgaggcaggagaatcgcttgatcccagcaggcggaggttgcagtgagctgagattgcgccactgcattccagcctgggcgacagagcgagtccatcttaaaaaaaaaaaatttttttttttggtatttcctttttaggccccagttaattgtcttgcttgctctctggggtggatatatgtccctgttattgtaatgtgctgctggacaatcctggatctagtcttacgtattgtgtccttctcagaagccttgagtatgccagtgttttctcacattttgcaggtcccctgtctgggatctcttttctttctttccttgggtactggattttcagtgctgcctggttcactcactgatgaatcttgttgcttacaggtccaggtgcaggtacagcagtctccgcaacaggtctcggctcagctctccccacaactcaccgttcaccagcctactgagcaacccatccaggtccaggtgcagatccaaggccaggcaccacagtcagcagccccctccattcagaccccgtctctgcagagtcccagtccctcgcagctgcaagcagctcagatccaggtgcagcacgtgcaagcagcccagcagatccaggctgcagaaatcccggaggagcacatcccacatcagcaaatccaggctcagctggtggctggccagtctcttgctggtggtcagcagatccaaatccagaccgtgggtgccctttccccaccaccatcccagcagggctcaccccgggaaggggagcggcgggttggcacggccagtgtcctccaaccagtgaagaagcgcaaagtggacatgcccatcactgtgtc

SEQ ID NO: 105742 - DNA, 1031 bp, Homo sapiens
gctgggtaggaagtgtgttttcagcctgtttcatccagtattgtgaagcatgtgtttgtttttttgttttcagtgtgatagttttatttaagaaatgttaatagaaataattttcaaacatccattaattgaaaaaataaggtggtataataaaactttattttttgattctatatgtatacagctgccctgaatatattccactcttgtgcaagggtaattgcttctgggcatttcctgctaaaaacagtaacataattttgacttctgtttatttctaggaaccctaaggactctgcaatatgaataattccctagagaacaccatctcctttgaagagtacatccgagtaaaggcacggtctgtcccgcaacacaggatgaaggaatttctggactcactggcctctaaggggccagaagcccttcaggagttccagcagacagccaccactaccatggtgtaccaacagggtgggaactgcatatacacagacagcactgaagtggctgggtctttgcttgaacttgcctgtccagtcaccaccagtgttcagccacaaacccagcaagaacagcagatccaggttcagcagccgcagcaggttcaggtatatgggaaatgctgaggtgcagcctgtttaatgtactttatttgttgtcagtgttttagttagtgggctcatcacatctatgtggatgttataggttatttaacactaagattttcaaagttaatgtggactaaaagttttttctttcttctcctttttctttaagcttttttttttttttaaacaaaccccagtgtcaaggactgactttgaatagattgcagccagggatctgcttagctacctaggaaaccccaacccagaagcgggtcatctatgattggtttagcatcaggttcaacgtgacttgcgtgatgagtgagggggcgccacctttctggcagcaccttttcccaggatgaggggctctccacaccggaacccggtcccggcacgtgaccccgccggcggcgatgt

SEQ ID NO: 105743 - DNA, 1031 bp, Homo sapiens
atgctaagctccagtaggaggaaatacagaggagccaggcgcagtggctcacacctgtaatcccagttttgggaggctgaggatcacgaggtcaggagatcgagaccatcctggctaacacggcgaaaccccgtctctactaaaaatacaaaaaaattagccgggcgtggtggtgggtgcctgtagtcccagctacttgggaggctgaggcaggagaatggtgtgaatccaggaggtggagcttacagtgagccgagatcgcaccattgcactccagcctgggcgacagagtgagactccatctcaaaaaaaaaaaaagaaaaagaaaaagagggagatacagaggagataccagtgaacaatttgattttataccagcaaaaatgtccagggtctgtttaagggagggctggctttcctttattgttacttatttttttttttttacaatgcagctatatttaaaagcgtttagaagtaaatgcttgtttacagacctcatacaccccaagagcattagagtattttcttttttcattattagtctcatcagagtcccagaaattgggaacactcagatatcctcatggctgcatgtttttcagaaatactttaattaatttctttattgcttcttactaagtcttttacttggagctaattaagaatcttttgtctcttttagaagtttctccatttctctttattacgaaggctcaacttttgtgtcttatgtgcagcatcttgaagttaagtcttcattattttgtacaagtttttggtattttatggtttagtttctttttcttttttttttttttgagatggagttttgcccttgttgcccaggccggagtgcagtggcatggtcttggctcactgcaacctccacctcccaggttcaagcgattctcctgtctcagccttccgagtagctgggattacaggcacgtgtcaccacacctggctaattttttttgtatttttagtagaggcggggtttcatcatgttggtcaggctggtctcaaac

SEQ ID NO: 105744 - DNA, 1660 bp, Homo sapiens
ctgtggcccgtgggcaaccgcggctttctggagcgcgcgcccgtgacgacccccagttttggggcgcgcgctctgatatcgggtggcggtgctgcctcgagagcgcgcaggaggcttctgctgagcagagggccggccgcggctcgttgcgctgggaaggttgaggattgggtcctttctggtctggtgacgttcccgggcatccgtggcctcggcctggagagaaaccaaccagctttgctgtctggcttgcggttccgctcctctgtgaggggggcgagattgcccgttctcctcgaagaatgccgttacttgaggcccaagtacggtgcgggtgcttgggtagggtgtttctctgcttcggaaaccaagccctcttggtttgagagggcagtgagccccttcggatttcctcaccttgtactgggctttctgccgggcagggaaggttaatattagaaggcccttgagtggtacctgcttatctttcattagaaactaatacgtccataagcgtaattcatacacgtcacctctgtgcgctccggaagggaattcgcttatgtggcccatgtgaactccgagctctaaaatgccagtttaaatccttaaacgcagcttttcttttgcgtaagtgggaggggcttactttattatattaaaggcccacctttgcctcagccaaaaagttggccttaaacaaaatggaacaacctgagaatcagtgctttaccttttttgaaattgcagaaatcccagcagaaattactaaaatctgatagtgtatcactgtaaaagtcacttttggtgtaggatttcagtccttttcagctctttttttgaccctgccgctgtgttttggtgtcaaggaagttctaggtttgttctagagaaataggcacctcttttttctaatacaaaacatctgctagtttgatttacagtcttgctcaattaagcttaaggaataggaagctaagaggaagtaaaattagccatcaaatttgataatggtggggtagttctttctaatgtactgtattgtttttaagaacaaagttaaaattattaataaaaagaggctgaggatggaaggaacttttttgttctatcttcttcagaatattagaagtcttaagaactcaggacaagcagcagaaatacatgcaacatggtgactggtgagttaaaattgttcatatcctggaagtatctgtgcacagttttttttctggtaatactgaagcattacaaatcctgtcaattctgggtgctgtcttccagaaactattaggtgctgtaaaatgaagatgtgggagaacggcatctttgaattcagccacagttcgctacttgctcagttttctcctcttaggatataagtcagtggaacccgcagatttaagcgtttgcaggctcagcttttaaacggacctaaatggttcaaagaaaagctgtaaagtttttctaggatacacttaaaattttgactttttttttttttttgagacggagtctcactctgtcacccaggctggagtgcaggggtgtgatctcggctcactgcaacctccgcctccctggttgaagcgattctcctgcctcagtttcccaagtaactgggattacaggcatgcagcaccacacctggctaattttt

SEQ ID NO: 105745 - DNA, 1065 bp, Homo sapiens
cctcggcctcccagagtgctgggattacaggcgtgagccactgcgcctggcctaatttttgtatttttagtagagacggggttttgccatgttggccaggctggtcttgaactcctgacctcagattatctgcctgtctcagcctcccaaagtgctgagattacaggcgtgagccactgcaccagcccaccctgtctttcttactccttaaagtagggggcaaacatggtggttgttataatccatataaaactataccctggacccccacggtggttgttatggtccatataatactatagcctagagccccattcagtcccttacccaaagtcacaaagttattgaggacccgggcctcctgacccttagtccctcggcttctttggcttaagaaggatgttagggggaggtgtctgtggtgaaacctgcccaggcctccctggccttgttctgggttggtggtcatccttttccctctgccctccagcttgtctttaaccgaactgtcacactgaaggaagacccaggaaaggtgtgagctggaagcactgaacctacctcatcctcctggagggtgtggctaccctcgccaccccaaattccatgtcaataaagaacagctaaattctcctagagtctgtgtgttatctctgcacttctagcatctgaaggccctgaagacatgctggtggtggtggtatgattgggggatggagatgtgccttttgcacattttgtctgtgagaatggactttcccagaacagagtggtactgacagctttgaaagcaccggtgcactttttggtgcttaaaggcaggggcctgggtaggattcataccctccgcacctggtctgagagaatggagggccctggggtgtttgtccatggttaggacccctgtgccagagggatctaaaaggtttgtttctgctggtgtggagaggcctagctcccagtctgatcattcagcatataattttttttttttttttttgatacggagttccactctagcccaggctggagtgcagtggctcaatcttggctcactgcaacctc

SEQ ID NO: 105746 - DNA, 1248 bp, Homo sapiens
cgagccatggctgtgctggagtcactacgggtcatcatcaccaactttcctgctgccaaggtgggcctgcctcaacatgtgtgtcacatgtgtgtgtgtagctgggggtacacttggctctgggcatgggggtcctaatgctgagtatgactcatacctgtctcctgtctcctgctatagtccttggacatccaggtgcccaacttcccagctgatgagaccaaaggcttccatcaggttccctttgcacccattgtcttcattgagaggactgacttcaaggaggtaaattgtgggggtggagggtcccgtttgctgctgagtctggtactgggaacctttcatctcctcatctctgtcagtccatctacttcctgcttcagatgaaccaatctttgccagacacgggggtagggaagcttccccacttgtttgacccttgcagcctcatgtgtctaccccacttcctatctctaggagccagagccaggatttaagcgcctggcttggggccagcctgtgggcctgaggcatacaggctacgtcattgagctgcagcatgttgtcaaggtgagagccagctgcagccttcctactgcagtgcctgctggggccaagatgtgagtatagcctgcagtcctggttgtggttcccgggtctaattgctgctcccctccccccacttccagggccccagtggttgtgtagagagtctggaggtgacctgcagacgggcagatgctggagagaagccaaaggcctttattcactgggtgtcacagcctttgatgtgtgaggttcgcctctatgagcgactgtgagtgaacagagctggggtgggggcaggtacaagatgcacattgcctgctatggctgcccagctgggggtatgaccttcactttggctgcagattccagcacaagaaccctgaagatcctactgaggtgcctggtggatttttaagtgacctgaacctggtaggttcatgaggtttggggtgagggaggtaggcctccctggttggatggttgcctgagttccctgcctgcaggcatcactacacgtggtggatgcagcattagtggactgctctgtggccctggcaaaacccttcgacaagttccagtttgagcgtcttggatatttctccgtggatccagacagccatcagggaaaggtgcttgactttactcacctgccctcatctgcagcagtgacagtggctgccgttcattgtgccaagtgct

SEQ ID NO: 105747 - DNA, 1241 bp, Homo sapiens
caacatggtgaaaccccatctctactaaaaatacaaaagttagctggccatggtggcacacgcttgtagtttcagctactgggaagctgaggcaggagaaacccaggaggtggaggctgcagtgagccaagatggtgcaagataatcaagactccatctcaaaaaaaaagaaaattctgacatgagagtgctctgtgaatatcctagtttgataaacaggattgtggggctgatggatgatgtgggagttcacagatggtgcaactttcctaggccaacaatggcatctgttttctgcgttttgatgacaccaaccctgagaaggaggaagcaaagttcttcacggccatctgtgacatggtagcctggctaggtatggactaggcaaagcctagaagggctggtggttagtgggcctctccttgggccatggcctgcccactgggtgtttgtggctggctgctcatactttgtttcattttgccccaggctacacaccttacaaagtcacatatgcgtctgactattttgaccagctatatgcgtgggctgtggagctcatccgcaggtaaggccagggccatgacgtagagccaggcagactgactaggtcacagccatgctgggcactcacaccgcttccccacaggggtctggcttatgtgtgccaccagcgaggagaggagctcaaaggccataatactctgccttcaccctggagagaccgtcccatggaggagtcactgctgctctttgaggtggggtcctagaggagcatctgggtttgggtgggccaaggtgctgagaatgagatgctcctgtgcttagagacagcctgagtccttgttcccctcaggcaatgcgcaagggcaagttttcagagggcgaggccacactacggatgaagctggtgatggaggatggcaagatggaccctgtagcctatcgagtcaagtatacaccacaccaccgcacaggggacaaatggtgggtgtagaatggggtggggtggtggggctgccgagcagggcgatgggccatggggtagggcagagtagggctggatggtagggcccactgcctatgccccacaggtgcatctatcccacctacgactacacacactgcctctgtgactccatcgagcacatcactcactcactctgcaccaaggaattccaggcccggtgagggagctgggtccatggggtggtagggccagtggaattccagcagccctt

SEQ ID NO: 105748 - DNA, 1201 bp, Homo sapiens
tgggcatggtggctcacacctgtaatcccaacactattgggaggctgaggtgggcagatcacctgaggtcaggagtttgagaacagcctggccaacatggtgaaaccccatctctacaaaaagtacaaaaattagctgggtgtggtggcgggcacatgcagtcccaggtactcagaagggctgaggtaggaaaatcgcttgaatccaggaggcggaggttgcagtgagcggagactgtgccattgcattccagcctgggcaacatgagcaagactccagtctgggcaacaagagcaagagcattttaagctagcagacccacatgagaagagatgggatgggctaggtaggttttttcagtcagtgctggtagataggccaggaagccttgggttggtgggtaggatcagtcaggggctccttgaaagaggatactcctgcctctgcctgattctggtctctgctcaggtcctccaccttctgggccccaagttggaggctgatctggagaagaagttcaaggtagggatgggcatggccctgagtccctgagggtgaggtgaggtatggtgagacttcaggctggggaaggaagtgtctgaccacagggatcccaagaccctatccaagagaaaatttgatgccattttctgaagcacctggggcttctttcaggtggcaaaagctcggctagaagaaacagaccggaggacggcaaaggatgtggtggagaatggtgagaagcttgagactcctgtcacagcattcagctccctgacttctgaacctcctcagaagagtccttacaggctcctcaggcccttggcttactcagtaccctgacttctgtctcaagactgggattcctggtgtttcttttgttccctttgcccagagactggcatgagaggcctcagatgtctggctctagatatcttgtctctggaattgagggaataggggtctactcagttctgttctggctgtaggatatggtaaatgtatctagaggacaagttttccttgttttgttccccacaggcgagactgctgaccagaccctgtctctgatggagcagctccggggggaggcccttaagttccacaagcctggttagtgggcatgtcaaaaccctggggagggctggatcttggcagcagctcctatagtcaggcccctggggtcagaggctttggctgc

SEQ ID NO: 105749 - DNA, 2096 bp, Homo sapiens
ctctacgatggagtctggatgagggatttcctgggcttcatttgttcaactgtttccatgacaactccaaagctgtggcgtcaaaagcgtgacagggactcgcatttgcccccgaggacaattactatattgagatggagttaccagggctgaagtagaaaagtcagagcaaaaccacgcctgtgtcttcctcctgcctcagggacgaacaccttccttccaggtccgtggcaaatatctccaaaagccctgccgcctgccaacaccccttcaagttcccagttccacggaggcggaagcaaagcccccggaaaggccggtttgtccgccctgtgttgtttaaaggggatagacgaccttggagcgccccgccccctcccgccaaggaaggaccccattggctctccccggaggcttcactctcattggtcagcgagtgaatgccgacctgcagactggggcctaagtttcttttagtttccggtgtctctgcaatggcggctctagactccctgtcgctcttcactagcctcggcctgagcgagcagaaggcccgcgagacgctcaagaactcggctctgagcgcgcagctgcgcgaggccgctactcaggtgcgagcccctctgcccccggcctggtttgcagaccatgctgcaacgcagcgcggggcggggtccagatcccgacctgccccgtttgtcccgccctttcctctcactgagcgcggggcttctctcttgacccctctgacctcaggctcagcagaccctgggttccaccattgacaaagctaccgggatcctgttatatggcttggcctcccgactcagggatacccggcgtctctccttccttgtaagctacatagccagtaagaagatccacactgagccccagctaagcggtgagacccctacctgtcctgccagttcgcaccaatgcctcccttcagccaagacccctgtcttccctttttgccaagtcctccagtttctttctagacacctagttctgcacaggcactgaggcatggaaggggtggcctatggtgagactgacacgggaactgtcagggtctgaggggggatccactctcgacacgtgcttctttcttccctgtgttctctagggtggtggtgccagggcttaacttttcaggaggccagactatccttggagtttcatgagattaggaccctgtctgtccacttcttggagcagagatgccacaaactcacgggctctttcttctcagctgcccttgagtatgtgcggagtcaccccttggaccccatcgacactgtggacttcgagcgggaatgtggcgtgggtgtcattgtgaccccagagcagattgaggaggctgtgagtctttccccaggcatcgtctgcctccccagtcctggccatggaaaggagtggctcagtttccctcctcaggaagacccagagtgagggtgtgggttcccagaatatctctaaaggtggctttcctgaaccacatggtttggctttctgcaggtggaggctgctattaacaggcaccggccccagctcctggtggaacgttaccatttcaacatggggctgctgatgggtgagcagggcctggaacggggctatattgttctctctggtcatgccttttcttctgggcacgagtgagaaggaggtgggggaaggaacaggagtgacttaaagtggtctggctgggctcaggctctggttctggtggtcagccaggacctttccttgggaaagaggtggggggagtactcttttttgcctttctgcagctccttgtgcctatgcttctaggagaggctcgggctgtgctgaagtgggcagatggcaaaatgatcaagaatgaagtggacatgcaggtgagcgtgcttcactaagctgaagctggcaaagactctggcatgaacagagcctggaatccactaagggataaaaggcaggaagagggctgggcatggtggctcacgcttctgatcccagcactttgggaggctgaggcaggaggattacttgagcccaggagttcaagaccagcctgagcaacatattgagaactcctctctacagaaaat

SEQ ID NO: 105750 - DNA, 1094 bp, Homo sapiens
atctagaatgcagggtgttagccccagtcaccccaggtgggactgtcatggctaagggtctcagggacactgggtcctccccacccccggggtgctgatggccgtttccacataccctaggcttcccggatttggcaggagctggaggctgaggaggagccggtgcctgaggggtctgggcccctgggtccctgggggccccaagactgggtgggccccctaccacgtggccctaccacaccagatgagggctgcctccggtactttgtcctgggcaccgtggcggctttggtggccctcgtgctcaacgtgttctatcctctggtatcccagagtcgctggagatgagctcgcctgcaggcagctgctgtgagctggcctacctgcctgccccaggccatgcctgcctttgttgtggggaacacctctgggctttgggcctcagcttatgcatctggtgggagagggtggggaggttgtggcccctgcaggggcagagtatcctagggtgtgtatccatctggctgtctgtccattcatcctgctgctctgacccttggcctcaggcttggccctgcccaagctacttcctgtacttaaaagtgttaataaaaccagactattcaggcccaatctcgtctctctgtctcaacgccgctgctgtctgcgcctgccttgggaccctcccttgggtgccagggctccaagccagcacccccgggatgccaggcggcatgctgggcagcccccaacccctgtcctcgtattctgttgcagggactaggccctggccaggcccccgaggtggcccccacgcggacagcccctgaacgcttcgccccccctgtggatcggccagcccccacctacagcaacatggaggaggtggattagcaggtccctggctgatgggggggactgggtttgggacacccacacagagggccagctccttgccgcttctccttctctaacccagaggacactggctctgtcaatgggaagctgaggggtatgatttgggtgtggagacctctcaggttgggacttcttgtcagcttggacccctgaccagtgggctttggcttctccag

SEQ ID NO: 105751 - DNA, 1097 bp, Homo sapiens
cgcctgccaaatgttctcatcgtgcagctcaagcgcttctcctttcgtagttttatctggcgtgacaagatcaatgacttggtggagttccctgttaggtaagcagtggaccttggtaactgtgggtggggtgtgaggaccaggatgggcatcctgagcgcctgttgcctgtctcacccctccctgactggacctgacctgcaggaacctggacctgagcaagttctgcattggtcagaaagaggagcagctgcccagctacgatctatatgctgtcatcaaccactatggaggcatgattggtggccactacactgcctgtgcacgcctgcccaatgatcgtagcagtcagcgcagtgacgtgggtgagggcacacacagccagcaggataggtggtaggggtggtggtgcagactttgttcacactcttcccaccctgctgtaggctggcgcttgtttgatgacagcacagtgacaacggtagacgagagccaggttgtgacgcgttatgcctatgtactcttctaccgccggcggaactctcctgtggagaggccccccagggcaggtcactctgagcaccacccagacctaggccctgcagctgaggctgctgccagccaggtgaggcatgtgggaggctttacagaatactgggggacagttcacagactggggccgggttgggggatatagcttcctctcctccagccacaggcccattgagccttgggattcatgagaattgcagagttctcttaacatcaaagctttagccagaggcatccccatgccttggggacactaacaaacatacaagtacactaacatgctgccactggcaagcacattggcacctacttggcacaggtcaggcaactgctctgaacctcactgggcactatgctgtgaatgaactatacctgacactctcctagatttcctctgcacattccccacatgctggcccacacaccctcacttgtgatgtccctgagttctagtgtgcactcaagacaaggcctatttgggctggccatggcctctggtggctgttatactctttgaggtaagcatctgtctttgctgagccttc

SEQ ID NO: 105752 - DNA, 1008 bp, Homo sapiens
attggctaccccttcctggtcagtgtacctgcctcacgcctcacttatgcccgcctcgctcagttgctagagggctatgcccggtaagtgcccagtggttggactagagtggtgtaggtgggggcagaggtgctagatgggctggtcaggagtcttacttgcgttgttctctgttgccaggtactctgtgagtgtattccagccaccctttcagccaggccgcatggccttggagtctcagagccctggctgcaccacactgctctccacaggttccctggaggctggggacagcgagagagaccccattcagccacctgagctccagctggtgacccctatggctgagggggacacagggcttccccgggtgtgggcagcccctgaccggggtcctgtgcccagcaccagtggaatttcttctgagatgctggccagtgggcccattgaggttggctccttgccagctggcgagagggtgtcccgacccgaaggtaagatccagtgaaaggctctagaagctggggaggaggataagggaggatggagggggctgttgtttagggcctggtgggcctggtgaggccctgatgggcagggaagctttgattatcatgttctcacacagctgctgtgcctgggtaccagcatccaagtgaagctatgaatgcccacacaccccagttcttcatctataaaattgattcatccaaccgagagcagcggctagaggacaaaggtgtctgaggctgtgggtgggagccatggggtgggttgagctggctgttctccacagctgcatgacctctctccctgcgaatctccaggagacaccccactggagctgggtgacgactgtagcctggctctcgtctggcggaacaatgagcgcttgcaggagtttgtgttggtagcctccaaggagctggaatgtgctgaggatccaggctctgccggtgaggctgcccgggccggccacttcaccctggaccagtgcctcaacctctt

SEQ ID NO: 105753 - DNA, 1476 bp, Homo sapiens
cctctcattccccctttttaaggtgcagtgggtggtgcaaaggttgccgtgccgacaggtccaacccctctggattcaaccccaccaggaggtgctccccaccccctgacaggccaggaggaggcccgggctgtggagaaggataaatccaaggcacgatctgaggacacagggctagacagtgtggcaacccgcacacccatggagcatgtaaccccaaagccagagacacacctggcctcggtgagaattctggggtgggaaggacgaagaatggaggctggagagtcttggggctgttctctcatgtcgtctttgctcctgcagcccaagcctacatgcatggtgcctcccatgccccacagcccagttagtggagacagcgtggaggaggaggaagaggaagagaagaaggtgtgtctgccaggcttcactggccttgtcaatttaggcaacacctgcttcatgaacagcgtcattcagtctctgtccaacactcgggaactccgggacttcttccatggtgagggcagggcctggagcctgggttatgggcagagagagtgcctttgttcctcacacctttgctcggctactattcctagaccgctcctttgaggctgagatcaactacaacaacccactagggactggtgggcgtctggccattggctttgccgtgctgcttcgggcgctgtggaagggcacccaccatgccttccagccttccaagttgaaggtgatctgtgaccactgtcacccttggctggagggggcggggagggccagccagctgggtgtgcagtgggtgctagggcttcatgttcacaccttggctcctgtatccaggccattgtggcgagtaaggccagccagttcacaggctatgcacagcatgatgcccaggagttcatggctttcctgctggatgggctgcacgaggacctgaatcgcattcagaacaagccctacacagagaccgtggattcagatgggcggcccgatgaggtcagggttagggacagagggtgggcatgtctcatgagcatcccagcccctggtactctttggttctcaccactctgcctctcaggtggtagctgaggaagcatggcagcggcacaagatgaggaatgactctttcatcgtggacctatttcaggggcagtacaagtcgaagctggtgtgccctgtgtgtgccaaggtgtgatgggctcccctggaaagagaccccctagttcagctcagctattctggtcacattaggttcagaggcatgtgcatcttaaggtgctacagggcaaggtttgggcaaagaagctggcagggaggccttaggattctatttgggctgaagagcccactcagggtaggcttcctgactgagggaaaagtgatgttagagctcaaaggtgttgtagcagggttgtgggcacatggggtgcaagtgtgaggccaattcgtaaagtggctaag

SEQ ID NO: 105754 - DNA, 1039 bp, Homo sapiens
tgtatctttggcagaagaaacctctagggacccaggagctggtgccggggctgcggtgccaggagaatgggcaggaactgtctcccattgccctggagccaggccctgagccccaccgggctaagcaggaggcccggaaccagaagcgggcccagggccgtggtgaggtaggcgcaggggctggccccggggcccaggcagggcccagcgccaagagggctgtgcatctctgcagagggccagagggggacgggtccagggatgaccctggaccccggggtgatgccccacccttcgtggctgacccagccacccaggtgagagctgggcacctgtttgggtgttaggagatggggggaaagggtgtgcactggagtgggagccacctggcagacccagggctgattctttccacaatcttgccattaataggttgaggctgatgaacagctttgcataccaccgctgaactcccaaacctgcctcctgggctcagaggagaatttagcccctttggcaggagagaaagcagtgcctcccgggaatgacccagtctctccagccatggtccggagcagaaaccctgggaaagatgactgtgccaaggaggagatggcagtggcagcagatgctgcaaccttggtggatggtaaaggtgggggtgggcaggcagagccctaggttgggttgcaaagtttgtaggtggatagagagtagcaataggctggaacctgtcctggttggggctgagccatggtctcaatatagagcccgagtcgatggtgaacctggcgtttgtcaagaatgactcgtatgagaagggcccggattcagtggtggtgcacgtgtacgtgaaggagatctgcagggacacctcaagagtacttttccgtgagcaggacttcacgctcatcttccagaccaggtgggtgggtagatgatggggcaaacaatgcctcaggtgggacagtatgtctcatgctcttcctcttgtccttcctcctatcctgctgtgcctctgcagggatggaaacttcct

SEQ ID NO: 105755 - DNA, 1354 bp, Homo sapiens
gccttcctcctccaccttctatttctccagtggtgactaagcagccagtgagagtgaaggaaaagtgagcaccctgctcggagtgccagccctgtgggctggagccgtggctcctctccagattggtggagtagcctggtcccaggccatgacttccttgacctggtgccccctcagtgaggctttcacctgtgtgggactgttatggtgggtatctatgaggcttggccagaagtggttgctgctacttgcattatttattacctcttcagaatatcctgagagtgtccaggggtacttaagagatgagaagatacagctctgtagcattagtgtcctgtgttgctgagccctgggtgtagctaaagagcaagttgttgggtcttggcagtgatcactggcttctttccattaggctgtccgttccttgctggagaatttggccacaaagagttgccaagatagctgggccaggaagaaagcgccgcagccctgacccagacgctgttgccgaccccggggcactctggctgtcgaccaagcggctcaagatgtctggcggggccagtgccacaggcccaaggagagggcccccaggactggaggacaccactagtaagaagaagcagaaggatcgagcaaaccaggagagcaaggatggagatcctaggaaaggtgggagtggcattcccagagtaattgtggccttctctgcctcccatcttattggtatacagattggggtttgggagatgactttcttgttcttctctctgtcctggtttgatgatgagagaagaaggacccatgataacctcagtagagcctcagctttgaagcctgagtacttggctaagatccagaagatggtgctgttggggggcttgccttctttcctttttaaacttttttcttttttttgaacctgttctttttttccttttttttttgagatggagtctcattctgtagcccaggctggagtgcagtggtgcaatattggctcactgcaacgtccacctcctggttcaggtgattgtcctgcctcagcctcccaagtagctgggattacaggtgcatgccaccacgcaaggctaattttttttttttttttgagacaatgtctcactctgtcatccaggctagagtgtagtggcgtcttggctcactgcgggctctgcctcccgggttcaagtgattctgctgcctcagcctcccaagtagcctcagcctcccaagtagctgggattacaggtatgcaccaccacactcagctaatttttgtatttttagtagagacggggtttcaccatgttggccagactggtcacaaactcctgacctcaggtgatcc

SEQ ID NO: 105756 - DNA, 1221 bp, Homo sapiens
tggcaggtacaggagaggatggcaggtgcagagcgggcactgagctctgcaggtgaaagggctcggcagttggatgctctcctggaggctctgaaattgaaacgggcaggaaatagtctggcagcctctacagcagaagaaacggcaggcagtgcccagggtcgtgcccaggaggctgagcaggtgggttgaggcagagccagctggagaaggtaggggtggaagatgggcctccactgagctaccacgctaacctaaccctctacatctgcagctgctacgcggtcctctgggtgatcagtaccagacggtgaaggccctagctgagcgcaaggcccaaggtgtgctggctgcacaggcaagggcagaacaactgcgggatgaggctcgggacctgttgcaagccgctcaggacaagctgcagcggctacagggtaagaaatggggcaccagagacacaagactgcgggaaaccccccctaaactgacacctgcccttcctagaattggaaggcacctatgaggaaaatgagcgggcactggagagtaaggcagcccagttggacgggttggaggccaggatgcgcagcgtgcttcaagccatcaacttgcaggtgcagatctacaacacctgccagtgacccctgcccaaggcctaccccagttcctagcactgccccacatgcatgtctgcctatgcactgaagagctcttggcccggcagggcccccaataaaccagtgtgaacccccactgtgttgtctggactctgatttggggcgggcgggggagtctccaggggaacctcgaggttgcccccagcagaacccatgcaccgctaagccacccgagcaccgcctccttccgctcgggcccgccccggagctgcgggtcgctccgagcccattcccgccggaagtgcgtcaccagcttggcgctccgcctccctcggccttagctagaagtcgaaacaaaacaagccgctaaggcggtggcggcggcgccgggacgggggaggggcgcgccggaaccggaaccgacctgcgccggaaccggaacggagagcgggttgccagggcccgaagagggctggctgcggcggtctcgctcggtgagtggagcaggctgcaactcgctggcttggccgcagcggggaggccgcaacgcgcggccgcggcggcctgttcaaggtcacgggccgtgccagtccctacccctagt

SEQ ID NO: 105757 - DNA, 1020 bp, Homo sapiens
gccaatggcctggttgctgggagaaggatgggggaggcccagatgatttgtacagggcccctagatgacccactgcacctgtccccactcgcccccaggtacttgatatttcctaatcctgtctgccttgagcctggtatctcctacaagctgcatctgaagctggtacggacagggggaagtgcccagcctgagactccctactctggacctggcctgctcattgactcggtgaataatctcctcttgcccacaccaaccaagatggcagggcccgtggtgtgggacttgagggatagcaggggtctgtggcagaagaggcaggcccatggtggtgccagggtgggcaggcttgtggcagtgctaaggcaagtgctctggcaatgcctacgtggtcccaggtctgaactgcgatcttccttgctcactccttcagctggtgctgctgccccgtgtcctggtgctagagatgtttagtgggggtgatgctgctgccctggagcgccaggccacctttgaacgctaccaatgccatgaggagggtctggtgcccagcaagacttctccctctgaggcctgcgcacccctcctcatcagcctgtccaccctcatctacaatggtgccctgcgtgagtgtctgtgatgtgggttgatggggcagaggtggggacccagcctgacttggcccaaccctcctccccacagcatgtcagtgcaaccctcaaggttcactgagttctgagtgcaaccctcatggtggtcagtgcctgtgcaagcctggagtggttgggcgccgctgtgacctctgtgcccctggctactatggctttggccccacaggctgtcaaggtactcttctgccccttgttccctcctatgcttctctctccttcccattactgttctctctcctccttctggacctgctgctggtttcctcaaactaagtcttggaccctctactctcaacctgggtcagttgtagttctcttccatttcctgaccttcccacctagactc

SEQ ID NO: 105758 - DNA, 1678 bp, Homo sapiens
cttgtggccttcctgcagggcctgcgagatgatggcttccaacctaccatcctgcgcagtggtgatgtctatggctatagttcatgcacagctaatcccccaagccagacgaaactgcaagctcgtgcccctaacccaactgccacatcacctccagccagtgctccccgaactgccatgcggttgcctgcaggtcgggccacactgcttcccatgccgctatctggcagactggccaaagcatccacaccagcccttgccaagcatgctaccaccaacctgctgctgagctctctgaagcaatcaagtgccagccatgcccggggtgcagcagtgggcttccccacccacctttatccaggtgtctaccctgccatgcggctctctgttgtccttgaggccctggttccacttaagactcccatgccctgcttgggtgccaagcacaaggcacagtcactgcagctctcacttgcagactctcctctgaaactgcggaaaagttcagggaagggtccggggaaccctcggcccaaagctcccagaaaaaccacaagcaagggccccaagtgtctgactcgcaaaggccctggggctggaccccgacgaggctctgggcaccagagcaaaaccaacagagccactgggtcccccagtgtccggcgaatgaaagggggctctgccctgggcaccaaaacagcccaggccaaggtagctcgaacactggccaaagctgctcgtgcccaagccaaggtggctcgaacacaggccaaggctgctaaggcccgggccaaggccaaggcagcacaggtcaaggctaaggccaaagctaaggcagcacaggtcaaggccaaggccaaagtcatggcagcatgggccaaggccaaggctaaagccaaggcagtacgggccaaggccaaggtggctcggacccagcccaggggcagaggcaggccaaagggatctgctaaggccagaactacaaggaagggccagaaaaaccgccctgagactgttgggcagaagaggaaaagggctgaggaggcaaaagatcttcctcccaagaagagaacacggcttgggccccgatctcctaaggcatggctagggcctggaacagcaaagctgctgaagttccgtgccataaaggtagataggcggtcctcggatgatgaggtgcggcagcgggctcagcggatcctccgcgtgaacctgtcacctgtaatacggctccagccattgctgccatattcagcagtctgattccttcacacggcaatgtttggggaaactaagcccagctgtctgtgtggctagtggcacagtgtgctatgtccgtggactccacaatcttgaggactcccggtgcctctctagggccctggtgaccaccagcctcctttcagaaaccagagtgggtggggtacggtggggtgggtgggcgggaggggtgttttcatggcgcgatgcactgtgacttgttattcaagttgtatgtctactgttccatctatcacgttttatacctttccaccttccagtctccctgcccaccctccatggtcttctgtgtgtgtgtggctgctggcaggccagcttgaagatatagggaaagtggtcccagaaataggcctgcctatttccgggggttgtgggaggaggcagctcctgggcccct

SEQ ID NO: 105759 - DNA, 1242 bp, Homo sapiens
cccgggggcacgtgtgaagggaagtcggaggccgggcaggagcctctgtttccgaagcttctcgaaagcccagaaaacccctcccaagagcccagcctaacctgggtggaagagcccccaggtcaccccaaatatttgcgctggggcgcgtgtgagggtgggaaataggtccctctctcttctacagttcacagctctgggaactacatcccttcaaaaaacattaataaagaactaaagtcatgtgcaaggattgtgcttggagaacggtctctggggaggggaagtgcccaagacacctgaggatccaagaatgtttccaaacaaagagccctagggcatttcctccagggtattctgaagacttcatctgctgcattagagcggtgggaagaaactacacagacgggcctcatggcccgagggacctgcctgatcctggctgatcttttaatgctctggtgcagctggggagctgcctcttgcttctgggaaccctcagtgttgggttgggtattagatgttagttatgattgatgtccacagcttctttaaagaagtctgggagtagttaggtgttctcagtcacctccatctgggctgtactgaggtctgtggccctccaagtcttaggtaggacagtgcataccgctaatgtccccttgactcaccatcctacttgcagcctttggctcccattgtccttaaactttgggatcttggtctggcttcctggtccctggtctgcctggttgcctagagagatgtcattggcacctgctactcatcagctttttagtttctgttgaagaaaagtccgactcttgattaggtctccatgcctctggagctagaaaatgggttgctgagtaccctgtctagagactgaaaacagaacttctggtgggcagggagattcccccaccccactccagctccacacatgaacagcagcagctggagaaacagatgggcatggacagtgggtgtaagtctgggccctttggctaacattcagggttctttgttgctctatcctcgcctgttttttcacctagatcccagatcccacaccaagtatgccttaaccctttctcactttggagccattgcattagctattcccctttttgttccatttccatctaatcatttttcattcatcactcatatcctagctaggtgttgtctctcccaggaatcctttcctgacccattggcaaactgagctgaatgccagca

SEQ ID NO: 105760 - DNA, 1008 bp, Homo sapiens
agtccacatcaaacttaccaatatgagttcagttcactagcagctgagcaacagcaatttgagttaaaattatgattatgaaaactttaacacatcatgtcagaaatagcataaatggttctctgttcttgcctttaaatttatgcaattgattctaagctattttggttgacatttaaaatatctctgggctggtaaggcaaaaatctatattaataaaaacagttgctttattttaaatataattttctggtgtatacaaagataaaatggaaatactacttgctatgttacgttacagcaatatggtttgcacttaaatgtgactctgcattgtacagaaaatagtgaatgctataaatatttttatgtgtgaaatgctatatatttttttcatttaacagggtgaacctagcattttcacaaagtaccagacaaagccccagctgttcggaggagatataaaagatggaggtttatttcctcctcctttgtcagttggaaaatcaaaaggcctcttggaacagtttgaggagaaaaagaaaagggcaaaagacaaatgtgacaggtatgtaaacctttcaaatggatgaaagaactcaccttttctgagtaaaacaagacatagagtgtcagtaattaaataattcaattttagcataatagcatgtattagagttctccagagaaaccaaaccataggacttacacacacatacacacacacacacacacacacagacacacaaacagacacacagagaaagagggagaaagagaaagagggagagagagaattatagattgattttttttttttgacggagtcttgctctgtcgccaggctggagtgcagtggcacaatcttggctcactgcaacctctgcctcccaggttcaagcgattctcctgcctcagcctcctgagtagctgggactacaggcgcctgccaccatgcctggctaatttttgtatttttagtagagacagggttttaccatgttggcc

SEQ ID NO: 105761 - DNA, 1076 bp, Homo sapiens
aggtttttttgttttttttttttgttttttttttttttgagacagggcctcactctgttgcccaggctggtctcaaactcctgggcgcaagttattattctacctcagcctctcaagttgctgggattgcaggttacacaccaccgctcctggctgggcagcagtttattaccctaaagaccttgtttccttgtttttttttcacattgtgtcttgtcatccctgagagccaggacaaccatgtacatttctataccctcccacttatacctttcttggggactggcatatagttggaactcactaaatgcttgggcctgaaaggaaggtaccaaacccaccttaatttggcagtctggcagcctgcctgtcctggggcaggaatgcctgcttttacacaatccctgataaatgacaacccattcatggtttttaacttgcacctgaaatgtcttcagaaaccttccactggaattgtaaagctgaatgttcttatttttaagaccatacaagcatccgaactattgaagaattggctggaaaaatagaatttgaaaacgaattgaaccacatgtgtggtcattgccaagattcacccttcaaagaggaagcctgggccctgctcatggacaagagccctcagaaggccacagatgctgaccctggcagcctcaaacaggcttttgatgatcataatattgttgagactgttctggacttggaagaggactacaatgtgatgacgtcttttaaataccaaattgagtaaggacagttatctaagctttgattccttacagcaggaggctgcccttgagcctgagcagaagcagctacaatggccgtcaggggccacatttctcaaaaggttggcagaacctgaattaccagaccctttttaaatcccagttgtgtccctttttaagctgtgagaccagttttttgaattccattgctttgaaatgtttcctattactgatttttttttttaactttccttgacatcttgaatgtgtttttttgattgatgttcaatatacccagtacccatggtaggtgtgggtcatgggcctctg

SEQ ID NO: 105762 - DNA, 1026 bp, Homo sapiens
ccagcctgggggacaaagcgagacttcatctcaaaaaaataaataaaaaataaaaataaataaataagtaaacaaatgcaggctgggtgaggtggctcatgcccgtattcccagcactttgggaggctgaggcgagtggatcgcctgagcccaggagttcgagaccagcctgggcaacatggctaaaccctgtctctaaaaaagaaaaaaatttaatacagtctgcgatgctcgtgagtcattatggtaaagctgttagtcaatttctccactgatgtagcagtttccaattgtcctttaatcaaagcataaatgacaaggtcaccagtaagtttttgtctttgagattatctaaaactgagtttcccttcaatattttcttgaaagagaatctaattccccaccttttcttcccccccacctgggggctgcaggaaagatatggagagagatttgaaggctgactcaaacatgccactcaacaattctagccaagaggtcacaaaggatctgcttgatatgattggtgagtacagtgggcaagtccatcctgtccttgggaagataggtccttcacatgggtctgagtcagcaaatatctcagatataagaaatgctctcggccaggcacggtggttcatgcctgtaatcccagcactttggaaggccgaggagatcgaatcatgaggtcaggagttcaagaccagtctaaccaatatggtgaaaccccgtctctactaaaaatacaaaaattagccaggcgtggtggtgcacgccggtaatcccagctactcgggaggccgaggcaggagaattgcttgaacccgggaggcagaggttgcagtgagctgagatcttgccactgcactccagcctgggggacagagtgagactcccatctcaaaaaaaaacaaaaaacactctcttctagcttgggtaccatacatagcgagatctgtctcttaaaattttttttaattagctgggcacagtggtgtgtgcccataatcccagctactagggagg

SEQ ID NO: 105763 - DNA, 1044 bp, Homo sapiens
tgggtcctgctatagccagggccaagctccaggaaatcgtggccattcaggggtagtttgcagcctcatttgtaacattattgtgttgtcctgtgcatttccaatgcattacataaagacatggtcgcttttaggagaaatgtctgaaaaactaagaagatgcagaaaggaactgactgcagccattgaccgggcctttgaaggagttagttattcccaggagtgcacaggccagcagaggctggaactgagcgccgcgccgctctccttctcgctgcccgtgcacaggctcctctgcagaagacatcctctggcagcctgctcttctgctgctccttttgctgctgtcccatgtgctcctgagaatgagaaccctgcctttgcaacaaaccatgccccggtaaatgcaaaaccacatgctctgtgccccgagagaaaacctctaaccagcaaggaaaatgtattgatgcattcctccattttggcacctgaaagagagtcttggagaactgcaggagagggggaaaactggagaaaagaaaatttaaggtgattctaattttgatggtttaacagctacaattaaggggattcttgtttctgaaaaagttgttgaagatcctagatttagttcatgacagtgctcttgcctcctcttggcagctctgtgactgcatttggggagttgacagacattcttcagaatctggcctaggaaacagttatattttgtgtatatgttccagttgaggggctagttgtcaatcgttgatgtcaaaaaccagtcatggaaaccactttgcagtacccaaaggggtagtggatgtaaaataaccgggttttaaaaataaccttattttttaagttgcagaaacaaaagtcttaattccatcttaactcctgtgtttgaatctggacactggggcctttgataccctcctttgcccacattagggagaggcttaattgaaggctgggccctacttcctggcttcatctttgcctctgctccccgctcttaccccagatctttttggaccatca

SEQ ID NO: 105764 - DNA, 1267 bp, Homo sapiens
aggccatgatatgtggttcttcctcatgtcgttatggattaaagctgggaagagcctctatcaggctagttggttatttcatcatcctgatgtgatagtgggagctaggtgtgacagagctggctggcattccttcagggaccttcataaatgagaagctcagctctcctcagagttctctgcacaaggctccttccatttcctgctgcctggcaggggcagccatcctcaggtggaagggtctcctctgtgtggatatggcagatccttgagggttttggacagctagagaaaagctggggaaaatgggtgatttttccaagcactgaatggtctttccccctcttgtatttcagactaaagcagcttatgtgctattttaccaacgtcgagatgatgaattttataagacaccttcacttagcagttctggttcctctgatggagggacacgaccaagcagctctcagcagggctttggggatgatgaggcttgcagcatggacaccaactaatgctgactccacgatcctgccaccctgtagcgccagtgtaatcccccaggagaacatctttgacactctgcagactgctagtgttctgtctaaaaaccagacaaggaaatacccttcttttatgagcagaaggaaacaaaaaaaaaaaaagaagaccgtttacctagaagaagctatgtcaagaggctgaattatttttatttttaaacaggtggtgagaaatttctgtgaaacctgtgaagctgaaaagggggtgggatgggggtactcaatggagtatgtctgatggatcccgaagaatggagaggaacacaggcgctgagtatggagcagcctggagacccaccccacctgcagggctgccctgagcgcctggatttctggttctgatgccaatactagtcaccccaagtagtctgctcacagtaacccaaacctcaagtaaactcccctttccctcgctatgtgcactgatatgggtttataattttctgaaagttacccactgaagcccatttctccgttgagtcatcttgtaatttccagctttctccccgctaaggaagatatctagtgttggggatcctggcccctcaacctcctgtggaacccagcagttctgttatatcccctgctaccctagatgaattaagacggttaaatactgtgtggaacttttattagataacacactttttattagataacgcttaaaggaagtcagtacataaaactgcccggtgctgtgtccc

SEQ ID NO: 105765 - DNA, 1017 bp, Homo sapiens
tgcgatcactttcaccagttggacagcaatttagcaagttatatttaagactgagaaggaaaagcacttcaagattttgtcattttatattcagaggctctagaaagtgtactacattccaggtgggagagcctctgtaggccttcatgtcttaatgcagtaagatctctttctccagcagaactgagtgctttgattcccataggcctacgagaagcatgtgagcatgttgcagcctcagaagaagaagaagaccacagtggccctgagagactgcatcgagctcttcaccaccatggagacccttggggagcatgacccctggtacgcagctcctcactgtctgggcagaggccccatgcaccccaggactcagatctgctagggccatctgtgcacataaacccctttgtatttggatgtgtcacttctttatatagctaaccctacaacataatcctctgtgagttgaggtttccaaggaaagccgtcaccccattttggaagacaggtccctggccagaagcagtagtgttgagtgctgaccgagaggatggcagctatcaggggactgcagctgtgcctccatgcatgagtgcccaggtggcactggctgccggcttgccctgctaagtggaggtttctctttttaggtactgtcccaactgtaagaagcatcaacaggccacaaaaaagtttgacctatggtccttgcccaagatcctggtggtccacctcaaacgtttctcctacaacagatactggagggataagctcgacacagtcgtagaattcccaatcaggtgggtcatggtgactacagtgttaggaacatttaaaaacaggcagaaaatcttggcactgattggctgagtggtttgccaccaaaaacttttctgagtaaggatgtgtgttgccggggtctaggaggtcagagtttagctgtagttaccccttctgtccctatcctcccatctttggggaagagactctccagtggaagcatttgcccagaca

SEQ ID NO: 105766 - DNA, 1003 bp, Homo sapiens
tttgatgacaaaagatgaacttggtggctggacccagctgtgtgcctttgtgttcagagtgatgatctgaatgatggctgttatctgtgttgggtcccagttgaaggaccacagagtttgaggccgtggttggaagaaggagtatcacggttagccctcagccccaggttgtataggttcacattgtgctgacaatggtccttctagggattcctgactcaacctctagaaacgtcttggcaatagttatagccaccttttctactcaaatatgctctgtcccagtaatcatagccctggccaccacatagcttcagctcagatctctgttgttcacaaggacctactgctaaaagtgccctcttgtgtgattgacgcaggtacgaggtctgcagcacttccgtggatggctcggaatgtgtcacgcttccagtctacttcagggagaggaagtccaggccatcaagcacttcctccgcatcagcgctatatgggcagccactattgctttctgtccccaagcacaagttaacccttgagtctttgtaccaggctgtttgtgatcgtatcaggttggtggcaggaatgtgatttggttgttatctgagatgaagatatacccagtaatagtagtggcaactcctgccaagtggctgtgttgatcctacatgctcacctctgtaagaaatgcatttgccgggtgcagtggctcatgcctgtactcccagcactttggaaggccaaggcgggcagatcacctgaggtcaggagtttgagaccagcctggccaagatggtgaaatcccgtctctactaaaaatataaaattagccaggcatgctggtgggtgcctgtaatcccagctgctcgggatgctgaggcaggagaatcgcttgattcttgattctcctgggagctagaggctgcagtgagctgagatcgcgccactgcattccagcctgggtgacagagtgagactccatctcaaaaaaaaaaaaaaaaat

SEQ ID NO: 105767 - DNA, 1046 bp, Homo sapiens
gtagtcctggccttgtttgtcctggatcaagctcttggctgtacagattgccacctgattcatctccaggtttgctgtgagtcattctggatgcaggggcaaggggctgagaggtgttgagaatgtcctgtttatccctttgacgcaggtggtggcaaaggaagcctgggagaatcacaggttgaggaatgattctgtgattgtggatactttccatggcctcttcaaatctactttggtttgcccagaatgtgctaaggtttctgtgacctttgacccattttgctatctaacgctgccactgcccttgaagaaagatcgagttatggaggttttcctggttcctgctgaccctcactgcagacctactcaggtgacagaatccacacccttatggcacccctcactgcaagtggtctccagatcccagtgggactgctcctatctgctgcattggctgcctctgagtccccttggtacttgcctgggtatgggcccttggcctccatcagacctttgtctaatcccatatcatttaaggcctattgtgaaggtctttgcagcttctttgcttctctgtcactttttttttttttgagacagagtcgctctgttgcccatgctggagtgaagtggcatgatctcagctcactgtaacgtcttcctcccaggttcaagcgattctcctacctcagccactcagtagccgggattacaggcgtgtaccaccacgctcagctaatttttgtatttttagtagagacatagtagagacaggatgttaccttgttggccagaactcctgacctcaagtaatctgcccatcttggcctcccaaagtgttgggattacaggcgtgagccaccgcacccggcctctgtcacttttttggccacacttcattcacgcgactaaagtaacctgatctactaagtggttcttgaatctgaatgttggggaaccagaagcacggttcttttcgtactcagatataccctcacataacctaggacagcctgtacagaagattaggccagatgagaggt

SEQ ID NO: 105768 - DNA, 1050 bp, Homo sapiens
tgggttcaagtgattctcctgcctcagcctcctgcgtagctgggattacaggtgtgcaccaccatgcccagctaatttttgtatttttagtagagacggggtttcaccatgttggccaggctggtcttgaactcccaacctcaggtgatctgcctgcctcagccttccaaaattctgggatcataggcatgagccaccgtgcctggctggttctccataggatgcatcacaatctctgggagtgcttaatacaacacagactgctagacccatccccagagtttctgattgaataggtttggtgtggggcctgagaatgtgcttttctactaagctcccaggtgatactaatgctgcgactggggaccatactctcagaataactggtggagagtattactggacagacagtatttagggacctgagggctgttatgtacaggaggattcctccagctgatgaaagtattgtttgtaatgtccttatggagtttaagactctgaaccaaagaaggacatgttggagagggattcatgtcagtacttgggtgtggttactcagggtactccacccttcctccttaggacttagggcagtggcccaggttccaggttcatcctcctggctctctgatctaggccttctttctggtgggaaccactggcctcctgtaggctcttcaggagttaattggactactcaaccaagtgttctctctcactgccccagctaactcctcagagctatttttgatggcaattcttttttgatttaactagttctttacgtattatgccttctgatacagttgcttttgttgtagactcaagtaggacgttttgctcctcaattttctggctaccagcaacaagattctcaggagctgctggcctttcttctagatggattgcatgaagatctgaaccgggtaaagaaaaagccctacttggagctgaaggatgccaatgggcggccagatgcggtatgccattaatgatgtctgaatgataatatgccaaagaagctgcctcctattgagagtgcaggga

SEQ ID NO: 105769 - DNA, 1052 bp, Homo sapiens
aaggaaatgtagatccaaagaagtttaaaaataacttatttaaaaatctcagcaaggtttacagtgagctacgatcccaccactgcactgcagcctgggcatcagagcaagatcctgtctcttaaaaaaaaaaacaaatcgcagccagaaaatggtggagctagcttttgaagccatatctgagttaactccaaagataagctttctcgctttctatgttgcttttgcgccataaatgagagacacacgttagcaaagaagcatagggatactttccaggcatatgagtgcaagaggccacccatgggagatgattgattttaagaggtatcagggggttgatccagagcacctgtgagcatctgacaagaaagaggatgagcattagtttgccatggctgtctttagccttgcatgtggacaaagccccaagtgatatttctgcctgttcctagcaaccatcgagaaagagatgcggaagctattcaacatccctgcggagcgtgaaacacggctctggaacaaatacatgagcaacacctacgagcagttgagcaagctagacaacactgtccaggatgctgggctataccagggtcaggtaggagggccctggccattccccagcaggtagctctgcccagggtgtgtggccagatactttttgcttctaagcatgttggaagtgcggtggtttgaactctcctcatttggtttcccctttcactcaggtgctagtaattgagcctcaaaatgaagatggcacatggcccaggcagaccttgcagtcaaagtaagtgaattttttctcccttgttgtaggctcacatgtgcaaaagagacagtctttcctaaggcagtacttgtactaagaaaaattgttctgattcagatgaacaatgcctattttgtatatccagagttcatgcttctggatgaagaccgtggcttttggtagcagggcagcatctaagggaagcctgtcaggatatctcagcaaggtggcgagcctctgctcgtggagaatgagaaaaggaggaagggatatgagg

SEQ ID NO: 105770 - DNA, 1716 bp, Homo sapiens
cggagccctcgagggccccagcccttggaagggtaacctggaccgctgccgcctggttgcctgggccagaccagacatgcctgctgctccttccggcttaggaggagcacgcgtcccgctcgggcgcactctccagccttttcctggctgaggaggggccgagccctccgggtagggcgggggccggatgaggcgggaccctcaggcccggaaaactgcctgtgccacgtgacccgccgccggccagttaaaaggaggcgcctgctggcctccccttacagtgcttgttcggggcgctccgctggcttcttggacaattgcgccatgtgtgctgctcggctagcggcggcggcggcggcggcccagtcggtgtatgccttctcggcgcgcccgctggccggcggggagcctgtgagcctgggctccctgcggggcaaggtactacttatcgagaatgtggcgtccctctgaggcaccacggtccgggactacacccagatgaacgagctgcagcggcgcctcggaccccggggcctggtggtgctcggcttcccgtgcaaccagtttgggcatcaggtgcgccgggcggagcggggcggggcgggggcggacgtgcagtagtggctgggggcgccggcggtgtgctggtgggtgccgtcggctccatgcgcggagagtctggctactctctcgtttcctttctgttgctcgtagctgctgaaattcctctccgcccttgggattgcgcatggagggcaaaatcccggtgactcatagaaaatctcccttgtttgtggttagaacgtttctctcctcctcttgaccccgggttctagctgcccttctctcctgtaggagaacgccaagaacgaagagattctgaattccctcaagtacgtccggcctggtggtgggttcgagcccaacttcatgctcttcgagaagtgcgaggtgaacggtgcgggggcgcaccctctcttcgccttcctgcgggaggccctgccagctcccagcgacgacgccaccgcgcttatgaccgaccccaagctcatcacctggtctccggtgtgtcgcaacgatgttgcctggaactttgagaagttcctggtgggccctgacggtgtgcccctacgcaggtacagccgccgcttccagaccattgacatcgagcctgacatcgaagccctgctgtctcaagggcccagctgtgcctagggcgcccctcctaccccggctgcttggcagttgcagtgctgctgtctcgggggggttttcatctatgagggtgtttcctctaaacctacgagggaggaacacctgatcttacagaaaataccacctcgagatgggtgctggtcctgttgatcccagtctctgccagaccaaggcgagtttccccactaataaagtgccgggtgtcagcagaactgtgtgtatgtcctgtgtcattgtcatttgggaattctttttcttttctttttttttttttttttttgagacggagttttttgctctattgcccaggctggagtgcagtggcgcaatctaggctcactgcaagctccgcctcccgggttcacgccattctcctgcctcaacctcctgagtagctgggactacaggtgcctgccaccacgcccggctaattttttgtatttttagtagagacagggtttcaccgtgttagccaggatggtatcgatctcctgacctcgt

SEQ ID NO: 105771 - DNA, 1131 bp, Homo sapiens
agaaacagttggtaacttttgtgaattaggctgtaactactttataactaacatgtcctgcctattatctgtcagctgcaaggtactctggtgagtcaccacttcagggctttactccgtaacagattttgttggcatagctctggggtgggcagttttttgaaaatgggctcaaccagaaaagcccaagttcatgcagctgtggcagagttacagttctgtggtttcatgttagttaccttatagttactgtgtaattagtgccacttaatgtatgttaccaaaaataaatatatctaccccagactagatgtagtattttttgtataattggatttcctaatactgtcatcctcaaagaaagtgtattggttttttaaaaaagaaagtgtatttggaaataaagtcagatggaaaattcattttttaaattcccgttttgtcactttttctgataaaagatggccatattaccccttttcggccccatgtatctcagtaccccatggagctgggctaagtaaataggaattggtttcacgcctgaggcaattagacactttggaagatggcataacctgtctcacctggacttaagcatctggctctaattcacagtgctcttttctcctcactgtatccaggttccctcccagaggagccaccagttctcatgggtggcactcagtctctcttctctccagctgactaaactttttttctgtaccagttaatttttccaactactaatagaataaaggcagttttctaaacttcctgtatcctgttgtttgtgttgctctctccagggctgggggtaggaggatgcaaggacttcctggcctagctcaccctggagaggtttgttgagtgcaaaggactagcttgtgccccacctcccacccacccagcagctaatctggtccctcccaacaacatggaaatgattaccctgtaccgcattctggttcagatttgggggtagggtgaatgcagcctgaggaggccagggagggaggactccggcagcgtttccttggcctcggcgagctactgggctccacttaaggaggctggggcagagcttccaggactctgcccggttagaaaacccgcacgagggcggtgccg

SEQ ID NO: 105772 - DNA, 1050 bp, Homo sapiens
gagagttgatgaacaagttagaaaaagaacatgtggaccctgggtcagctgctgccctagaatggggaccccttctgtaagctatgtcagaatcatctaccagcagtgacagatgtcctgtaaagtgcctgcctttgtggggcaggaagtgccccccgtgaaactaccttgtgttgtggatcttttgctcctccagagcccttactcgggccccacctacagagatgctcagcaccactcttggctggactgagaaaaagctgttggttctctgtttaaaggaaagggattatatttcctttttatggttttgaaactagtgagtttcattaaatgtctagcatttttctgaagccacaaagaaagtgtctctgcaatttcactgaggttcttggaaagtcttcaagatagaattgtatgtatccccaaattctctacatttttctttcagaaaacatcccagaaaagtggaccccagaagtcaagcatttctgtcccaacgtgcccatcatcctggttgggaataagaaggatcttcggaatgatgagcacacaaggcgggagctagccaagatgaagcaggcatgatctggggcaggactgtcttgtagtattcttgaactagggccccaagtttggaggtttggggagcccagcaggaaccttcacaggccaggttgttttagaggctcagaagcccctctgtggccctctgaccctcattaattgggatcttcacagaagatccctaagatagttcaccagtcctgtgagatggaatgtttttttatgaggtagtgctatgcccataaggactgctggcctgagaatgaaccatttcattagtagctagtaatcagtggctctagatgtaggaactttcttttttttgatatggagtctcattctgtcacccaggctggagtgcagtggcgcaatctcagctcactgcaacctccgcctccggggttcaagcgattcttctgcctcagactcccgagtagctgggactacaggcaccctccaccatgaccggctaatttttttttt

SEQ ID NO: 105773 - DNA, 1041 bp, Homo sapiens
tcccagctacttgggagtctgaggcaggagaattgcttgaacccgggaggctggaggttgcagtgaactgagattgggccagtgcactccagcctgggcgacagagtgagactccgtctcaaaaaaaaaaagaagtggcaagaacagacattcttgtcttgttcctgatcttagggggcagacctttttttcagtcttttaccattaagtataatgttagttacgagtttttaatgtataaccttttggtgccaggtggatcggcgtactagaagtttgaatttgagtatgctaatagaggtttatgccccatggttaccaaagcatgtgtcatcctgtaagctacctatgacttcttgtgcattgcaggtaatatctgtgttttgtgtttcagcaatggctgccatccggaagaaactggtgattgttggtgatggagcctgtggaaagacatgcttgctcatagtcttcagcaaggaccagttcccagaggtgtatgtgcccacagtgtttgagaactatgtggcagatatcgaggtggatggaaagcaggtgagtatacttttcataacaactgatgccattttccatgttagaatatttatggagcatgtagagaattagagctttttgcctcttcagtataccatataacaaaaatgttggaaagaagaatccattctcatcctgccatcttagtccaagtttgttctttttttttttttggagacggagtctcattctgttgcccaggctagagtgcagtggctcggtcttggctcactgcaacctctgcctcccaggttcaagtgattctcctgcctcagcctcccaaatagcagggattacaggcatgttgccaccatgctgagctcatttttcgtttagtagagatggggtttcaccaggctggtctcaaacttctgacctcgggtgatccacccacctcagcctcccaaagtgctgggattacaggagtgagccactgtgcccagccttcccccaggtttaaaggattctcctgcctcagcctccccagta

SEQ ID NO: 105774 - DNA, 1143 bp, Homo sapiens
atcacgaggtctggagaccatcctggctaacacggtgaaaccccgtctctactaaaaatacaaaaaaaattagctgggtgtggtggcgggcgcctgtagtcccagctgctctggaggctgaggcaggggaatggcgtgaacccgagaggcggagcttgccgtgagctgagatcgcgccactgtgctccagccagggcaacagagcgagactccgtctcaaaaaaaaaaaaaaaggatcttaagtattttgtctgactctgccatttagtttattcctttgtttacctgcccaatggaactgtttgcttgtaactacacattaatataactaaattttgaacttaatgttacatgccttgctatacatggggctctttggggacatgctcatttgtgggattaaaatttccaagacggtttgaagtttgtaattactataaaatccctcatctttaatctgtggagctgtagtattaagtgaaggccttggtatgttcataattacgatagtcatgtgactgaaaatcaggcactgaagctgctcgttctgggtgttggtctcagtttattgatgcttcatccaaatacatttttatagctaataataaagaaaaacatcaaatactcttgctaaattgcaatcagtatgcagtttatgccaaacttagcttgattttattttttgaagaggatgagtatgtatatttaagcatatgtgtgtgtgtgtatatgtatatatacttgtgtatacgtatatacgtgtatacgtatatatatgtgtacatatacgtgtatacgtatatatatgtgtacatatacgtgtgtgtatgtgtgtgtgtatatatatatatttttttttttttctcttttgagactgagtctcactctgtcgtccgggccagagtgcagtagcgccatctcggctcactgcaaccgccgcctcctagttcaagtgattcttgtgcctcggcctctggagtagttgggagtaccagcatgcgccactgtgctcagctaatttttgtatttttagtagagacggggtttcaccatgttggtcaggctgttctcgaactcctggccttgtgatctgccccccttggcctctgaaagtgttgagattgcaggtgagagccactatgt

SEQ ID NO: 105775 - DNA, 1603 bp, Homo sapiens
ctctttacaactccattttgctttttacgtttaacgagaaacgacaatcactgtttcatattgattaaagtccagttacactttgggtaggttttcttttaatgcagacttgttggagactgtgtaagtaagtaaaagattgtattgaacgcttaggggtatgatctacggccataccacctggaacgcgcccgaactcgtctgaaagctttggggtctgttttgagtggaaaaggggtattttccatttggaaaaaaaaaacaacacacaaaactgtaaatgatttaagcgatgttgcatgaaaatagatgcaatgttgcttagtcgaagtcgctgtattgattaggaatgatctaaatatctgtaccttagttactgattggatctacagttacgggtcgtcttcattgaatagcgctattcgcatccaagttgatttgttcacaaaccttgtttagtagtttacggtggaaaattggaatcctttttacctcaaagttggttccacttgtgttttttaatagttctgattttaaatttttacctctgttgttgacttgtttggttctgtcttgaagaaagtcttaaacgtttcttgcaggtgtgtaagtagatatttcactctgcctttctgaaggagaaaaattgaaaaaccaaaaaacttccataatttaaaatgttgtatgtggagagaatttttcaaccacttagtatcacccagatgtgtaatgtgtaccatgcggatgattgtcaccttagatgtggctagattggcggagatactgttttgagcatttggcacaagtgacattggactgaaaaactagtttttaattgtaaagaatgacttattgaaggatctctggataacttgtcttaattggttccatctacttttgtggagcactgatggctcttggggacattaaatatataaggtgcaccttggtttgagttaaagtctagtgctagatttatcctctctgttctcataaaaatctgtgttggagggaagaagagagtaggaatactgtgtagttcttgagttttagatctaagaggaatctttcaggactggttgtccaaccccatttgcagatgagcaaactgagtcccagagacttaagtaaatttcccaaggttacctatctagtcaggagcagaccagaactgtctgctctgttaaggtattctccatttactcccaagcagttggcctccagagtcagctaaaattcaggacttctagcttattccattgtttcttcttttaaaccttgttgatggtgaatagtttgggagaaactgttcatttgccaaaaaatttcggttcattagcttacacagcactctccccttgttaactggatggtcctgccttcaattgagggagatagatgaatgtacgagggtccctggttggcctaatcatggctttgtttggatttttttttaagggaccaacttctagagcaaggcctacactttactgcttcaaaaccaagatatttaggtcaggctaagatatttttagttaactgtgggcacttttgactgttgatttggggtactgcgtgtatcaagtaaacaattccctgtgca

SEQ ID NO: 105776 - DNA, 1048 bp, Homo sapiens
cagggaagcgccgccgagctgctatggacttccctggagccaaggtcattgttccccagctgaagggcagggtgcagcggaggcgtgtggggttgatgtgtgagggggcccccatgcgggcacacagtcccatcctgaacatggagggtaccaagattggtaggtggaccagggaagctgggaaacccttgtctcttcccaggagggtgggggcactggcagggtggtgctgatgcgtggcttatgcttgcttgacaggtactgtgactagtggctgcccctccccctctctgaagaagaatgtggcgatgggttatgtgccctgcgagtacagtcgtccagggacaatgctgctggtagaggtgcggcggaagcagcagatggctgtagtcagcaagatgccctttgtgcccacaaactactataccctcaagtgaagctggctcagggtggggctgtcccttccaggagttttgcccctacaaggggttagtcaagaagctgaggcagaactcactgggggtgggcagttaaggtggaggctgattctaattgtctggttgaggggccacaccacctattccccccacctaactcatgccattccagcttccttcaggaccctgcttctgagtgacggaccagctcacacaatgtcttgtttcagtccatgatcccactgacctactcttgcctgctggagggtaatgagaagctttggttctgccatctctcccactctgccaggtgctggctgtggagcaaaggctcacctttgtggagaggataaaacctgcccaacctacctcaccatggtttttcacattgcaaagggtaataacatgggcagtgcggacttaggctaccccctccagtttgctttccgtaaatgcaaattgtccttactgcaagtcaggaatgattgctgactcacagtagggctgctatgcctgtgtgtaaacttggggatggctgagggaacatagactcactcttccacattcccaagttggtctagtgtgctgcccagtagcaaaccatggcagac

SEQ ID NO: 105777 - DNA, 1049 bp, Homo sapiens
caggaggtgctccgcaggacaccgctctatgacttccacctggcccacggcgggaaaatggtggcgtttgcgggttggagtctgccagtgcagtaccgggacagtcacactgactcgcacctgcacacacgccagcactgctcgctctttgacgtgtctcatatgctgcaggtgagccaggggagcacactggccatctgatcaggccttcctccctgtttacagtggtccactccttggctttgtttgctgtgaactggattccaaggacagccttctcagaagagctagaggtcatgggggtgtcatggataggtcaatggccccaaggaaatgagctcagagggtctcatcatctcatccttctagcttgcccccattaaatggtgtgccttaatgtcccgggttttccagggctgacacccactctcatgtattgggctggatgttggtttgaaaaggggttatttcaggaaggtgctaggtcctgtccagttccctggcagtccccccacacagagtgactgggggaggtcaggaaatcagaaggtggtcctttgccacgtgtagaaccaaaagactggttagtcactttgggtgggctggactgcactgtggatggcagggaggatgcatccttgcttagtagccttttggattgtagctgttgcaatggcctgaggctttcaatctcttccccagaccaagatacttggtagtgaccgggtgaagctgatggagagtctagtggttggagacattgcagagctaagaccaaaccaggtgggcccttttatttctgctctatgagttttcttagtcatgagccagcaaatgggctgagtccctacctcaggcttaggggcacagagatgagtcaaacacagcttctcagggcttgcagtcttggacagaatccctgagtcatttccagagacacagacatttgtagggaggggaatatcccagtcttactacatcaggctaggaggccagaaaccaaggttaatatgctgctctctggccatcccttctgcttaacccctctc

SEQ ID NO: 105778 - DNA, 1057 bp, Homo sapiens
agggcactgctggggagagacccatggccactgacccctccttctggagcagggtctcccagaccccagcagggtatcctccgaggtgcagcagatgtgggcactgacagagatgatccgggccagtcacacctccgcaaggatcggccgctttgatgtaagtaatcgcttccttctgcttggcttgctttgccctgagcagatcagacctgatggtcttttgtatttcaggtggatggctgttatgacctgaacttgctctcctacacttgaatggttgctcctagccaagatgttggcctttctgtgcccacccagacttggtttgggccaccagaggctgaagtgtatttcctgtgcattccaagtgttgcctgcatgcctgttctgtctgggccacattcacagattcaggattctcaggggcttaccgtgttacttcagcatgagctcctggcatgggggtgctctgtcttcgcctggctgcaactcaattcttccttctacccaaaaacactccagtcagttgtacttactgagaatccctgagtgccctctgccccttctggcaacatgcacattcctgtcttctgcctgctccctcatgtcagtgcagttgggctgggctgacctactaaaacctgctccatgtatggacctggaaggccattgctgccatggcacttgggacacttgaggaagaaacagaaaccttatttcttcctgtgtgtcccctagtggttttctttccatttgtgttatgccacagagagaaatttcctgtctgaactcttctgctgcctgcctaggaaggaaacctgaagatttgggcagcctgagtctcttggtttctgagctggctcctgaatatatgttcaagtgggtgtgcccatagggcctgggcacgtgtctctagcaaaaccagggcctgagcataagaactgggacccttctaggcagggtgcagtggctcacgcctgtaatcccagcactttgggaggcccaggcaggcggatcacctgaggtcaggagttcaagaccagcctgaccaacctgg

SEQ ID NO: 105779 - DNA, 1012 bp, Homo sapiens
gttctcatggcttagaaataccccttgatttgcattcgaaggaaataaggagggctgaacgcagtcgacgggtggccagttgctgggccagttcgcagtcctgactgtcccttgattagtcttagaggcccaaaggcctgaagttgggcggggagcccctcccccacactactggttctgaaggctccgagtgaccgggaccgaccgccggggtgtgtcccgggacggacttccctggccgtgggggcgaggcttccataatggggcgtgacttttagggcgggggagtggctagccaatgagcagagaggtgctggccggggcggggcttgcgcgcgggtgcggcgcgctgcggagcggccgacgcaggcagaagccggcggcgcgcggacagccagtcggcgccgcgcggagctggccgctggattggctgcaacactcgcgtgtcaggcggttgctaggctccggccgcgcgccccgcccttgcgctcagcgccctctcaccgcccggtacgtgctcgcgcgaaggctgcggcgcggcgctcgcgcctcttaggcttggcggtggcggcggcggcagcttcgcgccgaatccccggggagcggcggtggcggcgtcctggggccaggaggagcgaacacctgccgcggtcctcccgccggcgctgggtgagtgcaccgcccgccctatccgctgtgcctggctgcttgggcccccatccctgctgccggctgagccttccgcggaacacctgctgctgctcgctgttcggcccggggcggggacacggccgcggacgtccttgtgggtgaggaggcggtgccgcccgggcggagccgcccctttgctctgggtcccgcaggcaaaggctcggagcgttcggctgcaaggcccgggccgcgcgccgcggcgatgggccaggccttagctcggcccgcgctcccgggaacgtggagcctgcgccttggccgcggtcgtgagccgcctgcgggccgcctccctggcttccaa

SEQ ID NO: 105780 - DNA, 1063 bp, Homo sapiens
tctgcccgctaagcgtgctcacatagtagcctgaggagagagggaattcctgagctgtggttttcagggccagcaggaattagtgggggacatcaaggcctggacacagggaaccacatgtacatgagcacctaaaatagtgcttgggagtcctccagcttggcaggtgcgagctctgggcctgccttgtgctcaggagttccaactttgtatgcggggtgcaggagtctggggagccttttaatcagtagagtggtgtgacccagacctgtgtttagaaagatattgctggtggagtggcaggaagagggagggggtcaggacctctggcagttaagtcagctaacagaggagaggtggggagggagaaggagccatcagaaaagagagactgaaaaggtagtacagaggggatgtcctgccatgatgggggaggagctacattctggaatgcatgggccagaagaccaagcataaccaaggatttaaattccttgttgactacctggtatagtgacctacagagttgcttgtgtctggttagtgttgaggatggtgggatttggagggaccacttagggaccacttagactgccgtcgatgcataggaaaggaggcctggcatttgattattaaaaactttatcgccgggcatggtggctcccacctgtaatcccagcagtttgggaggccgaggcgggcggatcacgaggtcaggagatcgagatcatcctggctaacacggtgaaaccccctctctactaaaaatacaaaaaattagccgggcgtggtggtgggcacctgtagtcccagctactcaggaggctgaggcaggagaatggcgtgaacccgggaggcggagcttgcagtgagttgagatagagccactgcactccagcctgggccacagatcgagactccgtctcaaaaacaaaacaaaaaacaactttatctccaggcagggcgtggtggctcacgcctgtaatcccagcactttgggattctgaggcaggtggattacctgaggtcaggagttcaggaccagcctggccgacatggtgaa

SEQ ID NO: 105781 - DNA, 1777 bp, Homo sapiens
acttaatttagccttaaggaatagggttctctgttttccaatttcttaggtttgatagctaagcattttctttttcttttttttttttttgagacggagtctgctctgtcacccaggctggagtgtggagtgcagtggtgcgatcctggctcactgtaagctccgcctcctgggttcatgacattctcctgcctcggcctcccgagtagctgggactacaggtgcccgccaccacacctggctaatatatgtatatatatattttttgtatttttagtagagacggggtttcactgtgttaggatggtcttgatctcctgacctcatgatctgcccaccttggcctcccaaggtgctgggattacaggcatgagccactgcacccggccatagctaagcattttcttagttttactcagggtccagggtagaaagatggatgagatgcattagtagaagatcataaactgagggtgtcaaagttggtgaagctggtctgtgttctgtgttgaagtggttaaatctgaacgaactttagcagtatgttgacttaatttatatttatgttttaaaagcaggattctactggaacaatcagctgcatatttaaaaaattacttttatgaccaaatgtcttttatcttgcttgtcatgagatacatttaatggtgttgaggttttgggctgggcgcagtggctcacacctgtaatcccagtactttgggaggccgagccgtgtggatcacctgagctcaggagttcgagaccagcccgtccaacatggtgaaaccccttctttactaaaaaatacaaaaattagctgggcgtggtggcgcacacctgtaatccaagctgcttggtaggctgaggcaggaaaattgcctgaacctgggaggtggaggttgcagtgagccaagtttgaggttttgcagtgttgaggtttttcttctcagttatacctttttgagctaatcgttttaaaaaataccactgtctaaaatacactgaaattaattttactatttataatttttggttctggattgactgtacagaaaatgtttcattttcttactgtgacctttgacaaagaagggtgagtaatttgtggtgtgggcaggagactcagtggcattccccacttcctctggagttggtcagtgtggtataattctatttcagttgtgggcattcaccaatattgtttcctccttttcctgcagggccactgctctccaggaagataaggcttttaaagcagcctagcactagaaggtgaggtaaggtacttgaaaagagacatttctgcaaaagaaagttgaggaataatcacatactggccaaaatgataaccacagaattatatttatttatttttatttatttttttgagacaaagtcttgctctgtcacccaggctggagtgcaatggtgtgatcttggctcactgcaacctttgcctcccgggttcaagcaattctcctgcctcagcctcccaagtagctgggattacaggcatgtgcccccgcgcccagctaattttgtatttttagtagagacggggtttctccatgttggtcgggctggtctcgaactcccgacgtcaggtgatctgcccgcctcggcctcccaaagtgctgggattacaggggtgagccaccgctgcccagcttattcgtttttgagacaggatctctgtctgtcacccatgctggagtgcagtggcatgattacagctcactgcagaccttgacctcctaggctcaagccatcctcc

SEQ ID NO: 105782 - DNA, 1024 bp, Homo sapiens
gggaggctgaggcgggcggatcacaaggtcaggagatggagaccgtcctggctaacatggtgaaaccccgtctctactaaaaatacaaaaaaaaaaaaaattagccgggcgtagtgttaggcgcctgtagtcccagctactctggaggccgaggcaggagaatggcgtgaacctggaaggcagagcttgcagtgagctgagatagtgccattgcactccagcctgggcgacagagtgagactctgcctcaaaaaaaaaaaaaaaaaaaagtgaattgtgatttacagttttgtagaagcacatttatcaatgtcaagtaaggcagatttgtactgatttttatttttaagtattgtgcacgttttctgtagtcccttttctgtgacttgcatggatttgtgatttttatagccatgtggagacctagtctcagtgttccctgcccttggggacatgaggagccacagattcattcttgctgaggcagtcatggcccttggataccctaagtataggggagtgtgccagttgtggggagctcaaggatgaatgaagcacttggaaggatatgtcgtattcagggaaacagtagccagtgcccagcttgattccctgttttggcatttactcttcatttctatagatgttgtttttgtatatgaggtatgagaatctacaaacaagcacctcttatagagttctttctcctaatcggtacacagttttctgtatctataggttccacatctgtggattcctccaactatggattgaaaatatttgggaaaaaaggatggttgcgtccgtatgaaacatgaataaacttttatcatcgtcatcatttcctaaatgttagaacaactattttcataccatttacattgtattatgtgttataagtaatccagggatgtttaaagtatacaggaagatgtttaagggatccagggctgtgcaggacgtgccttgttaacaaaatgtttacaagcagtatacttggtaaaagtcatcgctattctctagt

SEQ ID NO: 105783 - DNA, 1041 bp, Homo sapiens
accaagcaggtactcagcagatgcccacagagtacaggaaaggaaattccactaaatcccctaaataattccccaagcagccaagcgccggtggctcacacctgtaatcccagcactttgggaggctgaggcgggtggatcacaaggtcaagagatcgagaccatcctggctaacatggtgaaaccccgtctctactaaaaatacaaaaattagctgggcgtggtggcaggcacctgtagtcccagctactcgggaagctgaggcaggagaatcgtttgaacctgtgaggcggaggttgcagtgagccaagatcacgccactgcactccagcctggatgacagtgcaagactctgtctccaaaaaaaaaaaaataataataataattcaccaagcataaaggcaatgatcacttgatttcacactttgaagttcaatgctgagctttctggtattttttccattacactacgaaagattaaaaataagtgccatagctcaaaattaatatgctaatctagcaatgatgaattaaatttagaaaaagtgtgctggctggtggcctttctgacctaattggccaattagactccaaaacagaggagtgaggcgaaatgtcagggaagctccaggcaacccagcccttgaccctgccagcagcccctgtaataaaggcctgggaccctaagcacaatgcctcaggagccaaacaggtatgtgggaattctggcatattcactgcagaatatttatctaggcaaatgcttcaatcttcagtgtttaaagtggtgacttgcttttagccacattcttgtttttggctacattcttaatgctcaaccatcaaaaatatttcacccatgccaggaactgccatatcaacacactgtgtttataaaagaacaagacaaaactaccacccactccctttgctcaggttttccttcctgctaacagaattccttccctcccacagatggttctaattggcccttttacctgcttcagccttgccacagctacaaattctaaaaaatcacaa

SEQ ID NO: 105784 - DNA, 1348 bp, Homo sapiens
gattttaccatgttggccaggctggtttcaaactccttacctcaagtcatccacccaccctagtctcccaagatgccaggatcataggcgtgagccacggtgcccgtcttgtttaatacatttctttattatttattctttgttaatacttattgtttacttaatatattttattgaatgtatctgactgtattcaaaatattactaatacatatcatttcagtttgcaatcaatattttaaaagtattaatgaggcattttacattcattttttatgaagttttcaaaatccagtgtatattttatatttaatggatcagctacatttccagtgctaaggagttgcacgaaactgttggtttctgtataagagaccatgggggtaagaggcttgatccaactcggggtagatgtttttgacagtaactcctggaggatagtatgtgactgaaccactggaattgctcaagtctaaacctgcttttctttttttttcaggctctgtgtgctccgggatggagcaggtgtgcagagggtgagaacccagctctgggaccaagtcacttgcttccttacttagcaagactatcgacttgagcaaacttggacctgggatgaggatgtctgtgggcctctcgctgctgctgcccctctcggggaggacctttctcctcctgctctctgtggttatggctcagtcccactggcccagtgaaccctcagaggctgtcagggactgggaaaaccagcttgaggcatccatgcactcagtgctctcagacctccacgaggctgttcccacagtggttggcattcctgatggcacggctgtcgtcgggcgctcatttcgagtgaccattccaacagatttgattgcctccagtggagatatcatcaaggtgagactggatataaagcataaatgaggaagagttctcattttccattttagttttggtggcttttccttttcaagtctaagcttcaccaattctgagctcagttcttccagtacccccttagaagagggacagccactgatgttcataagagaatccctatatactcagaatagcatcctaaactgtattcttgttcctattctgagggcatcaccatgtaatagcctttactctggaagttctactgaacactgatttagggatttgttggaaaggtctgtcacgtgtatagggaaaggttacctttaataaaacacagagttaaaccccaaaaaataggacttttatgctttgaacttactttttaaaataagatataaataaatataggagttctgctctgatttgctgatgtatgttggctaatgtaattgatcacttaaga

SEQ ID NO: 105785 - DNA, 1037 bp, Homo sapiens
gtctctggggcaaccgtatttctgaagatcttggcccatgtagcagctcacatgtagcagttcacagagctcttcctagtttgcagagtgtttgcataaagtttccttgtcatctttgtaatatcccagcaagctagatgctaatctgaccattagatacagagtggtggctctggaaggtacatttcttgctcagcttcagatttaatcctgaatatccataccctgcattggttgcctttgttccagtagccattggaatgttttacgtggattaatcttggccagaagtgccttgaactgatacagcaaactagatatttgttgtatttggcagagagatgtttaacaggcttatttaccaagggggtgaagagattttactgagaaaacaggattttatctgagcatatttatctgtggaaagcagaccatttagtagctgatgagcttgtagaaaaacagatgaagatgtgtgactcttcgttccagtcttaaccaccgggattatatgggttggggagtcagaaggtcagaaagcctgatcttgttcctagagctttggtttctgcatctgtaaagcaggatttagaaagtctttatattaaaggaatttttttcttattataataatgatgcataaatgtacattgtggaaaatatagaaagggaaaaaaaatctgtggtttctaccattcagagtgaagtcctctaccgttttctatgctcatcaagagatggtcatgccacatacacacacagacgtcttaacatattagacagacctaggatcatagtggatatattttttaaccttttttttttgagacagagtctcactttgttgcccaggctggagtgcagtggcacagtcccggctcactgcaacctccacctcccgggttcaaatgattctcctgcctccatctcccgagtagctgggactacaggcatgcgctaccacacctggctaatttttgtgtttttttggggggatggagtttcgctcttgtcgcccaggatggagtacaatggcg

SEQ ID NO: 105786 - DNA, 1856 bp, Homo sapiens
caggtaaataaactcagttgtgtctctctaggggggaggaatcagcttccccagcaggcattctgaattataccttaaacctgtcacacaattcaggttaactgttgtgatcatattcaggttatgcagtgacaatagtatttttaatttatgcttgtgtctcttctaggtatcagcggcagggaaggaggctttgccatcttggctgcactgggactcacagagccacaccctggagggcctcccccttgacactgataagggtgtgcattacatttcagtgagcgctacacggctgggggccaacgggagccacatcccccagacctccagtgtgttctccatcgaggtctaccctgaagaccacagtgagctgcagtcggtgaggacagcctccccagaccctggtgaggtggtatcatctgcctgtgctgcggatgaacctgtgactgttttgacggtgattttggatgccgacctcaccaagatgaccccaaagcaaaggattgacctcctgcacaggatgcggagcttctcagaagtagagcttcacaacatgaaattagtgccggtggtgaataacagactatttgacatgtcggccttcatggctggcccgggaaatgcaaaaaaggtggtggagaatggggcccttctctcctggaagctgggctgctccctgaaccagaacagtgtgcctgacattcatggtgtagaggcccctgccagggagggcgcaatgtctgctcagcttggctaccctgtggtgggttggcacatcgccaataagaagccccctcttcccaaacgcgtccggaggcagatccatgctacacccacacctgtcactgccattgggcccccaaccacggctatccaggagcccccatccaggatcgtgccaacccccacatctccagccattgctcctccaacagagaccatggctcctccagtcagggatcctgttcctgggaaacccacggtcaccatccggactcgaggcgccattattcaaaccccaaccctaggccccatccagcctactcgggtgtcagaagctggcaccacagttcctggccagattcgcccaacgatgaccattcctggctatgtggagcctactgcagttgctacccctcccacaaccaccaccaagaagccacgagtatccacaccaaaaccagcaacgccttcaactgactccaccaccaccacgactcgcaggccaaccaagaaaccacggacaccccggccagtgccccgggtcaccaccaaagtttccatcaccagattggaaactgcctcaccgcctactcgtattcgcaccaccaccagtggagtgccccgtggcggagaacccaaccagcgcccagagctcaagaaccatattgacagggtagatgcctgggttggcacctactttgaggtgaagatcccgtcagacactttctatgaccatgaggacaccaccactgacaagctgaagctgaccctgaaactgcgggagcagcagctggtgggcgagaagtcctgggtacagttcaacagcaacagccagctcatgtatggccttcccgacagcagccacgtgggcaaacacgagtatttcatgcatgccacagacaaggggggcctgtcggctgtggatgccttcgagatccacgtccacaggcgcccccaaggggatagggctcctgcaaggttcaaggccaagtttgtgggtgacccggcactggtgttgaatgacatccacaagaagattgccttggtaaagaaactggccttcgcctttggagaccgaaactgtagcaccatcaccctgcagaatatcacccggggctccatcgtggtgg

SEQ ID NO: 105787 - DNA, 3512 bp, Homo sapiens
gaccaacaacacactgcccttggagccctgccccaaggagcagatcgctgggctgagccgccggatcgctgaggatgatggaaaacctcggcctgccttctccaacgccctagagcctgactttaaggccacaagcatcactgtgacgggctctggcagttgtcggcacctacagtttatccctgtggtaccacccaggagagtgccctcagaggcgccgcccacagaagtgcctgacagggaccctgagaagagcagtgaggatgatgtctacctgcacacagtcattccggccgtggtggtcgcagccatcctgctcattgctggcatcattgccatgatctgctaccgcaagaagcggaagggcaagcttacccttgaggaccaggccaccttcatcaagaagggggtgcctatcatctttgcagacgaactggacgactccaagcccccaccctcctccagcatgccactcattctgcaggaggagaaggctcccctaccccctcctgagtaccccaaccagagtgtgcccgagaccactcctctgaaccaggacaccatgggagagtacacgcccctgcgggatgaggatcccaatgcgcctccctaccagcccccaccgcccttcacagcacccatggagggcaagggctcccgtcccaagaacatgaccccataccggtcacctcctccctatgtcccaccttaacccgcaagcgcctgggtggaggcagggtagggcaggggcctggagacgacatggtgttgtctgtggagaccggtggcctgcagaccattgcccaccgggagccgacacctgacctagcacacactgacacaggggcctggacaagcccgccctctctggtcctcccaaaccccaaagcagctggagagactttggggacttttttatttttattttttgcctaacagcttttggtttgttcatagagaattcttcgcttcatttttgatggctggctctgaaagcaccatgtggagtggaggtggagggagcgaggaaccatgaatgaactcgcaggcagtgccgggcggccccctggctctctgcgttttgcctttaacactaactgtactgttttttctattcacgtgtgtctagctgcaggatgtaacatggaaaacagtaactaaagattaaattcaaaggactttcagaagttaaggttaagtttttacgtttaatctgctgtttacctaaacttgtatgtataatttttgggtgggtatggggaattgctttgctaaaaataagctcccagggtgtttcaaacttagagaagaccaagggacagtattttttatcaaaggaatactattttttcacactacgtcaacttggttgctctgataccccagagcctgattgggggcctcccggccctggctcacgccaagtccctggtgctgggtttgctctcccgctgttgccaggggctggaagctggaggggtctcttgggccatggacatccccacttccagcccatgtacactagtggcccacgaccaaggggtcttcatttccatgaaaaagggactccaagaggcagtggtggctgtggcccccaactttggtgctccagggtgggccagctgcttgtgggggcacctgggaggtcaaaggtctccaccacatcaacctattttgttttaccctttttctgtgcattgtttttttttttcctcctaaaaggaatatcacggttttttgaaacactcagtgggggacattttggtgaagatgcaatatttttatgtcatgtgatgctctttcctcacttgaccttggccgctttgtcctaacagtccacagtcctgccccgacccaccccatcccttttctctggcactccagtcccaggccttgggcctgaactactggaaaaggtctggcggctggggaggagtgccagcaatagttcataataaaaatctgttagctctcaaagctaattttttactaaagtttttatacagcctcaaattgttttattaaaaaaaagatttaaaatggtgatgcttacagcagtttgtacgagctcttaagtgttgattccatggaactgacggctttgcttgttttgattcttttccccctacttttcctaatggtttaaattctggaattacactggggttcttttgccttttttagcagaacatccgtccgtccatctgcatctctgtcccatgactcaggggcgcccactctgcttcgattctcctcctgtggaagaaaccattttgagcatgacttttcttgatgtctgaagcgttattttgggtactttttagggaggaatgcctttcgcaataatgtatccattccctgattgagggtgggtgggtggacccaggctccctttgcacacagagcagctacttctaagccatatcgactgttttgcagaggatttgtgtgtgctgcctcaggaggggagggctggtaggagggggggagaggtctctgtcctactgctctccagagggcatttccccttgcgccttctcccacagggcccagcccctctcccctgccccagtccccagggggtactctggagtgagcagtgcccctgtgggggagcctgtaaatgcgggctcagtggaccactggtgactgggctcatgcctccaagtcagagtttccctggtgccccagagacaggagcacaagtgggatctgacctggtgagattatttctgatgacctcatcaaaaaataaacaattcccaatgttccaggtgagggctttgaaaggccttccaaacagctccgtcgcccctagcaactccaccattgggcactgccatgcagagacgtggctggcccagaatggcctgttgccatagcaactggaggcgatggggcagtgaacagaataacaacagcaacaatgcctttgcaggcagcctgctcccctgagcgctgggctggtgatggtcgttggactctgtgagatggagagccaatctcacattcaagtgttcaccaaccactgatgtgtttttatttccttctatatgattttaagatgtgttttctgcattctgtaaagaaacatatcaaactaaataaaagcagtgtctttattacaacgccgttgcatctgggcatctgtttccctggcatctggagaggttcctggacatgaggggttgggggctcatgtgacggggaagaggagactcagccaggtccacttggggttggcccagtggcctccatgtaagccttaccatttctgtgctgggagggctgggtgtgcactccagaaactctgccaacatgtaatgcccccttcacccctcttctgcctgtgaatcagctaagacaagtctcctacatcctcagttcctcctctgtaaggggtgggggatagcagagaaaccagtgagactggctgggaaggaggatggtgggaaagtgtcacgggttttctgccccagagtgtgtcagcccctgtacctcctgggtagggt

SEQ ID NO: 105788 - DNA, 1007 bp, Homo sapiens
tgttctaagatgctgctgaacagattggcccattgatggggaaaaagccctgtgaatgtgcttctgggcattcaggaaagagcattagcacaaagacatatttgctttcagtaagattttgaatttcggggcagtcagaaacctcatagaggtgggtagaaggccaggtaaaagggagatgattctgggggagttaaatgctattgccatattaccttgtcatcccaggctgaattagtcttttcatcctcatactgagctgagttggactctgtgagggggtggctccagcatttgctgctgaagagcctgacttgaatcccatgagtagcagtgctgccacacccatagtggtgcctcttagcccgtcgggatgatgtggagctttgggcattggagagtccctcaaggaagggctctctgcttctggtgtcagggtggccatgtacaattatataatctgtgccttttccaaggagtgctggtttgggagaaagctgaactctaacccaggctccactctccaagctgtgtgccctggtgtaggctgcatcctcttagatgaaggggcatcattcactcgttaattcatttacttatttatggagatatgcctaatgtacagtggaacacacatattgatgggattttatttatacatacactcgtgacacactaccagatcaagacagaactttatcagtaccccagaaagtactttttaaaataattacacgaaggagccatgtagaccagtggcagcctgtctagtttacaccagctctgtggacttgcacctgtcagttttttttttttttttttttgagttggagtctcgctctgtcgcccaggctggagtgcagtggcacgatctccgctcactgcaagctccaccttctgggttcacgccattctcctgcctcagcctcccgagtagctgggactgcaggcgcccaccaccgcacccagctaattttttgtacttttagtagagatgggatttcacc

SEQ ID NO: 105789 - DNA, 1038 bp, Homo sapiens
ggcaacagagtgagactccatctcaaaataattaaataaataaataaaaataaaacaccctccgggtactctgtgtcaaatcacccagcttattttctccatagtgcttattctttcccaaagtgtctactgatttgttgtttacaaggtgtcttctgtgccccaaagcagcccatgagctctcgttgatagggtgttctcagggctgcacacaacatgtggtacagagcagggctcatcccagaggggcttgcttcattcatcctggcaatttggtcatgcaggtcatagctcaacaaggtggaagccccgagatttggtgcctcaatgaagagtctcctcctcatcaaccagagctgaggctggaggccaaggttgttctctgtctgtggttgcagccagaggttctaaatgcaccctattggccacccagtcatcaccaggggaaggtgccgtctcatctctggggcagaaggccccttttatttacccacacgtggctccagccctgctctctgccttgaggccccagggctactgctacaggttgacttgccagttgggggacctgggctcaggtgccttatcccagcaacccaagggcagcagccaagaagagggagaacactgcactttggcaagcacccccttgtgccaagcaccacatagggcatgttcacaggcattctctcattttgtcctcacaggagagaaaaccaagatctgagatgttttagcaatgtgttctcaatggttccctggctaggaagtgttgctgctggcaagatcagccctgacagctctgcgtagctcctaaaccacagcctggacagcctggagcctggtgccttctgtagtcctgcctcttccaaaggccaagtcaggctctagaagtcagcactgcaaaccctggcagagccccccaaaggccaatcccagttctagaaactctaagaacagtgatgccgaggcagtgaggtgagaagccatcccactagctgggaacaattaacccacccaaatgctttttaagaagca

SEQ ID NO: 105790 - DNA, 1084 bp, Homo sapiens
ttgtgcacaaagaagggacagacccgtggagcccccctcatagctcccacagccctgttagacctcctgggactccacctgaggccacagtcaaccatctgggccagtgggttgggaattttccccataggttggaaattttcctgaacatttctgagctgtagaaatctttcttctttctagattgggagttcagagcacacaatagaggagagagtagaattggatcctttttccttttgaactttcctctgaaaaaaaataaccatagtgctatttagtgagtcatttcataattaagagttgttgattccagttttttttacctatttgtcttttggaaggataatagtactctctggcttaatttttaattgacgttcagttcaaaatagagtttgtgaagaaattagttgaattggaattgtgacagtaacattaccagtctcttattatatcatcattgccaaaattccagctgtgcccttgagaagtcgggcctccctgggcaaagtcccttgcacctgtgatacatggggctgggcttgctcattggggtaggggttgcagcaggggcatcaggccagaggtcctgttgcctcccatgtagaatagggaccacaatactcccttttaggtttccgtgagaaccaggtgagatgctgtacctcagatgcttatgcaaggcctgacacagtcagcccttaagccaggattttggaacaggagtatcctaaaagagggtctctgtgtgagaaaggaagcgtccccatgagcccctatctgggtgtggatggaccctgtggctggtgtaagcttttggtatgagggatgccccacagggaacaaacacatttggtgctggggggtgagggggttacagcccagctacaaggatacacactggggacaccatggtgggtttattttatgggaggaagaggcccagaaagaaggagcttaggcatgtccagcaacagggaggctcagggtcgcagagtcaggagaggaatagcagcaccagtgatggccatccctgtggtccagtgtcctccaagatgacccctgggcatccttttctctg

SEQ ID NO: 105791 - DNA, 1010 bp, Homo sapiens
catagagggaagatctgtgattattttacagcccttctctttcccagagctttgggaagcaggagggtacgggcagattcccttcatgccaatgtcctgtactggcccagcacatggctttgagaacccctgcacatctccaatgggcctgccaccctctgcctcacattgaggtaagaagagtacagctgtggctctgggtttggggcctagcagctgacaggggttgagatcagtggagtatgaacaggaggcatggagtggagagggtcctgggcccgccaggctccctagaggatcatgggaagggacacatgtagattgtatgccaatcgtggcaggctctgagtcattctgcatcctgccctagtcctctctaaagtggaaggctcctcagctgcctgcccaccctcttcctctagtgccctgcactgccctctgccaaaccctctgggctgtgctcttggcctggtccccagctccctccatgtccctcggtcaacctgctgttctctggagccaccagtgcacccgtaagtcctatccagccctacctccagcagcatggcttcctggtcaaggttccctaacagtgcctaccatggggtcctccttgcctaccctagacactctgcattgcctgaaggtccacattgcctggtagttcactctgtcttctccctttttctctcgctcctagccttcccagaatgccccatgcccttgggtttcatggaccacccaaattccaatatatactgggaagtgactcctataggattcttactttttaccttgccaagtaactacctaaaaacctcccacctacatccaccatatgtcataataaaaattatagtgtgccctcaaaatttcagggtgggccttttatggaataaatttagccttttgaacccctcactctgttgtctcttttcttattttggccacgcatcatgagtgcctatcatggcctggtctcacatggccagcccatgggacctctgtgc

SEQ ID NO: 105792 - DNA, 1353 bp, Homo sapiens
tgatggctctctcctctttctttgtcacagctgtctctgcttttggcaaaaaattttcctcattctggtgaccatgcccagcatggtgagtacaagcagcctgtaccttgcctcttctgggaaaggcccgaggcactgggggtgggggtggggctctaagtccgaaggggtcctctgggaggagtccagtcttcggctggttcagtacccagagctgcaatgttcccttctctgaatgtgggaggagaaaaaggagggacactgtgcacagagcccctaccatggggccaacacagtaggggtccccagcaaaggaggggccaaagccagggccagtgccctggctttcaaaccatctgccatcccctgcagggctctcacagcactgggctggcactgggttgtaggtaggcctccagggatgcaactcctctccagccctcctctaaatgctccacaggctcttgaagaaatgaagagaggtatcattgctgtggaaaaatctctggagtcagaggcctgggcgcagctctggactctgcgtataacagtgagtgtcaggatcagggtgagatgggccggaggaggggtgaagggccaaggcctggctgatgacagctagccagttctgacaagtgtgaactgggaagggcctgttgggtttccttcagctgcgatgggcccagcagccctctaccccgcagaggcaggggccacagagctgcctgagatggtgccagacaagtcaggtggcacccttggagaagagcccagcacggctaactgcacctcacaacttgaagtctatgtgctgggcactgagttcaaagtcatcctgaaggacctggtagtctgtggcacctgtaggggaacatgcttcttccctgatgtctgctgctggtgcctttgctccagccacttggaagagattagagtccccaaaccccacagagtcacatctgcagctctgggaatgaagtcaaaacactcctggcttcacaggctgagcttgtggcccacaggatagaagagtggaaggagtagagaggcagacaggaagggacatagaggaaagggagtctcagccccagactaagtcagctcagggagagggcagaagggcctcaggatgggagccctcaccctgtctgggctgcagtggccaaggcaggttgggacaccacttcctggagcctgtcctggccctggccctggccctggccttggccctgcctctgtgggaggaggaggaagtgcatcatcctgggtgggaggagaatcacctggctgttggtacagctctgtgcacagccaggaccactgaccatcatcccatagccctcggaccctcct

SEQ ID NO: 105793 - DNA, 1015 bp, Homo sapiens
cttgagggaggaggacgactgcggtgggatgaaaaaaggggagggaacagcactgacggatgatcggatgctgggatgggaccagggacagggcaaaggccagtatagccagggccacagtggaggggagaggtggtcaggggtaaagtccaagggggtgggagccagctggggtgggttgtgcaggccaagtaaggagcctggaatttattctaattacagtagccatagtgcagcccttagcgttcttcctgccttcaccctcccacagcgggcttcctgcggcttcccgctcagctgatgtttccttggagttgccctggaacagatgtgaaatcacaagtggtgctgaaagtgggggaaggagggacagcccatggcctggattcatgacagtacctaccttgggtttggggccagggtatggctcctgagcagggaaaggaagcacagacacagctttgttctgcgtcctgccacatggtgtggttgggccactgagaccactgactttatagttaaagaaatctcccttgagttctagcattcggctaatgattgggtcaagtggacagtgctgccgtgagtatccctctcctgaaattctttacggcaatttcagagatgggcttggagaggtttgccatttcaaaccaaatcccttctccatcactcttaagccaaaaaaaaaaaaaaaaaaggaacttttgttacattaaaagaagtgtcccttcctggctgacctgattcttctttcttgctgtcctctctgtgacctccaacctgcccaagcacccatctccccaagcctgagtggcatggcaccccgtgggtgaggaggtggccgctagcacaggcagatggctgagaggaatgtgagggtgagaagcagctatctacaattcttgacagaatcctttcttttcttctttccttcctccctccctccttttctctttcaagcatctacaatctggcaaacccttggcccaaagactcaccaggtgggacgtgg

SEQ ID NO: 105794 - DNA, 1044 bp, Homo sapiens
tgtgtcccctgcgcaggtgctgctgagcgagcccgaggaggcggcggctctgtatcggggccttagccgccagcccgcgctgagcgccgcctgcctgggcccggaggtcaccacgcagtacggcggccaataccggacggtgcacactggtgtgtgtgcgaaggggaactggctggcgacggggtcgcgcactggggtgggaaggaagggggtgtggagggctcgctgcttgacagtgcgtaagggtatatagggagccggcctggacttggaggttacactcccacaggtccctgcacacaggtgtgtggagggggggagggggcgtgcggggcgttatcgaatggcggccatgagtgcacgagatgacggcgtaggggtagaagtcaaacctgggctcagggcgtggaccttgtagggctctccaccaacacgccatcccatacacatgccaggctgccctcaagattccagggtggatgctggggttactagggggttctctcaaagaggctgtcagctcaggctctggaggcctggactagggttgtggccaagtgttgtccagcctgcagccagggtgtcagtgtctggagacagattgagagattggggaagatagatctaggccttcctgggtcaggtggggctgggggcagtagccaggagtagccaagacaaggtgagcagtctcatgcctcccctcacagagtggacccagagggacctggaacgcatggagaacattcgattctgccgccaatacctggtgttccatgacggggactcagtggtgtttgcaggacctgcaggcaacagtgtggagacccggggggagtaagtttgagggaggaagcttgtgggcaaggccacagccgtccgcaatgcaagccttttatgaatgctcaccatgtgcctagaagggaggccagcagccaggttcttgcccccttgggagctcattcagtttctggtgacatggcctgataagcactggaagcttgctccaaactcagcctggactagagcccatggtggcctggg

SEQ ID NO: 105795 - DNA, 1536 bp, Homo sapiens
aagaaccggaagctcaagagcttcaacctgtcagcgctggagaaacatgggcctgtttatgaggatggtgaggcatctggctggtgagcaggcagggtggacaggaggggtagccgtagccctgggccccccctgattggccctccctgcacccagactgctttggctgcctgtcctggtcgcactcggagacacacttgttgtatgtggcagagaagaagcgccccaaggccgagtccttctttcagaccaaagccttggacgtcagtgccagcgatgatgagatagccaggctgaagaagccagaccaagccatcaaggtgctcgtggtcaatccacgaaggcccggcagggcagccctggggctcagtgtgctcccttcccatactgtgcctgtcagacctggggaggcactagcttttaggaagcagagcaggtcctatagacaggctgggcattgagtatcttgtgttctcagggggatcagtttgtgttttatgaagactggggagaaaacatggtttccaaaagcatccctgtgctctgcgtgctggatgtcgagagtggcaacatctctgtgcttgagggggtccctgagaatgtgtcccctggacaggtcagcagcaacagcctgtgtcccccctggagtctgggacccttcttgagctaccaccccttgctcactcctgccctttgatcctgtttacaggcattttgggcccctggagatgctggtgtggtgtttgtgggctggtggcatgagcccttccggttgggcatccgcttttgcaccaatcgcaggtgagggagtggggcaaggcaaggggccttgcagcccagctggccttgagactgagtgtctgtctcgtggttccaggtcagccctgtattatgtggacctcatcggggggaagtgtggtaagtggctgatgcccacctgtgctttgctgacacatgttggccctgccagcctgcgtgatgctcatgtttccatctggcccagagctcctctcggatgactccctggctgtctcttctccccggctgagcccagaccaatgtcgcattgtctacctgcagtacccatctctgatcccccatcaccaatgcagccagctgtgcctggtgagctggaggtggcagggatgggagggtggtcagcaagaagatgggatggtggatgagagctgaagggccagtatcatctccccataggccctcagtaggtgcccttctgtcctcaatgcagcagcggtgtgagttctgcctgtcctctcaaggagggcctagaggttgagagtgctgccatggagagctttgcactgttggggcattccaccttgagagaatgctcgtctgcaagaatgctcctccccttggctctcaactgcatgtagccaggctctgcaaggggctgggatatagtggggagttacacaatcccagaccctccccaggaagagctctgggcccctggtaaaagtcagagggacatgcctatctgaggccccttgggcatctggtccaggtcaccag

SEQ ID NO: 105796 - DNA, 1021 bp, Homo sapiens
aagggagggaacagtgagaggcttagcctctgcctgtcctggcaaccaggactctgtaccagcctagcttccctgctgcagccccttccattagcaactactctgtaccacccttcccaagagtatgtctggaggactagtgtgaggccctgtctttccacggcacccatgggcaaaagtagtcccagggacattgccttggttggggaagcccctaggctggacagatcacctagcccagggtgtgctgggctcaagccacccgagccctagcaaggagtcactgacacatttcctggaagcaaaggctaagaagcatctgtacaggcataaagaggaaacatggctttatgtctgacaagaagttttgtcctccccaaggcatatggcatcaaggctgggcctaacccagtctcatgaccttgtgaatccagtccacaaacacagagacacgcgtgaagacagctggccagcgggaccttgcgcatactcggttggggattataattccttccaggacccagcagttgtgggtaaagcaggcaagtgggcccccgtagtcaccctggcaggtaggagaactgatgagggccccgggccacagcaatgactagcctgcttcatgataaaatagttcatttctagccccccatacccttccagggctggcccagggccctgccaccaacctcacaggcccccacaggggccaacagtccctcagtgcacatctcactctcccgcacacgtcctcggtgcttgatgttacactcctggttggagatgacattcagcaaggccacatttaggactgtgtcattacccgtacctgcagtgaggggaatggggagagggagagggtcctgcaggaagatccagggctgggcctcctggccaccagcagtcctgtgcactgtgctcttacctttggtctcaccccagcctgcaatctcacacttggtccctggaggcaccacataccattcagggggcaggcagatcagggccacacgctggttca

SEQ ID NO: 105797 - DNA, 1134 bp, Homo sapiens
tgcggtaggcggcggggaccaggcctgggagggtacctgggaaccttggggaggggcgtggcttggccggggaggtaagaggggctgggcgtgacctgagagcataccccgtggagtaccgtacacctgggaaaggcgggtttggtcccagccccagagggatctcagctctcgctcggggcccgacctatctcggtccatctaagggtccgaggcacagccccgccaagaggccacaactgtcagctgcttccgcgggaagggtgagggctaccggggcacagccaataccaccactgcgggcgtaccttgccagcgttgggacgcgcaaatcccgcatcagcaccgatttacgccagaaaaatacgcgtgcaagtgaggtggggggggggggcgggcgttgggacgtgctgctgcgggtgagacgggaggaaggtagtcacgggctcaaggctggaggctggcgggctagggctgagtggagcgcctgcttagagaccttcgggagaacttctgccggaaccccgacggctcagaggcgccctggtgcttcacactgcggcccggcatgcgcgcggccttttgctaccagatccggcgttgtacagacgacgtgcggccccagggtgaggcccaagcttgggggctacagagccgggctggaagcctggaaccggagggccggggcgaggtctcggcctgatggctgcccgcacccgccacagactgctaccacggcgcaggggagcagtaccgcggcacggtcagcaagacccgcaagggtgtccagtgccagcgctggtccgctgagacgccgcacaagccgcagtgagtccctggtgctcccggccccgccagggccctaaccctggggcggcatgctttggtgtctgggaccagagcctggaaatggttgagactaccctgccacgattttgctcccgcttccgcctaggttcacgtttacctccgaaccgcatgcacaactggaggagaacttctgccggaacccagatggggatagccatgggccctggtgctacacgatggacccaaggaccccattcgactactgtgccctgcgacgctgcggtgagcactagtgacgcttcccccatgaccctgcctcagccc

SEQ ID NO: 105798 - DNA, 1985 bp, Homo sapiens
agccacatgtggtcattgaactcttgaaatgtggctaaggcaactgagaaatcgaattgttaatttttaaaactttaaatttaagtaacctcatgtggatgacggctgctgtgttggacagcaccgctacacatcagtgaggccagcaccagggactcagtgcaggttctggagcagctgcagcagcaacatgatgtgagggatagatgcactaggaggaccaatggagtttgccatgagggctgggcaagggtggtgcttggatgaggtgggaggccacatgtgtgagtgggaatggtgaaactatcaggaccatggataaaagaagggaggaacccagggctgaggaaagaggctccagccttgtggggagtaagtgggacttatggctagagatgaccagaccagtggtggtctgcacttgggggaatgtgtaggattgtcgcttctggttgtgagctggactcagtatggcttacaactgagatggatacaggggctctgcccctaggacacctcactttggacattttggtctgatttccacagagctgagacattttgttatggttcggcaaaaatatatctagtacctgctctctgcccagccctgtgctgggcacagggacactggagaacaagaagtggtccctgttacatgggcctagaccctggctaccctccctgtgtaggaagctgggagcccctgcattcccctgccctatgtgttagtgtgcatgcccctggcctcacctgctcccaagccttcctgccatggcaggactgaggtcaggtgtgggggcccctggctggccctgagtagacaggctctgtgtctggctcagcccccaggaccactggctgcccatgagagatgaaggatggcatccaagggggccggcatgtctttctcccgcaagagctataggctgacctcagatgctgagaaatccagggtcacaggtaagagctggcagggaaggaaggaggctcctcttgttgggaggagaaggaagggacaaaggcctcaggccttgctgcacctgtggctggcctaggaccagaagtctctggggccagcaggggccaggagctgcactgatcatgtggcccttttctcccttctgacttgtggctcaggcattgtgcaggagaagctgctgaatgactacctgaaccgcatcttttcctcttctgaacatgcacccccagcagccaccagcaggtatggctgggtgggtggcccctcctcactctgctgggccagaccagaataaggaggctgcagttgtagggaaagggagcctgggctctggacagataggcttaggctctgttctcactgtgctcctggctgcgagatctctggccagagagtctgccttccgtactctgcttcttcctgtctccaggcagtgctagttccttctgagagtcagggagcagaggtcagggagcgggtgcacattcatgcccagctagcacctggcacctactccatacccagcatctgcccctgcatgtacctgccctcaccttggccccagcctggccccttgtagcttctgactgaccttgtaaagaacaaactcctccagggccttttctttacaagtttaatacttttaagtgtagtcagtataaaagttacaagtacattttagcagaaacttagagggccaggcacagtggttcacacctgtaatcccagcactttgggaggccaaggtgggtagattgcttgagtccaggagttcaagaccagcctgagcaacatggcaagaccccatctctacaataaaatacagaaattacctgggcatggtggtgtgcacctgtagtcccagctgttagggaggctgatgtgggaggatcacttgagcctaggaggttgaggctgcagtgagttggcctctgcatgccactgcactgtagcctgggtgacagagcaagaccctgtctctaaaaaaagaaggaaaagcacc

SEQ ID NO: 105799 - DNA, 1004 bp, Homo sapiens
cagggacattgccaaccaagggcatcaggggatgtcctggaaagaagactgaaggataataacatcccaggccaaggaaactgcgtgtgccaagccttagaggagccgtggggcaatggccttcttgtccctcagtcagaccccggaaggggtcatctatgtttggtgttgctcgagtggctcaaggctctgtgcctgaggcttgtgccttggccatgtgccagggcaggggtgccttgaccagagtggaaggccaccacctcaccagtgcctggccttggtgcagcgcaaggtgtatctggtggaggctgtgctcatgagcttcttgctgggcatcgtggagaagggcacacccacacaggcacagtccgtggtgcaccaggtcctggacctcttgtggctcttcatggaggtgaggctcctgacctcaggcctcaggcctggctgtcagtcttcactggggtcgggaagatacggggagaatcttggaaaaggccccagtcatggctgccttggcatctcttcccccaggactacgaggtacaagattgcctcaagcagttgatgatgtctctgcttcggctgtaccgattctcacccattgtcccagacctgggcctacaggtgggagcccctacccctgccctgagccccctgggactcgcctgtccactctgaacgccccctctccacagatccattacctgcggctcactatcgccatcctgaggcatgagaagtcccgcaagtttctgcttagcaatgtcctgtatcctttccttgctgcctggcaggccagacatggggtgccctctggactcagcagaggccaggaaggggagtgtcatcaggccaggggtcccctgggagcatcaggaggaccagagctgcccaacgtggcattttctctacagagcaaggacgagagagcaaaggactgagcctggccagccagcctagccagggggttctgaatgactgcagactcgggctacgcagaggtg

SEQ ID NO: 105800 - DNA, 1044 bp, Homo sapiens
agaacaacgggtggatgccccaggccagagagagcagggcctctggctggggcttaggccagaccaccaggaacctcttgaggagcctttcctgcctggtgcctgcccaccggactctgcgtgaagttgtgaagctttcaggaggttgggtgttggtggatggagggagtcccatttcaccagagggcgggcttgtttcctctttctgtcctggggtgtgggcgagatcttccttcagagccgccttcttttccctgtgggcccactccctcccacccccttgggaaggggaggtggccctgcgtcagctcttgagcaccactcctcgagagctgtctcagcccctgagggtggacgggaggctctgctacaggggttcttccacaggctgtagaagaacacagccacttccacagctgtgctgtgttgaaagccacaggggcctgggtctctcagcctcacagggcatttgggcactaggaagtccgcgggaaagcaggaactagcacaccttgcagggcctggggcctttgggtcctgtgcaggggcagagcagaaggcaggttggggaccacaacccctgtctctaccagtgagcgagaaggcccattgtgtttcgaggcccatacaggaagctggggggccaggcacagtgcttcccaccagtatctgccagttctctggaccgaagcagggagcagggcgagcagcaagagggtgggggcctgggtgggggagccctgggcagtctaggttgtcatgggaccctcggagcctatggagctggcggactcagagccagccttcagctgcaggcctccagggttgtagagatcgaattcctcagctactgccagctgcacgcggccattgaggcccctccggcctggctccagaaagactacgtgcttgtggacgctggccttgcggctgggtgcgtctggcggtgtggtgctgagtactgaggactgtgcgctcagctcttggagcgggctgggtgtttggggccagcggcggcagcggcaggcacggcggcagcagcgg

SEQ ID NO: 105801 - DNA, 1072 bp, Homo sapiens
ctgctaagctgcactggcctagggctgcaggacgtgccagccgagttacctgccgctactgcggacctcgacctgagccacaacgcgctccagcgcctgcgccccggctggttggcgcccctcttccagctgcgcgccctgcacctagaccacaacgaactagatgcgctgggtcgcggcgtcttcgtcaacgccagcggcctgaggctgctcgatctatcatctaacacgttgcgggcgcttggccgccacgacctcgacgggctgggggcgctggagaagctgcttctgttcaataaccgcttggtgcacttggacgagcatgccttccacggcctgcgcgcgctcagccatctctacctgggctgcaacgaactcgcctcgttctccttcgaccacctgcacggtctgagcgccacccacctgcttactctggacctctcctccaaccggctgggacacatctccgtacctgagctggccgcgctgccggccttcctcaagaacggcctctacttgcacaacaaccctttgccttgcgactgccgcctctaccacctgctacagcgctggcaccagcggggcctgagcgccgtgcgcgactttgcgcgcgagtacgtatgcttggccttcaaggtacccgcgtcccgcgtgcgcttcttccagcacagccgcgtctttgagaactgctcgtcggccccagctcttggcctagagcggccggaagagcacctgtacgcgctggtgggtcggtccctgaggctttactgcaacaccagcgtcccggccatgcgcattgcctgggtttcgccgcagcaggagcttctcagggcgccaggatcccgcgatggcagcatcgcggtgctggccgacggcagcttggccataggcaacgtacaggagcagcatgcgggactcttcgtgtgcctggccactgggccccgcctgcaccacaaccagacgcacgagtacaacgtgagcgtgcactttccgcgcccagagcccgaggctttcaacacaggcttcaccacactgctgggctgtgccgtgggccttgtgctcgtgctgctct

SEQ ID NO: 105802 - DNA, 1048 bp, Homo sapiens
aggggtcaggggctcccgtaccttctgactgagcccgcccgtcggcctgcgttctgacaggcaggcgtggaccacgtgatcctggccgtgagctacatgtcgcaggtgctggagaaggaaatgaaggcacaggagcagagggtgaggcacagactcttggcccttattctcggtccccgcccaacttcccatcctggtagaacctgactgggggggcctcttccttccagctgggaatccgaatctccatgtcccatgaagaggagcctttggggacaggtcagtagaggcagaaaggtcccttgggggagggtttaaggccaggaaaagggtaagacccagcctggagtgggcctgctgagcctgaatccagggactcagacctccagcaaggtggtgacctgtccccttcccccagctgggcccctggcgctggcccgtgacctactctctgagactgcagaccctttcttcgtcctcaacagtgacgtgatctgcgatttccccttccaagccatggtgcagttccaccggcaccatggccaggagggctccatcctggtaaggcgccaggtcttctctctcttgacactttcaccctccatgcccagcctcccatgccccctagccttcatctgccttcggatgttatggatacagagctgtgcagtatgtatctttaagcacttggggcagagtctcttgagatctggaacggcatgtgtatcaaggcttaggaacactggactaggtccgaggtccccttccttgcattcaggtgaccaaggtggaggaaccctccaagtacggtgtggtggtgtgtgaggctgacacaggccgcattcaccggttcgtggagaagccacaggtgtttgtgtccaataagatcaacgcaggcatgtacatcctgagccctgcagtgctgcagcgcatccaggtgtgtaggagacagctgttggtgggctggggtggggcaggccatcaccgccatgaccctgctcacaagctgcccactcccacagctgcagcctacgtccattgagaagga

SEQ ID NO: 105803 - DNA, 1042 bp, Homo sapiens
acccacttacattcagtattttcctggcactacaaagagtgggaaggcctgggatttgctgctgctcccttagagcagggcccctcttttcagcactttggacacctggagacccagccctgttatttaatggtagtgggcaagtgtgtgtgcatactgtctgccactgctttctccctgccccatgccagagagccctgtccctgccaggcccagccttcttagccccaacttgggaacaaagtgcaacatgggatcatgggttggggtgctcaggtgagccctctctatagtgcttccctgggccaagctgacaccagcccctgagggtggggtgggacgggtggtgcttaaaagaggaaggggaccagtgtagcaacttgccagggaccccacccctccctctctgggcctgtgcagtgagcatggggattcccatcaaggggcctggcacctgtgctagttacgtagccgctgctcacgcgctcactcctgaccacatgcacgttccctagatgcagactgctttgaactttaaagctgtacaatttggttatgtttgtgctgacttaaaatatattttaatgaggaaaaaataatggagaaccctgggaaggacctggttcttttgcttctcggggaactgtaagccctcgcgttctgggaatcgctctctgctgctctttcctggaagctaagcctgtctccaccgcccgaggcctgcgccggtggctcccgccgcagttgcgtttgctttggaccttgcgtgcgggggagggggtgctcggtccgagcccgctcctttctgtacacctagcgctgcccgccccgcttgtgtctgaggtcgtgtatgtcaaaaataaagccgctagaaacggaggcgagtctgtctttgtgaaaatcccgtggcccgggagccttccctggtcaccctcggggcgaggccggggccgtggggcggggccggcggctgctggaccgcggcgaagcagggaacaaggcctcgcccttggcgccagttccgcctttggatccgccaatg

SEQ ID NO: 105804 - DNA, 1381 bp, Homo sapiens
tcatcctgtggccccagcaccagccccagcaacaccagccccgaggcgggtccctcctctcagcccaaggtggatgtccgcatgattgactttgcacacagcacattcaagggcttccgggatgaccccaccgtgcatgatgggccagacagaggctacgtgtttggcctggagaacctcatcagcatcatggaacagatgcgggacgagaaccagtaggccctgttctgggcccccagaaccccttcctctccactgcaggcagggaccattgttctgaacttgccgtgaggacacacagacttgcttttaaagggttatatttctctttggtgtaaactaaaagaaatgtttttagctgtagcctggaatccatatatataaagtgaaggagggcagaccacacgccctctcagccaggctcctcagctttgtggctctgactggtgtgtccaggctgccttaggaaggaagaggtgcccctggtgggcttggcagcagggacagggtgcccttggacattggtttctcttgtctagatctttgagatctgtggctgcagggccctgctgattgtaaggtaaagccctgggctggtgcagggcccctccacgcccactcttcccttgttccccagaagtagagggctctgggtgcccatttcttgggggctttccagtcttatgctgtgggtgtcagctagctctttaataggtgccctcagggcaccacagggctgactgcacaaagctggacccatccttcggtctgaccttagcatggggctagattaatgaagctgggctgaggccaacttatggcagagggcggcgcctgggttccccaggcacctgttggcacgtgacaggttggcacctgtcctattcctgaaacagcctctctcaccaagttcccttgcctaagaaggccactccctcccaccccactgaagtgggggatagtcggtgtcctagcaggcctcagggcctctggtggctctggcccagacagtatttgcagttcttgtgctatgggtgggagtcttcttcctcaagtttcggcagctgtgctgctgctggatgggctgctcctcccagggctcaagggctgtggtccgctcagggtctcatttccccaggccaagttcaaggcagcagccctttgtgaggcgctcttggccctgggcctggagggagaactttaagcttttttgctcacagggacgtggtatgggccctgggtgcaggtgcccacattctgctaatgagagctttgtctgatcagtcctgggtccatcagtttgtccatgtgtccggctgccagcccgtcccttgggatccttcccctggggtgtagccttgttcattagtatatactcatt

SEQ ID NO: 105805 - DNA, 1203 bp, Homo sapiens
atttgcagttacctcacatgagtagaatcatgcaatatttatccttttgtgtctggcttatttcacttagcaaaatgttttcaagttcatatatgttgtagcatgtataggaatttcattcctttttattgctgaataatattccattgtatgtatatcccacattctgcttatccattcatctgttgatggatgcttgtttcttccttttgtttattgtgagtagtgctgctgtgaatgttgacgtaaagtgtctgtttggatccttgtcatttcttttgggtgtatacctaggaatggaattgctgagttatatataaatctatgtttaactttttgagaaaccaccaaactgtttggtggctgcatcattttacattcccaccagcagtgtacgagagttctaatttcttcacatactggacacttgctccactttcttctttgattgtagccatcctaatggatgtgaagtggtattttcatcacataatttgacaaaaatgttatttttcagatagttttaagagacataagatagttttaagagacacaggaagaacactactcataacatttactcatttttattggctcatgggaccttaatgcaacccattagcagggtctgtgggtctgtcattgtggacagatctgtgccctgtgcagcgggaccccagaggatgacttgcctgagtttcttagtgatgtgtatgttcttccttcttagctcacaggaggcaaagagtccgaaggtggagctgcacagccactcagaggtccctttccagatgctagatggcaacagtggcttgagttctgagaagatcagccacaacccctggagcctgcgttgtcacaagcagcagctgagccgcatgcgctccgagtccaaggaccgaaagctctacagtatcctcgttgcccctccttcaggagtgtctactgggtccataggtcgtgtgttggggcaccattctgcctatggctgaggtctttgtctagggtccctcttcggtttaatctccctttttcatggactcctcttccttcgtttactttcatcaacatgtttttttcctgccttttggatttggtaaggccgaagcttaaaacttggcagtctagaacagtgttgtctgatagaactgtctgtaattctgtgtgcttttcagtatggtagccactggccacactgagtgg

SEQ ID NO: 105806 - DNA, 1422 bp, Homo sapiens
aacacagatttttttggaccgtcttggagggagaagtgttgatgtccctttggctgacactgtcaggcagaaggaaactagatctaaaggaggacacacacaggaaatggcagcataaagcacttaagtaactagagggttaagtgatgccaggtgtgggtgtcacctagcgaacacagttcttttgaatggtacaaaaaatcagtaattgaaagtgagagggccagataagagaaggggaaatatagacttatccaggaacaaaggtaagcatcagatttagcttggggatggacggtcatccattttctggaagttactgtctgctggctgttgttctgatattgatctgtagttggttcagggcaggtgatgtcttcatgctgtgtgggaaagtgagtgccaacagtctgtgctgcatagactcggcctgtgttgacatttgtttaccaactgccctttttttaacaggcgtggtatctgtctgttttgagggggacagtgatggttacatcaacttagtggcctatccttatgtggaaagtgagactgtggaacaggatgacacaacagaacgggagcaacctcggcgcaaacactcccgccggagcctgcaccggtcaggcagtggcagtgaccacaaggaggagaaagccagcctgtcccttgagacctctgagaggtaagaggtacatgtttcgtcctgctggtacaagcactcaagacgtctccatagtcctgacacatcatggggaagcagggctcacagtcaaggttggataagatgactggtgttcttgggatacccacacaggtgtagcctcttctctgtgtcacatcaccccagtggtgcctctttctgggtatagctgtagctggttgagagaggaagtgaagctctctcagccgtttggaagcagggacaccctgtgctggtgacaaaaggttctctggcttttcattatgtcttgccacccacaggacagaaggttgaaatacattagttcgtagcgaggctccaaatgctttctgacctgcaggatgtccaagcccaagggctatgagtccaaccaggagttccctaatggtttttgtgtcagacctctgagaatcatatcagtcattaacgctttccctgcaactaaaatttagtttccgttgtgttggaaattgatttttcttgtaagttcaaattatgtttttttgtttgttttgagatggagtcttgctgttaggctggaatgcagtggtgccatcttgcgtcactgcaacctctccctcctgggttcaagcaattctcctgcctctgcctcccaagtagctgggattacaggcgtgcaccaccacacccagctaatttttgtatttttagtggagatgttgtgtcaccatgttggctaggctggtctcgaactcctgacc

SEQ ID NO: 105807 - DNA, 1074 bp, Homo sapiens
ctgcctggtccttggcaccttcagtggagaatttgggaatctcatgtgacctaattcctcagacagaaacccttcctctgagtgaaggagagacccttaccagtactggatatcctaaggagtctgaacagaacaaattcccattgccttctgtttttttctgatctcatctttgggtgtgaagtaaaccgggataggtgctttcctgatggttgtaatgtgctgtagctctaaaataaaatcctttagataactcagaagggaggtgggaactaggaaaggcagagaatgtgggcttctgtgcacaagatagatggaagaggccaaggttgcatcattcagcaaaaatttaaccaactgcctttcatgtgccacgtagtattgtacgtgctagggatacacatagtagggaacaaaacaagagtccctgctctcactcatggagctccagggaaattgtgactcacccagtgttttgattccttcttcctctcttcttttctgtaggacagaataataagctgaatagaatctgaccattggctttcacctggccaggaccttctatgtagctctccttttgtggcccatgtgctgcatcctctgccctcagtgtgcaactggcccccaacgcaatgtgtgtttgtcaaaccatggaagtggggcagtatggcaagaatgcaagtcgggctggagaccggggagtcctcctggagcccttcatccaccaagtaggcggacacagcagcatgatgcgttacgacgatcacactgtgtgcaagcccctcatctcccgggaacagcgcttttacgagtccctccctcccgaaatgaaggagttcacccctgaatacaaaggtcagtcactggccagtttaatgaaagcagcagccttgggcttatagaccccttgccacagttttttcttggtttgtttgccatgatatatcattgtaggtcttttttctcaaagcacgaagtcactttgttagataaaattagaggctgaaagcatcagcaaggtctttagatcttgaaaattgaatttattaataggtaaagctgagaaaaagt

SEQ ID NO: 105808 - DNA, 1127 bp, Homo sapiens
taatttttaatgaaatgttgaggaaatctgcaaatatacctgtgaaatgtgaaggcactaaaggtgcttcactttattctataaaaacattgcaaatgtggctgggcatggtggctcatgcttgtaatcccagcactttgggaggccgagacaagtggatatcttgagctcgggagttcgagaccagcctgggcaacatggtgaaaccctgtctctacaaaaaaaaaaaaaaaaaaaaagccaggcttggtggcacacacctgtgttttcaactacttggaaggctgatgatatgggaggatcacttgagcccaggaggtcgaggctgtagtgatgtagtgaactgtgttgtgccactgcaatctagtctggacaacagtgtgagaccctgtctcaaaaaaaaaaaaaagattgcatatcaaacccaagtggttaatctgaggttgtaaaaatatgttggccaaataatttggaattctaactgaacttcttagagtatatacctgctgatctgcatttttagtgtgtgtctgtgcctgcccaactaaagaatctggtgaccaggtattgtcttgcaattgctgtagagacagtgccttcctagctcttaaagtagtcctgaccttgttcgccactatatctgattgcagtctctttttccctgccaaggttttttattcattgtcactttctaggcttgatgtgttgttgcattaaaataaacacacacaaaaaaaaactcatatgatttctcctaaatttggttcaacaagttctttagtctggttcttctccttactatcattattattgtcattgagacagcatcttgctatgttgcccagactggtcttgaactcctggcctcaagcagtccttccaccttggccttccaaagtgttaggatgacaggtgtgagccaccatacatggcctgattcatcttttttttttttcccctgagacaagatctgaatctgtcacccaggctggagtgctgtggcatgatttcagctgattgcaacctccacctcctgggctcaagccatcctcccacctcagtctcctgagtagctgggactataggtgtacaccaccacgcctggctaatttttgtaattttttttt

SEQ ID NO: 105809 - DNA, 1255 bp, Homo sapiens
gttattgaatactgagtcactgcacctagacaaaataaatggttaagttcctgtaggcctctggtcataatttctttttttttttgtttaataaactctcagccagtagaagatgatctagtcatattttcattaaccaattaatatacaaccttccagatctacatacatacaatataaaaccttttaggtatgtttctatttaaaaacaccttatttaatataaataactgattcattaacactgaactatagttaacagcattataactcatgcctgaacaaaacttccctacacattccttgtaaggtaatcaaagccttcttgtgtttaaaaacaccaggcagcacttcaatacgtttgggggccattttaagcatcaaaatcaccaacaaggccaggcgcagtggctaacaacctgtaagcagtctcgaaaaaataaaaaaataggcttctagcggccggcttcattgggaactatggctaaacatcatcctaatttgatcttttgctgcaagccagctggtgttgtcattggaagattgtgtgaaaaatgtgacagcaagtgtgtgatttgtgactttgtgcgtccctgcactctggtgtgctatgtgatgagtgtaactacgtatcttagcaggggtgccgtgtgatctgtggaggccctggggtctctggtgcctattactgtaaggagtgcaccatctaggagaaggatagagatggctgcccaaagattgtcaatttggggagctctaagacagacctcttctacgaacacaaaaaaatgcagcttcaagaagaggtgattggtgggtggccccttcctccccacaacatcaagctgctgcagcggctagaaaagatgcctgctactcccggcagaaagggagcagagcccagagcatcaccaggagtgcctgctagtgtcctggcagcttaccaaccctcccctcccttcacccagacatgtggtagggatggaaaaggattcttcacagagcactctggcacactgtattggagaaaaattgatagattagttaatggtttttcttgaatttgagaagcaaagatctgttctccatattgatatgttctccctcaaccaagatcttctaagaaataatattttagtcttctgcttgaggagttgactgtgaagctacacccagtgaaaaacatgatcttgcagcagctctggtggcagctgtccttgaagaacctttggtgtatggtgggaagctatcagaa

SEQ ID NO: 105810 - DNA, 1070 bp, Homo sapiens
acctcatacattgttggtgggaatgtcaagtgggccacttgggaaaacagtctttatgtggttaaacatagagttaccatatgacccagcaatctccctcctggctatctacccaagagaaatgaaaacaaatgttcacacaaaaacttgtacatgaatgtttatggcagcattattcataatagccaaaaggagaagcaacccaaatgtccatcaactgacagataaaatgtggtgtatacatacaagggaacattactctgcaataaaaaggaacgaagtgtgatacatgttacaacatggatgaaccttgaaaacatgttaaagtgaaagaagtcagatacaaaagttcacatttacatgattccatttatgtgaaatatccagaataggcaattctatagaaacagaaagtacattagtgattgcttagggcttggaggtggttgtaggggatagggaaaaagatagcttaagagtatggaatctctttttgagatgattaaaacattctaaaattgtgatggttgctcctatttctgaatattttatactttttttaaattttatacttaaaatcattgaattgtacaccttaatgggtgaaccgtatgatgtgtgaataatatatcaataaagctgttaattaaaaacgtattggctggacatggtggctcatccccgtaatcctagcactttggaggctgaggcagtaggatcacttgagcccaggggttcgagaccagctctggaaacatagcgagaccccatcgatacaaaaaataaaaaaattagccaggcgtggtggtgcgtgactgtaactccagctactggggagtctaagatgggaggatcgcttgtgtctgggattttgaggctgcagtgagctgtggttgggccactgcactccagcctgggtgacagagtgggaccctatcttttttttttcttgagatgaagtctcgctttgtcgcccaggctggattgcagaggcacgatctcggctcactacaacctctgcctcccaggttcaactgattttcctgcctcagcctcctgagtagctggga

SEQ ID NO: 105811 - DNA, 1049 bp, Homo sapiens
aaaagaaagaaggaaggaagggagggagggaggaagagagaaggaaagaaagagagaaaggaaggaaggagagagcgagaaggaaagaaagaaaggaaggaaggagagagaaggaaagaaaggaaagaaggaaggaaggaaaataaattgggtgtaggcaggtgcctgctgggttgctggagggttgctgctgggttgtcgatgggggtgctcagggcactgggggctgaatgtggttgccagcatctctgttctgtcagatgagcattatcagtgcccaggacctgccacacttccctggacctttctccatcaatgagcaaggttggctgcaggcaccatcccagggcctcctaggccaggctcaaaaggtgagcatgacctggaatctgagggtgtttatggattgggtagagtgcctaccttttagaaatttgtttattcttggcctccttggcctccttgactaatactgactctctcagacctggacctgctgctgcatgctgtctgtcctcccaccttagcttggttctgtgctgggctctggagttctagaaagaagaggaatccctctctctgggaattcacaagccctctaatagaaagaaaagtgtttagggcaatcacacagtaagagaaagtcctgggtaatggccaggcacagtggctcacccacataatcctagcactttgggaggccaaggtgggcgttgtcacctgagttcaggggttcaagaccagcctggccaacatggagaaaccccgtctctactaaaaatacaaaaattagctgagcatggtggcgcatgcctgtaatcccagctactcgggaggctgaggcaggagaattgcttgaacccagggggtggaggttgcagtgagccaagatcataccactgtgctccaacatgggcaaaaaaaaaaaaagttctgagtaaaatggtcagtgcagtctggaggtggctttcagcaattctaagatgataattcacattgtcaatgattcagatatcactctggggctgtttgtatcctaatggaataat

SEQ ID NO: 105812 - DNA, 1103 bp, Homo sapiens
ttgtctccctgggcagtgcctcacagggctggggctgcctcttagtgcctcaggggtatggagccaggacagtctagaaaaaaggcttttattgtcccaggctggagggcagggtcagaggtagctgacatcattgcagatgatgggctggcggctacgacagctcatgagagctgcaaagcgtgagacatccgcaggcagttcaggttctgggcgaggtgggcatgacagccgctttcctgccatagctgtccgccgagccctggccagccggcgccgaagctgctcagagaggccaagcaggaactgagggggccgagcacgggcacggtgcccacctccgtcacccccttcactccctgtctcaggcagctccatccagttgtgcaccaagtcagcaaagcaattgtcccctagtaccaggggctggcgactgcgacccctgttcagtagggctgctgtccagtcctctgcttccagtccctgccagtgctccaggcaggcgtctggggtggacttgggccgtggatggtggacaggtggtacactggctacaggggccctgctgggcatggggaggccactgactgagaggcactgcctacgaaggggctgtgctgagggtgctgggcgctgggatacaggcagttcttcctctcgccatgtgctgcctgacacctccgagaagccagagtcccagtccagggcatgctccctggggcctcccaaggctgcatccctgtcttctgtcaccactgcttcctcctcctcctcttcctcctcctccacacagcagactgagtcctcttccaaggcacccgaggccctaagctggtggctgggctgcacatctgggccagtttgggaggttggctgcaggggaccaggcattgagggtgagcctgtgtcccgaccacacaactgaggggaagagagggcagaagtcggagaggtatcacttgtcaccaggccagcccagagaacagagggtccaggaaggttagataggcctgctggcctgggcagcagggtgttagtgagcacagggcaggcataggggtgctggcactcgaagctggtgtggttctcatccaccgacctgg

SEQ ID NO: 105813 - DNA, 1040 bp, Homo sapiens
gtgggtagggtttgggggggatgtgcagactgctggcatcatgttgagtcttacctgaacccaggatgcagaaggctttactgttgggtccaataatattggctgccctaggtcattgtacatagtttgtttagtgtctttgagaaaagctcttctatttattggcccagggcagcagcctaactgcctagtgttctaccaatgcagattaggatggggtggagccaagctcacaatttcatcagtgttccagttttcaggcctgtttaatgcttttgcaaggccctccctttccttcatggaccccctccttgtgggttctggctgctgtgtcagtctcttgtcccctggccatgctttgtctcccagaattttttggaaatctctgggggctgatggtggttgccccttctacttgttgcagtaggattacccttcatacctgtcattttagggaggcatcagcatgtagccaccacccccaactacagagtcaatgttaggaagatctctctcatgggccccaagggcccctgaactccaggctagagacagccagggagacctttccttagggtagggtaaggccgccaggagccatgagttcatggaggagatgttgactaatcccatgccacgcaggcaatgggctgctcaaggccttagctctgttctggaaaggggagctttgagtgtcttgcctggctccctgaggcctctggcatgaagccctgtaacttgaccatgggtgggtgtcccaagggtgatagtgtcactcaggagggcctcaagccagcctcaaccagtgagggaaggactactaagccctaggttctttctccttgtaggacaaacagaaagtgggaaggaaagaaagtggacccctggcagaaagggaaataggcttcaagctcatgaaggaagaagaatatagaaacagtctaagacaaggccgggcgcggtggctcatgcctgtaataccagcactttgggaggccgaggtgggcagatcacgaggtcaggagagcgagaccatcctg

SEQ ID NO: 105814 - DNA, 1017 bp, Homo sapiens
gcacagctgcttttacttctggcatggtgcatccacaggctgcaggatgtaggaagcagcctttgcttctaggcagctccggatgtgcattgccagactgaggcctagcctcagagagctgggatctctgcccatatctctagtctcttctgggctaccttgatcactccctggggagcagcaggagggggcagggcacaaggctaccacttggcttgtctttcattccctacactttcttatagttgcagacagtctactctgaattggatcaggccaagttagaactgaagtcagcccagaaggacttacagagtgctgacaaggaaatcatggtgagggacatccctggcttgacaggaatgaggggtggtttgtgtgccctcccagagcagggctgggctatctctgcccaggacccttgcaccagtcagtggtggttctgggcccctgcatcctcctgggtcagggtgtgccccttggccctggtccggactggagcctgggcctcctcaacagagggcagacagaaccatgagtcttccctcatagtctgtcctgcacttacatccctgaggtcccttatcagaggaggggctctacctggggcttggcctcctgagcctaatgatgaggtatcaggccttgctctgttcccagtgggctggcctttcatgcatgctgctcatgtcctctgcattatctccggacttgatgcctcagcctttctctcacacacttttctttccctccccaagagcctgaaaaagaagctaacgatgctgcaggaaaccttgaacctgccaccagtggccagtgagactgtcgaccgcctggttttagagaggtttgttgagccttgggcggtacaggggtcacaaggtgggagagctttctggtaacagtctttactcctcctggctttggtggggtgggtgacctctgtggacctgatgtctgcagacagcctgccctgggagccagccaagatttagctggcaagcagccttgaagcaa

SEQ ID NO: 105815 - DNA, 1883 bp, Homo sapiens
gcaggatgagaccaaacaagcacaagaggaggcccgccggctcaggagcaagatgaagaccatggagcagtgagtttggagctgggtcctgcactgtgcctttgcccccagggcctgcaagtggtacagttcttaggactgcagcagggagtgggattgggtcatgtccgaggctcaaatctccataggccatggagggctcaggtcagctgggtgtgggcacagatcttagcctctatgaactcttcccccattccaaggaatgggagcccttgccacattcctccctgtctctgctgcctgtggccagatgacctggtgggtctttccttccagaaacctctctccaggaaatccctgaccttgagaccctctttcagcacctcttctttctcagcagcatccttggagctatgctcatctctgccacagggcctttccttgggcacacccacctactaaagcatcctggcagcctagcctgttaccttagcaacggcagcaaaggaaggcagagcggcactgggtacctacccatcagcctccagattgcaaatgccgtgggctgggtgtatttttcaggattgagcttctactccagagccagcgccctgaggtggaggagatgatccgagacatgggtgtgggacagtcagcggtggaacagctggctgtgtactgtgtgtctctcaagaagtgcgtactgtggcccctctcagcaaacacaggagataggccatggggccccagccgtgtcattgctccccatctcttgtaaagcagatggaactaaggggcaaactctggagccatgctgcctttgtttgaaccctgattccacctttcagcaactatgtggcctgctgccagtttcttggcctctttgaccctcaacttcctgaatggaaatagtagtagacctgcctcataggattgttgaggatttagtgtgaatcttaagtgctgtttctaagggagttgacctagctctctgggctataagccccattgtgattgatatgtagagcctgttccccattagcactatgatcctgcctggctgggatcaaactctactcatattcttcactctggtgggtgtaaggttggcaggaagggtggagggccacttagctgagaggcatagagggtccaagatgcctcctttaagaccaggtggtttagggagccccctagtgagactggggctttctgcatgccctctcaagtcaccagtgcctgcaggacaggcaggaggaaatagtcacttccttgcattctctgcaggaccctccacagtgccacctggtacttgttgggctcaggtgtcaaagtaggaatgagagtgagttgaggggttgggcagtgctttgtgttagattagtgctgtggctcagtctgacctgcaggtgttcttttctggcatctctttccatggccacattgcagagagtacgagaatctaaaagaggcacggaaggcctcaggggaggtggctgacaagctgaggaaggatttgttttcctccagaagcaaggtaacttagcagtgaacagaggttgaaggagaagtggctctccttttgtcatgttcactctggtctcctgagcaaggccatgggacctgatggcacagctgactccctggggcagctggaggacttacagaaatttgttaccagtccttactgggcattggcctgaatatgtggcttgtccactaggggtggacagatcacagaggtatcccccaacatgtggacactgatgctcccctctgctcttcctggctcctgggtacctctcagctggctggagagcacaggcctcaaatgtgacagcatcagaggcctatttttgtaccacatctggagtagaagggct

SEQ ID NO: 105816 - DNA, 1056 bp, Homo sapiens
aggtccctgtgccttgctcagccagctgcctggcgtaggcagctcacccaagtgctcctgccctacccctgattctgcccacgccaggctcaggggctggtgtccctcagggccacggggagggaggtgtttgactggatcctggaccagggctactactcggagcgagacacaagcaacgtggtacggcaagtcctggaggccgtggcctatttgcactcactcaagatcgtgcacaggaatctcaaggtgagggcagagccagagtcaaagggccagttggcagctgggctggtgctggggtgggcagcacctcagggccttggtctagcctccaaggtcctcatggtgtcttctgctcacccacatgctattctcacaccacagctggagaacctggtttactacaaccggctgaagaactcgaagattgtcatcagtgacttccatctggctaagctagaaaatggcctcatcaaggagccctgtgggacccccgagtatctgggcaagcagggggtggggcaggggcagggggataatggggggcagccttcagggagctgctctgggcagggggaaaatgtgctcatctcaggaagctggtgtggatggtactggacctggctaggcctgatactgaccagcagatgggcgctgtgtttgtagccccagaggtggtaggccggcagcggtatggacgccctgtggactgctgggccattggagtcatcatgtacatcctgtgagtggacagatggacaagcaggcttgcagtcagatggggtgggggcatgtgtctgtggcctttctgtgtgacccttcccccatgcaggctttcaggcaatccacctttctatgaggaggtggaagaagatgattatgagaaccatgataagaatctcttccgcaagatcctggctggtgactatgagtttgactctccatattgggatgatatttcgcaggcaggtgaggaggtgcctgcccagcacttggtagaacgcaagggagtggggagggtgtcctgctctcatcttcctctgtggtattctg

SEQ ID NO: 105817 - DNA, 1036 bp, Homo sapiens
agtggttttaccaaactgctttacaaaggggagtttgccctctcctagcagtgctcacgttcttcatatatccactaacacttgttagctctagaccttcagagatgactagcaggtgggtgggtggttatagcccccttcatctgtaaaatagctgaaatttaaataaactgtttgataagccttttttttgaatgtatagaatacaaaactattcccttatatatcagcttaatacattttttcatatgtaggctgttgcacttcaggcagccaagctgagtagctggatgtctagccagaaaagcaggggtaggatctaagcctgcctatcctctagcccctcctggtatggtctctgcccctagcttggcctgagccaggttggggtctcccaaaagcagcccctatgttgtggggaagtggagagtagtacagctaagccagaccccattgtgcccgcaggttagagcctggcaatgccgtttgggtgtgtgactctgggcgacaagaagaactataaccagccatcggaggtgactgacagatatgatttgggacaggtcatcaagacgtgagtgccgggcctgtcaggcaaggctgggtgggctggtgagcaggggctagggaagtggcagtggagtgcagctgatgctaaggccaggcctgagtgggtgcctgtcggctgcagtgaggagttttgtgaaatcttccgggccaaggacaagacgacaggcaagctgcacacctgcaagaagttccagaagcgggacggccgcaaggtgcggaaagctgccaagaacgagataggcatcctcaagatgtgagtttgaggcctgggattggggcggggtgggaggcagcagggaagggcttagagggcaagtggcctcaggcagtcccagcctctggccaattagtctgctgtggccactgtggtgaccacagcctctcccaggggttcatccagccctaactactggctcccctccctgtcgccagggtgaagcatcccaacatcctacagctggtggat

SEQ ID NO: 105818 - DNA, 1151 bp, Homo sapiens
aattcttgaagaagggacctgaccaacacatctcccctccccctccccttgttttaaaacttccatcaccatagcaaccctttactctagtgccttcctctgcatttcccctcctccacccacagggaagcagagcctccagtggattctccttcaggggttcagagatttggaccccaagtgcttgggaggagacagctggcctttggctttgcctgcatgttgacagctaaactttcgggatgtagcactggactgcatgcccacccccaaaactggagagacctccccacaatactccctcattagatgggcaaaattcagctgtaggaacttctaccatgatttagctcgagccggaggctcagtcagggcagccccttgaccggtcccctgaagcaattggatggtggtctagaagcttggcccttgttcttaacagaccttgagggaggtcttcagctcccctggtcctgtgggtgacacctcagctgtgagttaagcagggcttgggcttcagcatgttcattgcagcaggaaacccagccccagcccttgagagagtagagcagcagagaggagggggtgcctgcaggctggtgttcacagctgccactaaattaggaggtgttgcctacagttgttgggaggcagctggaggcctcttgggcccctcctggcctccctagatttactgcaagctctggagccccacgtggcaggggaccaaggtagcaggaaactctgtttatgtctatgaaaggtagggcctgaaccaggatgatctcagcggaggaggggacaggaccccaatgtggggcctccggacctcttggcctttgtcccgtttgggctttccctgggccagacttacctaaagatgcagcagagtccctgggggaccatttatcaccagggcaccaacagaggacccctcaggattgctggaggctcaattccctgagtccagtggtcaggccctgggagcaggccataactggggagtgcttggctctcaggctccatgagagccagctggagggcaatggccgcaccagggcctgcactccccacaagctccctctgggcagccggtagtgcatactgttcagttcctctgcagagagtggagggagccatgtctccaggga

SEQ ID NO: 105819 - DNA, 1036 bp, Homo sapiens
aggatggggaaagcgaagagctgcgctggaaggcggttttcggagggagctgccgctgaggctgacatccttctttcctgtcccgctctcagatggctacaaggtagtattcgtgcgccggagcccgctggtgctagtggcggtggctcgtacgcggcagtcggcacaagagctggcgcaggagctgctctacatctactaccagatcctaagccttcttaccggtgcgcagctgagccacatcttccagcagaagcagaactatgatttgcggcgcctactctcgggctcagagcgcatcaccgacaacctgctgcagctcatggcacgagaccccagcttcctgatgggggcggcacggtgcctgcccctggcggcggccgtgcgcgacactgtgagcgccagcctgcagcaggcgcgtgcgcgcagcctggtcttctccatcctgctggcccgcaaccagctcgtggcactcgtgcgccgaaaggaccaatttctgcaccccatcgacctgcacctgctcttcaacctcattagttcctcctcgtcctttcgcgagggcgaggcctggacgcccgtgtgcctgcccaaattcaacgcagccggcttcttccacgcacacatctcttacctagagcctgacactgacctctgcctgctgcttgtctccactgaccgtgaggacttctttgcagtctctgactgccgccgccgcttccaggagcgccttcgcaagcgcggagcccacctggccctgcgagaggcactgcgcacaccctactacagcgttgcccaagtgggcatccctgacctgcgtcacttcctctataagtcaaagagctcgggactcttcaccaggtgagggagggccttgagggcactgctgtagcgggacagggacatgtggagtcgggaggctgtttggtcctgagctctgagatgtagccctgaagctgtccctacctttggaagcagaccagtgtgctgggcctgttttactctggcaccagagacccagactctccatcaccccatg

SEQ ID NO: 105820 - DNA, 1090 bp, Homo sapiens
ctcactgcaacctccgcctccagggttcaagtcattctcctgcctcagcctcccaagtagctgggactacaggtgcccgccactacgcctggctaattttttgtatttttagtagagacggggtgtcaccatgttggccaggctggtctcgaactcctgacctcaagtgatccacacgcctcagcctcccaaagtgcagggattacagacatgagcccccacgcccggcctaggtcttgtatgatcatacattttgccttggcattcatatggctttctaaatttcaccatatacatgttgctttggaatgtcctaatttgccaaagagtttcacctcaacttctgtgggcatctatctgtaatctcttgccccaagtgcctgttagtctgtagtctgctttgcagctttcattagcaatacctgctgctttctctgcctgagttttgtattaggttgaaatagaaacatgcaccttatgtctgtccttcaaatacccccgcagacagggtagaacagatatgtacgataatttgcaaataaggtctgctttgctctttgagggagggagctgggaattgggcttctactgctttaagacaaaaaacactgccatgctggagagggggtagggcaaggttgagtaaaacaccacagaactttccttctgttttgaagatggctttttcttcattggatatttgcttgtaaacctttgactcttttctaaaactgtcaaatttggttcagacagttactacttgtttttctgatgtttctatgaaggaatgagaccttgaaacttcctagtctgccattttgatgacctatgggctgtctttgtactctcttgatagtgtcctttgatacacagaagtttttaattttggtgaagtccctttatctactttttcttttaaagttccttgtgctgtaggggtcatatttaagaaatcattgccaaatccaaggtcatgaagatttgcctctttttcagtagctataacaaaggtcctggaaataacttcttatcttgacttgagttacatgtctgtcttcaaagcaatgactgtggtgagggtaatagatta

SEQ ID NO: 105821 - DNA, 2877 bp, Homo sapiens
actttaagaaagggttggccgggcatggtggctcacgcctgtaaccctaaccttggggagacagagatgggtggctcacctgaggtcaagagttcaagaccagcctgggcagcatggtaaaaccccatctctgctaaaaataaaaaaattagctgggcatggtggcgcatgcctgtaatcccagctactctggaggctgaggcatgagaattgcttgaacccaggaggcagaggctgcagtgaaccgagatcatgccattgcactccagcctgggcaacagagcgagactccgtctcaaaaaaaaagaaaaagagaaagaaaaggtttggcattgcaactatttctcttgaactgagtgacccagaatcagttgtcctttgaattttagtatagtagcatagtctgagctcagaagggccttatgatagaccctgtatgttctgggaggcaagaattgagttggtattaatatcttaatgcttttgttttactgctgaataacagatgacccttcaggtcttttcatgttttcctttttcatgtctccctgcctaggatcctaggtgcctaattgcctacttaaactagtttagggaatcttggactgaagccaaaacatgtaaaatgccctgaaggttaggcaaagggaagaagttgggtagtatgaaagattaggtcacatcttgtttatctcttgagttctataaattgagaatgtaaatttaatactatgtctatttttaaaatgtattttattgccatgaaaaagtagcatgagacattggaatatggaatatcagcttcttcatttgggtcatggggatcatgcttgaagacctaatgctctctctaggtctatctcagcattgagcccctggatgctgttgcgtggcttagatgacttatacatgctttgtggcatgattcatactaccttctaccttctgtgatacccttgggtagttataataggacccaggttagagtgcttcttggtggagccactgtagaactgggatttagatgcagccagggctgatgctcagctggtgaacactggtgtgcttgttcctactggtgatttacaaccagtgtttcttctttttgggcctgcatccattttgattgggtggtgtccatgctgtatctgtaataaaatatttttgaatgttaccgctggatgcagcgtgagaaagatacctcctgaaacttactgtaagaaatttacagtgcattgatttttctgatatataggaatcgtcatgttgaccttggaattcttaagttccctggctgtaggaaatggaaatttttgtagtatgtcaccattgttagcttatttggtattgcggattttccctgttgcaggactgggtgaaagctttttctgcagcagtcatgttgaaaaccttgtgttgactttcctcgtgttctgaaatgggagcataaaagtttactccgccacttcgtcttaaaatagcaaaactttgctgttttctgcagatctaggaccttgttacagaactctgccaaaaaaaaaatgtttacagaagaatgtgctgtgattagagaagaatatgctggtgtgtagatttcaaactctctggacaatatgaataacactgtctttgtttctacagtgggagccaagaagaaaggtttgctcccgggtggaacagggattatcctcctcctccccttaagagtcatgctcaagagagacactctggcaactttcctggcagagattcacttccctttgatttccaggggcattcggggcctccttttgcaaatgtagaggagcattctttcagctatggagctagagacggaccgcatggtgactatcgaggaggggagggacctggacatgatttcagggggggagatttttcgtcttctgatttccagagcagagattcatcacagttggacttcaggggtagggacatacattctggggattttcgggatagagaaggaccacctatggactataggggtggagatggtacttctatggattatagaggtagggaggcacctcatatgaactacagagacagggatgctcacgctgttgacttcagaggtagggatgctcctccatctgacttcaggggccggggcacttatgatttagattttagaggccgggatggatcccatgcagattttaggggaagggatttatcagatttggattttagggccagagaacagtcccgttctgattttaggaatagagatgtatctgatttggactttagagacaaagacggaacacaagtagactttagaggccgaggttcaggtactactgatctagactttagggacagggatacgccacattcagatttcagaggtagacaccgatctaggactgatcaggattttaggggcagagagatgggatcttgtatggaatttaaagatagggagatgccccctgtggatccaaatattttggattacattcagccctctacacaagatagagaacattctggtatgaatgtgaacaggagagaagaatccacacatgaccatacgatagaaaggcctgcttttggcattcagaagggagaatttgagcattcagaaacaagagaaggagaaacacaaggtgtagcctttgaacatgagtctccagcagactttcagaacagccaaagtccagttcaagaccaagataagtcacagctttctggacgtgaagagcagagttcagatgctggtctgtttaaagaagaaggcggtctggactttcttgggcggcaagacaccgattacagaagcatggagtaccgtgatgtggatcataggctgccaggaagccagatgtttggctatggccagagcaagtcttt

SEQ ID NO: 105822 - DNA, 2069 bp, Homo sapiens
actttgaagactctttcagtgagacttggtcttagcacatttacattcttatgatttgaagtcacattctggcactcagaacaatagagaaaattgtaattttttatatcttcacgtgacatgtcattatcatttttgatcctgagtggctaaatttcatgttgatttgtgttttgtgcagtaaagtatatttgtgaaataatttttcattctcaatttaaggatcaagattataggaccggcccaagtgaggagaaacccagcaggcttattcgattaagtggggtacctgaagatgccacaaaagaagaggtaaggcatgtcttctctcctgtttctctgtgtcaattaaaaattaaaaaaaccttttaatttgaaaaattgtagattcacaagaaggtgcaaagaaatgcacagagaagtcttgtgtatttttttcccatcttccctcagtgttaatattttgcacaactgtggtatagtatctaaaccaggaaattgaccctggtataatacataaagtttattcagatttcaccatttatacatgcactcactgaggtgaggttaaaaaaaattatgacaaatgattgctctctttagacctgatcacatcctttagagcatattatttctggagtatgtacataaggatgcagtttatttacaatagtaaaaactagaaactgcctaactgccctgtatcaaaggattggctgactaaattaagtctgaacttatggcagtgctcgctctgtgccaggcattgtgtgatacttacaagcattagttcatttaattatcacatatttaatataatcactctaaatattaagcattactgtatgtaattgttctagatactgagtgacacagcagtgtatattatcaagtcactgcctccatggataatgaaaaagcaagcaaaaggattacacaattttagtcagcaaataaatactctgaagaaaactaaagtacaggcggggcatggtagctcggcctgtaactcggagacagagtcttgctttgtcgcccaggctggagtgtgtggcgcgaccttggtgcactgcaacctccacctccccagttcaagcagttctcctgccgcagcctcccgagtagctgggactacaggcacacaccaccacgcccagctaatttttgtacttttagtagagacggagtttcaccacattggtcaggctggtcttgaactcctgacctcaggttatctccctgcttctgcctcccaaagtactgccattacaggcatgagccaccaagcccagcccatttttgatttttttgaggcagcgtctcactttgttgcccaggctggagtgcagtggcacaatcacggctcactgcagcttctacctcttgggctcaatcgatcctaccacctcagcctcctgagtagctgggaccacgggcatgcatgctaatggggctgttttttgtattgtgtagttagggagacatcactgaggaagaggcattcgagcccaggcttgaatgccgtgagagaacagtttatatgaatatggggaaatgaactgcccaggcagttcatgctgaggaagtgctgtggccctggactgtaatgaacccagtacatcattttatatttaacacatgagaaactggacactaaaaggttacacagcaagtgagcagagagcttggaatgcacacagtatgatttcagagcttaagcctttgaaggttatgctcttctgcttttctttttttttttttttttttgagacagagtctcactctgtcacccaggctggagtgcagtggcgcgatctcggctcactgcaacctctgccgccagggttcaagagattctcctgcctcagcctcccaagtagctgggattacaagcacctgccactgcacccagctgatttttgtatttttagtagagatggggtttcaccatcttggtcaggctgatcttgaactcctgacctcaagtgatccacccgcctcggcctctcaaagtgctgagattacacgcatgagccaccgcgcccagcattttgtttgtttgtttgttt

SEQ ID NO: 105823 - DNA, 1527 bp, Homo sapiens
gcctcccgttggtgcctccaaataacaaccagctttagttttagctgtggttctttgtggatgtttgtccacacatgggtgatgaggatgcatgttccagttcttctgaatgcctgtgatatatagagtgttgcagcaattgccttgaatatattttatataattattaaacttgctatgcatgttcttcatggtggtggaatgtttatgcttgagcctaataggatttaataagcttgttgtatgtaaaattttacattcattgcttcagtaaaatttatgacttcccagagaaattgtacaaattagtggtttaattttcagttttgctttgagaatggagtcctgttacagttattttgttgaaatccatgaatagacccagaagagctttccctttgacatctgttctgtggtctgaatggtagattaaacttttcagaatatcctcctagttgtatttcacagtaccaatttcagtcatttcctttaaatcttactacagtaaaagtaggcaaaggtgaaatgccaagaactcaaggtttttgaccaatatttttagaactatgtataataataagtttatttatttaaaaataaaggtaatctttaggtgacctattttgcagaattttaaatggaagggaatagagcatgagtcttcacagaacttagaatttcagtaattcagttaaagacatcttcaagtaagaacatgtcatattttgaggatataatttactattagcagtttatcatgggataaaaattttgcattaactagataacttcttcagaatgcttctgcagaggaaaattatccacaaaataaattttggtgcttgaaagaatatggtgttaagttcagaaataatttgttctgtaatttgagaacaagctcagaagtattatttctcagagagccaattatttatttgttttaaaaacatcaaccctgaatttgtggaagcatgagtaagagtagatatattattattcttggtatctcacttatgttggttatatttattttttgcatatgccttatacatgctttctttgggaactcaaggtagaatttacaggctggagatgctttttaactctcaggataataacctcagtctggtttcatgaactgtgctttcattaagtattgatatgtttaggaaaggagatgtcttaatatttaaatagcagttcaaactccagtttctttagtattcattgactttctaattgtcaaatttgtcaggacagtaaaaattgtattaacatatagtgtctagagaggaagttcttaaatttgccgattgtggtagctgttagaattggcagactgaagacattgatacacatgggaaatcattcagggcagtgcttaaaaataaaacgaaaaatacctttcagcaaatacaatcttttcttggcattctgttaagttgtgttttttatttttgttttttagtgaaagaattggattgctagtttcatgttatttatattacatctctatgtgacaaatag

SEQ ID NO: 105824 - DNA, 1122 bp, Homo sapiens
ttcttaacaggggcatagatgtatgttttcaggcatatgggaccctttctgtaactaggcttctagagtttagaattaagattatttaaattggtctatgatcttattgaagagtgagaggctagagtgtagtggttaaaaacatcaacttgaatctggactgcttgcatttaaagctcagtattggtacttacttggttactttgatcagtttacctatcctttctttgccgccttctacatggctaaaatcaggttaataatatttacctcttaagatagtattgtgaatattaaatcagtatatacaaagtatttagaataaaatcttgaaccaacaagttttatgtaaatattacttactttcataggctagtttgctaattgctgaaaatccttatggcacaaccatgagtcttgaacacacagaataccttttttttttttaacgttttaggcagtatagttaaaccttaaatttctgttcttgtttgatagctaaagtttcagtcagaataaatttagtgttgggcttgtgaatataatattaaatctgaagtatgttgtcaacatatagtattgcagggttgatgtctagaaatgctatattagatgctcataatgttttctgtatctttttcttcccaatgtctacttgtcctttagcaaagtatgaacgttgtcatgaatcttttctctctgtccacagattctgtgtgctcctctgggccacagtagttacttctttaagcacagaaaggaaacttagggctttgccagttttagtattagttctctatgtttttcatccgggcagctatggagagggttgctttccacacacctgggtactccattgatatgttctgtagaggtaatcaacacactagagagtacacctgtttgttccatggctaaccctttctgattgtagacatgcatttgagtgtttgcagtggatatttggtgctaacaggtgtcttagttccttctgttattctgtaatgtttcccaagaatattcagagctgtttataaaatgcagagtgatttatgtattaggtgttcaatgagtttgatcaagaagattcacttgaaaggaattaactaacaaagcagtttc

SEQ ID NO: 105825 - DNA, 1034 bp, Homo sapiens
ccagatcaccagtgctaaagagggcaaaggatcttcttggttaatagaaaaggctgttttggaatgaatctcaaagtccagaaacatcgagacttttcttcaatacttttttctatttggggtagcaactttacctagtgtaggggagggaggggttagttgggagggcttgtgtttaaggggttcagaaacaggggatttaagtgtgtcttttgtgtttgcaaggcactaacaccactcccgtctgtatttaaatgctgtccccaggttacgactatggctatgtctgcgtggagttttcactcttggaagatgccatcggatgcatggaggccaaccaggttgctttatacttcggtcaaatgatgctggaaggatatatttttttatatatggggagggagggtttcaaatgattttactttggaaaggtacaagaagtctatctgtggagcatactgtattccaaccatcggttgtgaggaaaatctttaaaaaggctggaaagctttctctacaaaacttaatgggcacagagtgcattttaaaagctagagcccagttgcttttggactagattccaaagacaatagttggaaaaaaaaaaaaaagacacatctggagtgtttccttttggagtgtgactgagatggtaatcctgatgcaaagaatgatccttgattgtctgtgaccccaaggatctgcctagcacagaaattctaggtcaatagttacacccagacctagggtgaagacctctgatggtgacttctgtggcatcagatcctgcctgcaggggctacttccaaaagagagctatcagggaagagagaggagtggattgttggtgtctattgcattcatcattgttttttgccaattggagttgcatactcaagtccttggctgcgtatagtcagagctggtgaatcagaatctgtactcaccttacgtttgaactatctggagttactcagcttgccacctagatttttcatctatgtctttaatagaaccctacctggtagttttga

SEQ ID NO: 105826 - DNA, 1011 bp, Homo sapiens
aggattacttgagtctggattgagactgcagtgagctgtgatcactctgctgcactctagcctggggtgacagagtgagaccccgtctcaaaaaacaaaaaagtacagttaactatttatatagtctttattaggtattagatataagtaatctagagatggtttaaagtatgttggaggatgtgtgtaggttgtatgcaaataccatgtgattttatataagggacttgagcatcctgagatttttgtgtccttgtgggtcctggaaccaatcccctgtggacaccaagggacaactgtactaaccatgtgtcagaaactgctacatgccaattttggagagaagaaaaaagcttccaatctgtgtgctttcggtggatcctattctgacagtctgtccaattttgagaacactcattaattcataagcagtgaatgtgattaagtcgttcgcctctgtgctaaatactcaatgtaatagctgatagctgagtgctataaagaaaatgaagcagggtattgggagaatgcatcatggtggcaattttagaggggtggtcagggaaacttcttgaggagtgacatacatttaagttgtgactcttggcgaataatgtatccagaacacttactatagtacctagcacttggtagcatttgaattaatttgaaattcagtgtccttctttctctctcttaccctcctccacatgtcaagtaatttccaattataaattttgtgtgtgtgtgtgagacggagtccagccaggctggagtgcagtggcgtaatcttggctcactgcaacctccgccacccgggttccagagatcctcctgtctcagcctcccaggtagctgggactacagatatgcgccaccatgcttgggtaaattttttttctttttttttttttttgagatggagtctcgctctgttgcccaggctggagtgcggtggcacgatctcagctcattgcaacctctacctcctgggttcaagtgattctcctg

SEQ ID NO: 105827 - DNA, 2553 bp, Homo sapiens
ggcaggataattgcttgaacccaggaggtggaggttgcagtgagccaagattgcaccactgcactccagcctgctgacagagcaagactctgtctcaagaaaacaataaaattgaataaataaataaataaataaaataaatatttgtggaagataaaatgtgtttgtaggccgggcactatggctcaagcttataatcccaccactttgggagaccaaggctggaggatcacttgagcccaggagtttgaaatgagcatggggtaaatagtgagaccctgtctaaatttaaaaaaaaaaaaaaaaaaaaaaaagtctttgtctatcctttcccccagttttacttacagaccaaattggtatggattctgagtcaccacgatctgcttggcaactcttagtagagcctgagtgtgtgtgtgcctctgagaaggttactccgaagtactttgagtttttttgtaactctttgctattccgactcttgatgtgaaatgtcttttatttatcattggctggtacttgtaggcctaggggatggaaataaaggaattttctgctagcttgctttgtcaaatattgttgggtatgtgtgccttcgtgaagttgctcaagatgataaccaaggtccctctagccttttcctggtgcctagatcaagctgttaaacagtaggatgctctgcagcagtactgagctttgtggctgtggtgaccgatcagggtatcacttaggcagcagctgtctatctggagaaataatttccaacaggtatgaaggtatgaatctgttagtctgtaccatcaccatttctgtctaggagaagggggcagccagcaagcactgtcaggcagagcctttcgttccacccttcctgcaaagtgtatttctagccctgtcatatgcccttggctttctttgttgtcaagtctctgggagattgagggtacatattatttccttctgctttgtgtgcccttgcactgggacttggggaggggagtaagaagtattgtgttaaaatgttaatccctttcattggttgcccagttgtgagtactagccctctcagactgttggcatttggtatgcagggattagcattttatgttctcaagtatgctggtgtgatgcttattgtctattatttggccaaattagtcactaaagtgcccttatagaagataactctgggagaggtatttatttctctgaaatttttattctcctttcccctttcctttcctttcctttttctttttctttttttctttcctttttctcccctcccccccctcccctctcctcttattggagacaaggtctccctctgtcacctacgctggagtgtagtggtacaatcatggctcactgcggcctcgatctcttgtgccgaagtgatcctcccaactcagttctctttagtagctggaactaccaccaccacagctggctatttttttttttttttttttgtagaggcagggttttgcaacattccccaggctggtcttgaactcctggactcaagcaatttacctatctcggcctcccaaagcactgggattccaggtgtgagccactatgcctggcctatttttaaatttttatttttttgagacttagggttctgttctgttgctcaggctggagtacagtggtacgatgagagctcattgcagctttgaactcctgggcttaagcaatcctctcacctcagccttctgagtagctggactacaggcacctgccaccatgttcggctaattaaaaaaataacaaactctgttcgtaaagatggggtcttgctgtgttgctcaggctgctcttgaactccttgcctcaagtgagcctcccacctggacctgccaaattgctgggattataagcatgagccactgcgcccagccttactcacctttttgtatgacactatcagtctttctaaagtgcaaagaaaaagggttctgttatcatctgatgtgaaaattcctttaaacattgactttttctggtgtgaggaatgaaagctgtggaatacgtgaagttttatgaaatagtgtttttttgtgtgtgtgtcaacaaaattaagagagtttgggttattgaagatacaagagtgtttttgaaggtatatataggaaaccaaatctcaaatgtggtctgtccttgtgattaaaattagagcaatagggaagccaggtgtgatggctcacacctgtaattccagcacttttgcaggctgtgacaggaggatcacttgagcccaggagttgagtccagcctgggtaacatagcaagacctcatctctacaaaacattgttaaaaattagctgggtgtagtggcacatgcctattgtcccagctatttggaaggctaaagtgggaggattgcttgagcctgggaggtcaaagctacagtgagccgtgattgtgccactgcactgcaacctgggcgacagagagatcctgcctcaaaaaaaaaaaaaaaagcaacagagaaagcttatgtttttagtgatgagaatgctatttgtgaggccatgatggaa

SEQ ID NO: 105828 - DNA, 1027 bp, Homo sapiens
ataacatatccttgtaccataaagaatgagcctgactgctttacaaaggatttctataaaaagtaatcttttatactaagagaaatgacacatctgttttaaacctgttacttttcttccccgggctttgctctttctgcaggtccgtttgacatggttcttgaaactcctggtagcagccatttactagtagcactctttatcttagacacagcacctaaagcaattgtaggtgttttaagaacagaaagcccatcttaagcagaccagtttgagggattggcagtgctgtcaagaaacaagggctttgtggcagtctctctaaaaactccctatgagtccatttcttgcaaacttctttagactctactgtatcttttcatcagaagctacctctttgatgtgggaagtgtcatgaatggactgactctctggaatttaaaaacaaagacaatatggcaaaaagaaaacctgacttttagtactgtatgtgttgctaattagctctgtattcttgggcagactactccatgtatcccagccatccatatgccctatttgtaaggatctaatgagatgatattgtgaagaatgcctttgtaaactgtaaattgctttgtgaataaagatactatctctgataaacagtaccagttctcagccaccaataacctgatactcccatactgtgtttggaagaaacacaaaacaatgaagagtaattgtgacttttcaatgtgagttgtattcacaaagctcatatactttttccctgccttttgatactgtttatcgctttctgtgttgtaatgggaagatcacacagcaatcattttctcagtacaaagtataactacaactgagcttgcattgaagatctttaacaaagatgcaaagctgctgtccagaaatgttttctttccattttctcttgtacctcccagtattttaagaatccttgaggctgggcaccataactcacgcctgtaatctcaacactttgggaagctgaggcaggaggatcact

SEQ ID NO: 105829 - DNA, 2486 bp, Homo sapiens
ttgggaggccgaggtgggcggattacctaaggttgggaattcgagaccagcctgaccaacgtggagaaaccccgtctctactaaaaatacaaaattagccaagcgtggtggcatatatctataatcccagctactcgggaggctgaggcaggagactcgcttgaacctgggaggcggaggttgcagtgagccgagatcacgccatagcactccagcctgggcaacaagagcgaaactctgtctcagggaaaaaaaaaaaaaaaaaaggagggggcgcttcatcttgactaacttcctgcattggtggagcttgatagagtggtccttcccagatccttccctgcatacagagcctgtctcttttctgattggtccctaaggccagattacctgtccctaatactgagcagaagctggtgaatgaaacaggagatccctcagtcaaaacaaaaggaaaaagaaaaatgaaacaggagatcccttctctacagcccagatgtaagtccagctgtgcccttcaccacctgggtgaccccacctctgtgaacataggtcctcatctgtaaagtgtagataatgttatttcatcggatcatttaggggattaaataagataatgtacttcgtggtttctggctcttagtaagtgcttaataaatgttagcgatttttattatcattgtccttagccttgagaacaagccagggaatagtgtctcagaccagatgctaagacctaggtagatgggcaattttccttggttttgacaagacaataattttatcctgtgtatttctcttgacttttttgatgtgaaaagcagagaggtaaagcattatttgacagatgtatggattcaagcaagaaactgaggtccaattgcaaagaaatggcttgtataactcagagccctgtctgaggaaacacagaggaccctagagggcggagaatgaacacagcgcaggggctagttccagagtcgcattctcggttagttcactttcaagtgtgggtgagggtcccttgtcagtaggcagagaatttttttcccctgcaccaacacatacctgctgcctagtgtttattaaacaaaactttattttaatgtgaaatagaattcatgacttgtccaaaatggagaggcaagggagctctttaacaggcttgttgagccccttttcccacctgttcctgtgccagactttcccaaaggcttacttgccaatggttgctcctcagatctcagggctagctcactctataggctccaagccagagtgataccgccgccgccgctgttgctcccaccagccaatcagtttcctgctgtaaggatgtaacttgctgtgaagctttcaccttcctcctttcttcctgtcttcaatgttgtatgtctttgtcctggtgcttttgccatacagccagtgtttcaaagaaaattttcaggcactaaagttatagcccttactacctttccaaggagatgtgagatagctgtggaaaagaagagggctcctctgcctctgtgcagaaggaacagtttacttcttgatagtgtgctagctcctgagctaggtgggggacttgctgggattcaagagagtgcattacctgacctctggacaagtagactgggcatagcctgcccaaggacagcaccctaacctgcaggaaccaaggccgaagactgatttcaccttctcgtactcccctttcctaagctaaagcttgctctgtaacactgccccaggtctgtggcttaaaacagccatttcctttcaccagtgaattaagctcactctttataaaatgtttcagcttggggattggaaaggctctctgtgcctttctgtctctgtctgtttctccaagggttgatgttgatggcttctgtctttgtctttacagggaactctaatgatccaggacaaagaagttaccctggagtatgtatcaagcctggatttttggtactgcaaacgagtaagtaccaagaatccctttctttagaagtaagtatctggaataacagctcctccatatctctaggaaggctgcctgctaacatgcattcccaaggacaaagctcttcttcctcaggtcacttcagttgaacaggaggaggtcaagacaaggtcattcataatttctccttcccagctgctacatgtggccatagagagttctggacctgcaattggagacactttcccaaggacatgtgccattatttctatcagttataaaaataacagttccttgacatataatatcttctcacctctcctgggggtggtcataaaggaattcttggttggaaaagtaggtttggagagactagttctttgggagtcgtacattttttggatattcttgggtttccaagggtatagaacttcagacaccatggcattttacctctattaaactccatattctcttagagtgggatatttaaaattttaggctatactctttttttttg

SEQ ID NO: 105830 - DNA, 1206 bp, Homo sapiens
accaccacacccagctaatttttgtatttttactagagacggggtttcaccatgttggccaggctggagcacagtggcacaatcttggctcactgcaagctccgcctctcgggttcattctcctgcctcagcctccctactaactgggactacaggtgcccgccaccacgcccagctaattttttgtatttttagtagagatggagtttcactgcattagccagggtggtctcgatctcctgacgttgtgatccacctgccttgacctcccagagtgctgggattataggcgtgagccaccgcacccagcccagcctttatcagttattatgagtgaatatcatgtgagagttacctctggtttgatcagtttcaggaaaatgccagtgaagggaaggcccctgcagaagacgtctttaagaagcccctgcctcctactgtgaagaaggaagagagtccccctccagtaagaccaacattgatcccctggacctagggctggggctggggatggttccgagtagaagaggaagcgcaaaggctgatgccttcctctggtgttggtcttttacctcactatgtctcccgaataaggattcccatttcttttgagtacaagcatgagataaagttttctgtctgctaatgggggtattactggagaaccagaggcagttatctggactctttctctctgccctgtgccattcttaccagacgagatgcctagccctttttatcatcttgttcttgtcagttctctaaatcaccaaggaaacccgttttctcagcctcaatctttcctgccttttggcatcacacaagaatctcttagatatggagtgcatgcgtggtcatttttttatagtttctgcctgttcagagtgaatgatgctaatattggtgcccattttttagatgccttcaagcagtagtctcaacctaatcaccagtgattctgattgaatgcaggtatataacaatagtgaccatgcattatttatttattttgagtgatcatagaccaatgattatgcatcattatttaacagttcttataaggtacccttttcctgctccgcattattaattcagctcattgtggcatctgtcttaaccatgctttgcctttaccttacatgtgagctggatctgtctacccaagtgcctattaatgcagttgcttttagtttacttcctaaatcc

SEQ ID NO: 105831 - DNA, 1113 bp, Homo sapiens
aatgaaagtcatcttttcttccctccatgagttacagtaatttggaggtatttatctcttcctctttgtaatttgtaaccttttactattttctatgtttattttcctttctcttccttctcctcacattctgttgctagagtcacttctaaaggaatctttcttgtttattcttaatgaacaaggagcaaagccaagctctggccatgttgctttcatctgggaaatgagcagcatggctagtgagtttattttgaacccaattcaatgaaatgagatgcccatatcagaatatcaaaaaaaatggaccccaaaatataggttgaatttggtattgatccctggccttctccttccagcctaaagtggtaaacccactgatcggcctcttgggtgaatatggaggagacagtgactatgaggaggaagaagaggaggaacagacccctcccccacagccccgcacagcacagccccagaagcgagaggagcaaaccaagaaggagaatgaagaagacaaactcactgactggaataaactggcttgtctgctttgcagaaggcagtttcccaataaagaagttctgatcaaacaccagcagctgtcagacctgcacaaggtattaggggaaggagctatgccctttcaaactgttgactcttggccgggctttgtggctcatgcctgtaatcctagcactttgggaggccgaggcgggtggattgcctgggctcagaagtacaagaccagtctgggcaacatggtgaaaccccctttgtactaaaatacaaaaaattagccaggtgtggtgttgtgtgcctgtagtcccagccactcgggaggctgaggcaggagaattgctagaacctgggaggcagaggttgcagtgagccgagatcgtgccactgcactccagcctgggtaacagagcaagactccatctcttaaaaaacaaaacaaaacaaaactgttgactcatattattgatggggattatggggaataaaaaagattatttaggccgggcctagtggtttacacctgtaatcccagcactttgggaggccaaggcacctaggtagatcacttgagatcaggagtttgagaccagc

SEQ ID NO: 105832 - DNA, 1645 bp, Homo sapiens
agaatcgcttgaacctgggaggcaaaggttgcagtgaaccgagatcacaccactgcactccagcctgggtgacagaccaagactctatctcaaaaaaaaaaaaaaaaaaaaaaaaaagccgcagcagcttatacaatccttcctcagtgtatatcagccccagttcctatcattaaaacagtccaattcaagaatgaattgctctggattaaggttatgcctaccctcaaagaacttccatgtataggccgaagccaagcattatgactgtggctagggtgccaaatatggaggatgggtaggaagagaaagggttgtggaataggacattacttgctgggtttctcatcttagctgtgtcattaacgttacagttggacctcagataagccccttttcttctttggtccttgtaacttcatctgattctatccagctctgacagtgtgcagttttcaccataggtgagtcaaattctgccatttcttcatgtagtgaatattgttatgagccacagcacaacatctatacttgggatgttaaaccgacatacattggtcttcccctgtagtattcccatttatatgaactgaccaaggatccaaattatggacaaataaagtccctaaatggactcacattctcagagcaatttgtttcacaccccttctctagtagatgttgcaagagcaggtgatggaactagattcagactttctctgaatacagagctcaaagttttatttagctaaaagctgagaagttctgcttttggtaataggtacactacttttcccagccatctctgtggaggctttgcaaagataggactctgaaaagctcctgataatccctggaacagactacctcccatgtcctttgacctgaagttgtgagttgtcagactgacacattgaaatttcacccatctgatgtaaatactaataaatggctaaagagataaaaagtaatcgtcaggaaagaggagccacaggtctggtgaattcacaaactgaactggtcataggacagtggaaagtagactgtagtacttttcctttccttaaggtcgtctgctacaaagaaccaccacttcatgtaagagctgctttggactccttaagtttcatacatatgtctgagggcttgtgtagtagagccatgcgtgaggaatttgcaactctcagagcagtctcttggaaccctggggctcctttccatgtttctctgggggctgaaagagtgactcatgtctgggaatggtatgtatggcagagtatgtgggcatttggttttcttcactggtgtgcccacatcctctgtcccatgattttcaacttagataaagagatagatatttgtttcccacatcttggagataagtaaaatgatattcctcttatgccataccacataactaatctgcatgacaagaccagttagggattgttggttgcaggatacagtgatcatttagtagatctgatcaatcaaaagagctacaatccaaaagcaactattgggaaaggcctagaagcatctctaggaccattgtttcttagacctatactcatagaattgcctctcttctcagcaaaacctggaaatccaccggaagataaaacagtctgagcaggagctagcc

SEQ ID NO: 105833 - DNA, 1188 bp, Homo sapiens
gagtgttctcttaaggggtgctagttttgggtaactatccagttgtatctgacagacaactaagttgcctgatggggaaaaaaaagactaacttagttcatccaggtttttggtccattttccagtaggcatgatacccttgagagtagatgagccagggatgtacttaatttcaccctttaaaattgggtgaaattcgagtaactgctttcttcctgtttttggtcactaagatctgaatcagggatgaagggataatatgtagactctaggcttgacaaaatgcaaaaataaacttggacaacatgactctttcttagaaatattcaacccaaatgtttatttcagatttagcatacattcctgagaattatcattacatttagggatgtaggtattttcccagtggttatcttagtaaactggaatttggtaatactttttaacactttaaactatttggattatcttataaactgatctgtgggccgtgtgtatttttaactatgtcttttaaaggtacaaaatgtgactgactttagaatgaaaattattttccctggcagagtgagtagaacagagcgtagtggaagatacggttccatcatagacagggatgaccgtgatgagcgtgaatcccgaagcaggcggagggactcagattacaaaagatctagtgatgatcggaggggtgatagatatgatgactaccgagactatgacagtccagaggtgagtgaccagcggctgtataaccccccaaaacactctgagccttatagtaatagaaataacagccaggcagccaggtccagtggccccttcccataatcctatcactttgggaggccaaggcggccagatcacttgaggtcaggagtttaagaccagtctggccaacatagtaaaacccgtctctactaaaaatacaaaaattagctgagtggggtggtgggcgcctgtaatcccagctacttgggagactgaggtaagagaatcacttgaaacctgggaggcggaggttgcagtgagctgagattgtatcagtgctctccagcatgggtgacaaagcaagactccatctcaaaaaaaaaaaaaaaagaaaagaaataatggccagggtttacatagggatcaccatgtacttttgagcacttgacttcatgaattcatttaggtctcagtaca

SEQ ID NO: 105834 - DNA, 1029 bp, Homo sapiens
tggctaacatggtgaaaccctgtctctactaaaaatacaaaaaattagctgggcgtggtggcaagtgcctatagtcccaactactcgggaggctgaaggaggagaattgcttgaacccaggaggcagaggttgcagtgagcagagatcatcgcaccactgcactccagtctgggcaataagagtgaaactgtctcaaaaaaaaaaaaaaagaaaacacagcaggctgggtgtgcctataatcccagcactttgggaggccatagcaggagggtcatttgaggccaggagttcagaccagcctgggtaacatagtgagacccctgtctcaaaaaaaaaaaattgcagtgaacattaccatggagtgcttgtgtaatctctgtacacttcctgctaaggataatttctaggagtggagggtctgtttcaaagagtacagggtgatgttaattgtgattttgtttattgtaactcagagagagcgtgaaagaaggaacagtgaccgatccgaagatggctaccattcagatggtgactatggtgagcacgactataggcatgacatcagtgacgagagggagagcaagaccatcatgctgcgcggccttcccatcaccatcacagagagcgatgtaaggggaaatgacagttataaccagcagtcagtaggcacaatgaactttgagcttctaccattattttctcatgctattgttttatcttaagccaatagaggttgagtatcccttatccaaaatgcttgggaccagaactgttttgatatttttttttaatatttgcatttacataagtttaaacatttgcatttacataagtctaaacatgaaattcatttgtattttgtatatgtcttatacatgccaaaggtaattttatacaacactttaaataattttttttttttttttttaagacagagtcttgctctgtcacccaggctggagtgcagtggtacaacctcggctcactgcaagctctgcctcccgggttcacgccattctcctgcctca

SEQ ID NO: 105835 - DNA, 1347 bp, Homo sapiens
ggcatggtgggtcatgcatgtaatgatatgggaggctggcatatcacttgaggccaggagttcgagactagcctgtccaacacagtgaaaccccgtctctactaaaaatacaaaaattagctggatgtggtggtggatgcctgtaatcccagctacctgggaggctgaggcagaagaatcgcttgaatccaggaggtggaggttgaagtgagccgagatcacgtcactgtactccagcctgggtgacagagcgagactccgtctcaaaaaaaaaaaaaaatcagtcacgcatggtggtgcacacctataatcccagctactcgggaggctgaggcaggagaattgcttgaacccaggaggtggtggttgcagtgagctgagatcatgccactgcactccagcctgggcaatcaagtgagtgagagacagagactcccatcttaaaaaaaaaaaaaacttggctaattaaacagttgatgtaattcctattccatggggaatagtgtgtggcaaaagctttaactgtaaataatgtaaaaccctgtgcagattcgagaaatgatggagtccttcgaaggccctcagcctgcggatgtgaggctgatgaagaggaaaacaggtgagagcttgcttagttcctgatattattgttctcttccccattcccacctcagtccctaaagaacatcctgattcccccagtcttcaagcacatgaattcagaatgaaaggtttgccatggctaaggaatgtgactctttgaaaaccatgttagcatctgaggaacttttttaaactttgttttagggacttttttttccttaggtaagtaatgatttataaactcctttttttttttgactatagtcggttgcatggttactttaagcgtggaatcaaatggagtggcatttagttcaggcggcttgttccttgccatggcaaagtatcaagaagatccccaagtcaagtcacatttgtaaagctgcttcccaattggctttgtcacgcagtgttgaagcagtgggagagagattcacctgttataaaggaactgactaacacaagtatcccgtctatatctgaatgctgtctctaggtgtaagccgtggtttcgccttcgtggagttttatcacttgcaagatgctaccagctggatggaagccaatcaggttgcttcactcaccaagtctagatattcatgaaaatggaacaagtctgtacaattttaaaaaaaggttgaaggagtggtttgttccaaaggagtgacttttttttaaaaaaaaagctttgtatatattaaaattgatgttactagaataagtacagtaccaaggacttcatta

SEQ ID NO: 105836 - DNA, 1041 bp, Homo sapiens
gctggaggattggaatctgatgcatcatctgcatcaggtagtaaacttcatctcccttttaccttttgtttaagcacttacagttgaagaaatatgattaaatgtcctaactggaccaaaagctacaagtccatttctctgtaagattgtagggggcatggccgggcacggtggctcacgcctgtaatcccagcactttgggaggccaaggcaggtggatcacgaggtcaggagttcaagaccagcctggccaacatggtgaaaccccatctcagctaaaactacagaaattagccaggtgcggtggcaggcgcctgtaatcccagctactcaggaggctgaggcaggagaattgcttgaacccgagcggcagagattgcagtgagctgagattgcgccactgcactccagcctgggcgacagagtgagattctgtctcagaaagaaaaaaaaaagaatgtagggggcatattcagggctgtcatcatgtacccaaggttctggggaagaatacggttatttgtgtacaccaggagttaatacaaggtcttagagaccatgttgtgatgagtttaattcttggaattcaactctgtatttcccctctctgtgtttggagtcgtgagtgcccacgtaagttcaggtgagcagagaggatgtggccctggagactggtgctcagacatcaatcagaagagctactctaagaagccttggctttaatttttgtttcaggctttaaaaagccttgtgagttaaatctttctcaaccccagagcaaatatagatcctttcttctcttccttttctcttcttttttttttgagacggagtctcgctctgttgcccaggctggagtgcggtggcgttatctcggttcactgtgagctctgcctcccaggttcacgccattctcctgccttagcctcacaagtagctggaactacaggtgcctgccaccactcccggctaattttttgtatttttagtagagacggggtttcaccgtgttagccaggatggtctcaatctcctgacctc

SEQ ID NO: 105837 - DNA, 1033 bp, Homo sapiens
tgttttgctatacaagtattaccctttcctgttgtatgagccaggattgagtaatacacacttcaaccttatttctttctgttgttttaaaatattaattttatgatatatatgtgcatgtatattttaaatataaaatttcaactgtgtatttacactttatgcatgcttgacctttagaaagttgtcgccggggccgggtgtggtggctcgcgcctgtaatcccagcactttgggaggccgaggcgggtggatcacgaggttaggagatcaagaccatcctggctaacacggtgaaaccccgtctctactaaaaatacaaaaattagccgggcgtggtggcacatgcctgtaatcccagctactcgggaggctgaggcaggagaattgcttgaaccccggagacggaggttgcagtgagccaagattgcgccactgcagtccagtttgggcaacagagcaagactcctcttgaaaaagaaagcaaaaaagttgtcaacatgtgttttgctgagggattgccttagattattgctacagtgtgtctgtcaggggagcccttcctcctggatgattgcagtgatttagctctcttaaaaggctttacagttgaaattatattgaagctgctgttctttccagactgaggaagcacagcctagcactagcacaagtacacaggccccagccgcttcccctactggtgtagttcctggtaccaaatatggtaagccaaacctcatggggctgttgacagttggaaggtcttagttgttgtctttgtttaatgagagttcttctccctttgcgggtgtcagagggacacttggggatgtgagacagagaagaaacattaggcctgctgcatctcactggcttagaatttgaaataaagccaatttcttacctggaatgactgtatgctggattttgtttttgcagcagtacctgacacgtccacttaccagtatgatgaatcttcaggatattactatgatccgacaacagggctctattatgaccccaactcgca

SEQ ID NO: 105838 - DNA, 1050 bp, Homo sapiens
atcatttgaggtcaggagttcgagatcagcctgaccaatgtggtgaaaccccatctctactaaaaatgcaaaagattagccaggggtggtgacaagcgcctgtaatcccagctacttgggaggctgagacacttgaatcacttgaacctgggaggtggaggttgcagtgagctgagattacgccactgcactccagcctgggcaacagagcgagactccttctccaaagaaatagaaaaaggtagtcacccaggaatccatttcttaggctccaagaaggttggtaccaggaggctgtcaggcctagcactcaaggacctgactgctccacgcagttgacaaaatgtgattcattactaaagtgtgacatgcagtaatggggatttgttaacatttcggatgaggcattactttatccaggtacatagccaccgccatcttcctattgtacatttccagtgacctgtcctccttttgtctccagaggggtctggttgctgcttacagtggtgacagtgacaatgaggaggagctggtggagagacttgagagtgaggaagagaagctagctgactggaagaagatggcctgtctgctctgccggcgccagttcccgaacaaagatgccctagtcaggcaccagcaactctcagaccttcacaaggtggccatgcttctgagctgatctgagggggcgaggggaggcagtgagacaatttgagtgccctaacagtcctgacggttccaaaaatacctgccatctaatgatggccttacagaaagctgttcccgatgacagtggacggagtctggcagctccacacacatcaaactatagtttttatgtgattgtgtattgtttgggctttggctcttaaagtacagtagatgttactaatgttaggacatttcaaattaagatggtctgagtccttactgtgtctttcaaatcttttgtgtagcaaaacatggacatctatcgacgatccaggctgagcgagcaggagctggaagccttggagctaagggagagagaggtgaatgggaaac

SEQ ID NO: 105839 - DNA, 1055 bp, Homo sapiens
tttattcctccagtccttatacttgctcctggtctcttctggagaaatccttgtcttcatatacagttttctctcttctgtctcctggtgggtggtcctgctgggtaaggagtgggcatggtgagaggtggagcagcccataccctacctcccagctgacagtctctgtgctttcccaggctcaagttcggctaaagggagctggcctaggagccaaaggcagcgcatatggtttgtcgggcgccgattcctacaaagatgctgtccggaaagccatgtttgcccggttcactgagatggagtgagagagagagagagagagagatgacaaggagcacaagaagtggtccatctcccgaattcgctgttaccgcctgtctctttaagggcatgccttgtgctgttaatagatcttagggtgaaccacttcattctgcagggttctccctcccaccttaaagaagttccccttatgtgggttgcctggtgaatggccttccttcccgccagagggcttgtgaacagaccggagaggacagtggattgtttatactccagtgtacatagtgtaatgtagcgtgtttacatgtgtagcctatgttgtggtccatcagcccctcacattcctaggggtttgagatgctgtaggtggtatgtgacaccaaagccacctctgtcatttgttgtgatgtcttttcttggcaaaagccttgtgtatatttgtatattacacatttgtacagaattttggaagattttcagtctagttgccaaatctggctcctttacaaaagaaataccttgagaaatgggtgtcctgtgtctctttattcttgggtgggtaggtgggtcaagcatgtctgagccagtcaagcctggtgatgaaatcagtttatttcttgcccccatcaccacgttctgattgattgattgattgattttgaggcagggttggccaggcgtggtggctcacacctgtaatcccaacactttgggaggccgaggcaggtggattgcctgaggtcaggagtttgagaccagtctggccaacatgg

SEQ ID NO: 105840 - DNA, 1049 bp, Homo sapiens
caagatagggtgctcacagtcaagctggtggaaaaagcaatggatatccagttggtcagggccatctgggagcccagcacctgctgtgtaccaggccctgtgtatccccctacactgggtggtctcagcctggttatgcacacatgaagtggccctcagtgaggagcaggcgcccaccaagtgtgtgtggagtgagaatggagaccaacacttcaagaaactgggctcccaccatcttcctcccagagtacacgtgggtggcacagagaaggttactctcagaagcactgctggtcactgtggctccatgtcatagttttttcatctgtgccttggatggacacagcagttgacaccccaggcctcaggggctcaggctgggcactccctgccctgccctgccctgggtcctgctgtagtggggaggtgccggttcctgcctgggtagggctggaccctccaagctagaggtgctggcataaggggccacactgcccagggtagataaaggaacaaaggcaggaactgggccaggcttgggtttgctgcccgcccatccgcctgggcaccccagccaggtctagagccagaagggtgtgagggtcaagcagcccagggttccctcagattaggggggctcctatggcccagcttctgggcttcagcagcacagccaaaatcaggcagaagtgagggtcaaatggagatttccaggagcaggtgaggtgtttgttcattccttgctcttgagagagtggagcctgggctggaagcctggacagaccctccttccttcacccatccatgcctgggcctggagtcccctacactgcagaatcactgccaaatctcagagaaaaagctcttccttcccccaccttgagatgacccaggctctggggcaccacctccctccgtggcagcagcagggaggtgtgagggccctgccaggccctttgttcagcctggggagtgtttactttttcccaggaagctaccccacgacacactgctgctgcctgggctgggtttggccagggattggggcc

SEQ ID NO: 105841 - DNA, 1671 bp, Homo sapiens
ctaaagagggtctgcctaggtttcctgtgaggaaggaggcttacgggggctgagcggcttcccaggtcactcaggagcaggactgagatggagcctgcatccgcctgatgcctgaggctgtcccaggactgagagtggagggcagggatggtggtggtgctggaggcacagacccttcacatgagctaggaacaaggaagattccagcattctgcagtgctggtttaggcttcctagcctcgtttcccaaagaaagggctggggtcgcactgggcaggctccccatgccctctgtctgccgaagcaacggaattggggtttgcttatttccaggctataaatccggccctccatcactctggcccttccactgagcagggtccctaggaaggcctctcatgtcagagatgggaacatcagggcctaagagaggaaagggctcctgttccagagcagcctggagtttgagccctccaggccaatagcccagaacagtgccaccgctcacatcatttgcatgtggcatcagaggaccaaggttgccaggtttggagatgatgaggttagaggttaggaagggtcacagcccgttgacttcccctcaggagttgatgtgagttgaggtgcctctagcaagccttgatggggccttagccctcaggcctggtgcaggagtaggggtggggctggagagctagaggacatgctcttgccccccaggggctccttggccagccagagcaaggcatggggctttggtgggggaggagggggaggaggcccaggagctttgaggccagtgtggcaccagggagctgggcaagggtcaggtggctctggcagctacagtgggggttggagctcacaagccagggagggtaggtgttccaggatacgccaggatgagggaggaaggaagacccaaagcatgaacttgagcccagatcccttgaggccagatctggagtttcagttttctggaaatgggagctgccttactcctgagagacttggaagtggccgctttggagttgggaggtcctggaagctgcacatcccccaactggctaggaattggtctttggagagaatggagacagggtccttgtgcttgctggagaacctgcctgacgcccagcctgggtcagccaggccaggggctggggctttcagctgtggccttccaggtcaagtggagcttcagatgggacctccactgtctgggcctccgcagcacaggccttgtctctggttccctggcatgatgcccgcccctccttccctggctccagcttcccttggcactaagtgaggagctggtgcatgctcaaggagtaaatcatgttccttggcagcccccactgcttcgtaatcgtaaagaatttaaagagaaaccgccaagataaaaatctcaccagcccataaaggcatctttcaccctgcagcttgggagacagtgagcctcagagtgggctcttggctgtctgcacctgtgtgtatgcacctccggccccttgactcctccagaggtggtaatagctcagaaggtggctttagggccatgggtacctggtccttgactcctgggagacctccatctcctcactcaggagagtggggtgcttaaatttggtgtaatgcagaagtggtgatggtggtggctgagctagc

SEQ ID NO: 105842 - DNA, 1030 bp, Homo sapiens
cccacctgggcctcccaaagtgctgggattataggcatgagccactgcagctggtctattagctatgctcttgaggtgatttacatttgttgtgtctgtggggtagaaatactgtacagtggtgttggcagctcttcctgattttgctttcagtgacctcaggttggtagcttgaaattagttgtggcaggagtattcacaccacagaaatgggctattgctactaatcagagctgatagttactaatcccaaccctcccagagccagtggtgaaacactgaccagcactccactggagataggatcatgccccagggagcctgagcggggagataaggccctgccctggaagtcatctgagctgtgccctggccctagcaaacagcagccccccaactgacccactggcctacccacagatgaggagctctatgctggtgtgtacatcgattttatgggcactgatgcagccatcttccgcacacttggaaagcagacagccatgcgcacggatcagtacaactcccggtggctgaacggtaagcgcagccccaggagcccttccgtggccatgtgtctgggatgcggcaaggaggtcgtaaagaagcacatgtgggggaagtggggacatgtttagcctatgactacctggggcaggggtagtttcttatctggagaggagttgggggtgttcttgcacctggctggggattctgttggagaacatcaggggcaccatcagagtaggggctcacccagctgacccctgccacctgcagacccgtcgttcatccatgctgagctcattcctgacagtgcggagcgcaatgatgataagctttacttcttcttccgtgagcggtcggcagaggcgccgcagagccccgcggtgtacgcccgcatcgggcgcatttgcctggtatgcattggcagagccaccaggctgccccttccaccagttctggcttcatcagccctgctccagccagggcttggggtcaagagctgatctgacccggcctcttgccc

SEQ ID NO: 105843 - DNA, 1084 bp, Homo sapiens
gagagcagcggatctggtccaatgcagttctgactccatgtagtcaggactgggctggagaagctggtctcagtgggggacaggggaagcttccctccagaggtaacctggagtcagaaggatgggccagaggtaagctggccatgacggggggcaggctgagcccaggttcaggggacagcttcaggaaggaggagagtgagcctggtgtgtgacaaggacgtcggggcctgcagtccagctgtgcaggagggagacgggtgagaccctaggaacaaccagagaggaaggagatgacaggggtggggagggggacatggaagggagtggtccgcttggccaaatgctgccacgaggtcatggcacctgaggccagggaggtggctgtggcatttggccacctgggaccttggccagagcaggacctgtagaggtcaggtgcagggcagaaacttggagagcgggtttggggagaggagcaggttgaggtagtggggacagacagtgcagcggcctcttctgaagctaatggctccagcctgccctgcccaggcagcctgggactgacactcgccacctgtccacagtgccctggtggaaccttcacgccatctatgaagtccaccaaggattatcctgatgaggtgatcaacttcatgcgcagccacccactcatgtaccaggccgtgtaccctctgcagcggcggcccctggtagtccgcacaggtgctccctaccgccttaccactattgccgtggaccaggtggatgcagccgacgggcgctatgaggtgcttttcctgggcacaggtacccactgctgctcccggcctctcccacgctgggcccaccgggtgcggggtgcagatccttggggctggggcttgccctgctagggcttgctgcaagctcatcagagtcacttcttcatcctcatcctttggtgccttctccctattgatgggataacagaggctaggggtgagaaaaccccattcccacttccatccccaggggcccaggagaacagggacactgggcatctggggacttatgtatgtatggcaggaaaggggtggagaca

SEQ ID NO: 105844 - DNA, 1139 bp, Homo sapiens
gctgtccagcaacagagctcccggcgctccgcacccaatcacagcccggtcccgcctgcagcccgcccagtgccgggtcccggggtttggaaccacccctattgccttttctccgcgtggccccgcctgcagcccaggcccgagcctgggctgcgcctaacttcccccttcgctccgccctcgagccaatcaacagcctctaatctcctctggccccgcctgcaagcccgccccggcccagtcacaggcttggttcgcccaggccccacccccggcccgccccgccgtcggtgcgcggcggtagggaaggcgcctcccgcagtcgctcggaactgccgacccgagtgcttcccgcagagggctggtggtgggagcggagtgggtcgggcggggccgagccgggccgtgggccgtgtgggggccgggcggcggccgggccggcggacggcgggatgggctgcaccgtgagcgccgaggacaaggcggcggccgagcgctctaagatgatcgacaagaacctgcgggaggacggagagaaggcggcgcgggaggtgaagttgctgctgttgggtgaggccgcgtcccgcactgggatccttgattcccagctcgaatccccagacaaggactttgacctcccagactagggcttcaaactcccagacccgggctgtctgggaccccacacctgggccaggaccagggttgaaaactctagattggactagacctttgatcctgcccagactctagaccagacccctgtctcatcccagaccccagacctccaaatccagtcaacagtgccccaacacccgcggtccagtgccctgcttggccatccccccttgctaactagcttcacagaacttcagagccccgccatccttccctacactttgcccaaacccccaggatgcccgccacttgttccccaaccctcaggctccgcttgttttcctcacctgcgccttttattcctattgggcatgagcatcccgcggggcccctgccaggccccccacccactccctccttctccttctgtgccccatccctagtctggaatctgtatcctccacctgtgcactctgacccaaggaacctctcgagtgggaaactgctcttgagccccatct

SEQ ID NO: 105845 - DNA, 1050 bp, Homo sapiens
ccaggggtgcagggtctggcttagcactttctagcctgggaagttcaccctggggtcctggccttctggcctttgcttactctgtgaaatgggcttcctgggttttggccaaaggagtgccccaggtcaggatggggagggagaacaagagcctcctggtggttcttgttggggatgtaggttgggagtaaagaccctgcagtgtgctgcaaagggctctgaccaagctctgcttgatattgatgacccagtctgccatggctgcctggggagggatcctggcttgagccatgcctttcccatccaggtgcaaggtggtgatgggagcccagctgtggtaagttcagagttctgggcgcctgtcccatgtagcgggagactttgtccaggcaacgggactcaggttgggcaactgccagccttccctcccagccagaaccacgcctgctgccccgcccgcacaccgcctccctcccatcttgggtagccctgccagcaggcaggcacagtccttgtcaccagggcagaggctgatgtggtacacacaggcaagagagtatttcctggcaactttgtagggggagcagataccagtcctattctagggatgctccccactcctacccagctcaacgtgactgatcagctaggcccaggtggaatctgggaccctggtctgggctcttaagggaaaggaagccagagtgtatgtgaggggggagagtctctgatttgggatgggcctgtgtggacagcttcacaaaaaaaggagacagtgtccaccattggctccataaaggcttcagaatgtaaacagagcagttctctcttgcccctggaactttgtgtgtgttgttccctacttgattgttctttaaaactttactctgggatcacctcccaggatccttcctggacatcctccctcgaccaaggctggtgaaacatctggctcccagcgctgttgcttcccccctcagatgcctggagactgcagggcagggctaagtcctcttcatttctgtgcccagcatggagcctggcatctac

SEQ ID NO: 105846 - DNA, 1039 bp, Homo sapiens
ctgggttcaagcgattctcctgcctcagcctcctgagtagctgtgactacaggtacgtgccaccacgcccaactaatttttgtatttttaatagagacggggtttcaccatgttggtcaggctggtctcgaactcctgacctcaagtgattcgcctgcctcggcctcccagagtgctgggattacaggtgtgagccactgcgcccggctgcagctgcaccttttgacttcccactttttctcctagtccgtatcctctcacagtgatgctcaagttatagctggcaatttaggacttcattctttccctaatattatgcttgttctcccataagccccagtcttagactgagaccaagcctggggaaggctcagaagctattgaagtccatggtgagggcctctgagactgggaattgtccagaggagtgaaatgaaagcatgttccttagggctgcactgtgagcacaggctcagtgctgggtgcacgtacggtactgtgtggtggtagaatgtggccatggtgttggctgatgactgcatgatagttgttgaggctggttcctcttgctccttggcctccgaatctcagtgctgtggcctagtggggccttgccctctcttgtaggggttcctaggggttctgctgtgttgccaggccaggccgtaagggactgagggggctgaggaaggcttaggagagccagagcagaagcgtccaagcctctctgggccatgaagccatgcacagagcagagacccgtgcatcctcatggccacccaagactgtgggtcccagagggtccagttcctcaccatgagacctcagactgtcctcttccctctctgtatccagcactagaatctgtgatgctgtgattttttttttttttttctgagactgagtttcgctcttgttgcccaggctagagtgcagtgatgcaatctcggctcaccacaacctccgcctcccaggtttaagtgattctcctgcctcagcctccagagtagctgggattacaggcatgtgccaccatgcc

SEQ ID NO: 105847 - DNA, 1041 bp, Homo sapiens
gatgcaaagcaagtttgcaccctcgtccctgggcagggtcacgaagcggcccacatcacctactaagagtgggcaaaaggccagaccccctcttcactctcagtggccagatagggaaactgatgcctcaagtgggcaggagtcccgaagtcacacaagatggggaagctttcaccctagacctcaggtcccccatgccctgggtagcttccctgctgagtctgagctcgcctggctcgggactgcatggggacccatgacttcgcatccttggcctctgctcctgcagttccccccatcctggctgtgactggctcctggttcttcctcctgctctggaggagccagtggggaagacagtcaggtagccactgctgccctccctgccccagtgggtgctttgagccccagggggatgggccttaagtgttcaggcatcgctgtgaggctttcctgggacctttccccatgtcctcattggcaggtggaggagtgttggtatgcagatcctggctgcccctttgccatgcacagcccaatggggagggagtggtgctggtatatatcccggtacacaccccagtgaagatactgggcccggcccctgtagtgcccaggggctaaagcaatagaggggattgctgccccagccacagcgccccagccttcccagggcctgcacatttgtatgtccacaagattgtgcaaccatcactgctatctaattccagaacataatcaccaccctcaaaaataaacttcatacccaactagctgtcactccccatctccccagatcccctcccctcatcctggaaagcaggcctgggacagtcagaagctcagtgattgcaggcgcctgatggcatttgtgaggagggctcaggcctttcccctcagggtggtctctggcgtagggggctgaaggtgggcaggggccttggcaaggcctgccaccatgtcccaatgcctgctgccgcttgttgagcactgcagacatggcccagagtctgcctggggagctagggagtgaacccagtg

SEQ ID NO: 105848 - DNA, 1070 bp, Homo sapiens
tcatgcctataaatcccagcactttgggacgccgaggcgggtggatcacctgaggtcaggaccagcctggccaacttggtgaaaccgcgtctctactaaaaatacaaaaattagccgagcatggtggcacgtgcctgtaatcccagctacttgggaggctgaagcaggagaattgcttgaacccgggaggcagaggatgcagtgagccaagatcgccccattgcactctagccttggtgacagagctagactccgtcacagaaaaaagtaaacaacaacaacaaaaaggttttagggcaagtctcatcctagggaatccaagaataccctagcctgggccccattccagaggtctccctgcctctggcagagtgggggtacattccttcaactgcctgaccacccgccactgtgcccaggacgacgccaggcagctatttgcactgtcctgcaccgccgaggagcaaggcgtgctccctgatgacctgtccggcgtcatccggaggctctgggctgaccatggtgtgcaggcctgctttggccgctcaagggaataccagctcaacgactcagctgcctagtgagtgctctgaggggctgggcagggcagggcaggggctgggggaggactaaaggctggaccggagggcctgagaacccccagaaggacactgctggtctttgcttatgaaaccgatgactgttaaccaaggccttcctgttttttggtttggggggtgggtgggtgtcacgttactgaaaggccaggaggaatgacaggcaggtggcttatacagtacatctcttccaggccagttgagtctgatctgtcttgacagtcttctaaagaacatttgcggccgggcgtggtggctcacgcctgtaatcccagcactttgggaggctgagacaggcgggtcgtgagatcaggagatcgagaccatcctggctaacacggtgaaaccccgtctctactaaaaatacaaaaaattagccgggcgtggtggagggcgcctgtagtcccagctactcaggaggctgaggcaggagaatggcgtgaacctgggagg

SEQ ID NO: 105849 - DNA, 1051 bp, Homo sapiens
gtggccctcaggcgccccccactggacagaagtgtaaccttggaacactggcaggggctggtgcctcacttaggcttgtatagttgtgtgtgcacacatgaagcccttaacacactcaagcatgtacccctgaacatgtgtacatgggcatcctccttcacacagtggggtacccctttgcacatctggcatgtatgggcagccacaaacattgtcatattatgcacatgcatgcacaggttgtatgcctggccgtccacacgcacagacccttgctgcacacgtaggatgcggcctgcctgccacacatgcagcacaagtcttcattttctctcccccaggggccaacaaatatgatgaggcagccagctacatccagagtaagtttgaggacctgaataagcgcaaagacaccaaggagatctacacgcacttcacgtgcgccaccgacaccaagaacgtgcagttcgtgtttgacgccgtcaccgatgtcatcatcaagaacaacctgaaggactgcggcctcttctgaggggcagcggggcctggcgggatggtgagccagaggggctgtggcagggtgctggggaagaactaagcgggcctggagccccagcagggggttctgggggtgggtaggggggtgaacctggagggggaggggcaataggtgaccaggggacaagggaggagaaggcccagggtgtgaatcaggaggtcaagtgagtgaggtgcagggcatggaggaggtcatacaagcaggcctggcccagtggtccagacagaagggcctggccttgccctgggacagaaccagaggccatcctgatgttccctggagaaatctcacctcctcacccaccaggccattggcccagcctgccggaagctgcatgccagcggagcccagccctgctgcccactaccaccagctccatgtgcacctccagctcttgccctctgacttgtctgagcgtcccgggcttaggctggccccactggccctggtggaggtggggatgactctcccagtgccacagactcccctccc

SEQ ID NO: 105850 - DNA, 1224 bp, Homo sapiens
gagtctcccaaggctgcgtctggaggggcccctgcttctccagcctggacccccagctttgcccaacaccagcccctgccccagcccaagtccaaatgtttacagggagcctcctgcccagtcccccaaccccagccgctcggaggccccaaaggaaaaagcacaagaagcgtgagacgccaccattcctggaaaccacagtccacctgctcattctcgtagctttttaaaaaaatgaaagtaaaggaaaaaaaaaaaactgcaaatctagaaaactttttagagaaaaactatttaaaactgtcagatcctgaccagcaagcccccccccagccccccttccaagtgactccgtgccttgagtgtgtctgcgtgtttacacccgtccctctgctggccgcccccgtgcgagcggcacccctgccctgccctccacagaattgggttccaagggctgttccagacaactgccaacgtcactgagggccctgccccagcggccctggccccaggctctattaacctaaaatgtagctccctagcgctaacctaggaaccgccgctgcctgctggggggccacgcccctcatgcccttgtcccaggcccggggccttcagcgttgaacacttccttgcttttttcacatgttttatggaattgttcacctggtttgaaataataaaatgtagaaagaaaaaaaataccgagaactgatgggtattctctcccaggggcagaggcctgggctaaggtgtgccaaggtgatggtggtcctaacctcagtcctcaacctgagtcagggccctgactcagctttccgggccgtcctggagccccacgctctgagcttcatttctcccacctggactaggcagcatacatgtggggcccgtgtgtccccgcccttccagtactctgcagccttgggtctcgggcagctgggcaggcttctaagggagctgttgtaaggtgctcttccacacctggagcaggaggggtggccggcctctctagcgcggaaggagaaagtgacttccgacttaggtaccaaggcctgagagtgtccgttgccaaggccacacagccaggtgggccgcatgcagtcctggcttgactaaaaaggccagtaggggccttaagacatattcagaaagttccctgccccagagggccgccgccaaacctgaagggtagtgacaggtggccatactaccatgtgatgg

SEQ ID NO: 105851 - DNA, 2901 bp, Homo sapiens
cagccttggtgagagcgggtggaagtttgacaggggcttggtgagggctccatgggctgaggacaagaagcggtgctgaccaggtggccttgcagggggggatgtcgtggatgagcagggccagcaggaagaccttgaggaaaagctgaaggagtatgtggactgtctcacagacaagaggtacccctggctgccagccaactcctacacccagctccaagtgtgatcaagggagggctggcccatatgaccccccttctcgacctcccccagtgccaagacccggcagggtgctcttgagagcctgcgcctggccctagcgtcccgcctactccccgacttcttgctggagcgccgcctcacgctagccgatgccctggaaaagtgcctcaagaaaggttggacctgggggtgtgtgggagacttaaactgggcagacactggcccttgctgcatgggctgactggaaagcatcccacagggaagggcgaggaacaagccctggctgctgctgtgctaggcctgctctgcgtgcagctgggccctggacctaagggtgaggagctgtttcacagcctgcagcctctgctggtctctgtgctcagtgacagcacagctagccctgctgcccggctccacgtgagtgtgcctgtgccccatgaaacccttcctgcaccttatccctcagcagagtggtgggttccccctatcttcagcctcctttactctgaggggagtgagctccagggctgggaacccaggttcacccgctgaccgtggcattgcattgcccttctcccaacagtgtgcttctgcccttggcctgggctgctacgtggctgccgctgacatccaggtgaggggtctttgggcacaggtggtagagcatctagggctgtaactctgcctctgagctcccctgcctctctgtgctcctaggacctggtctcttgccttgcctgcttagaaagtgttttcagccggttctatggcttggggggcagctccacaagtcctgtggttcctgccagcctgcacggcctgctctctgctgccctgcaggcctgggcattgctgctcaccatctgccctagcacccaaatcagccacatccttgacaggtaggggtggctgtccactgggagggggaggggatctcaaagaggcccccaagccacacatatagctcagcctgccccttccctaggcagctgccccggctgccccagctcttgtccagtgaaagtgtgaacctgcggatcgctgccggtgaaaccattgcactgctctttgagcttgcccgggaccttgaggtgcgagggacaaggatggggggtgcttggtgacaccacctgcccatcacaggctggatgcagggggtgccacacaaaacagaacagctttaggtcattatgcagaggaggtggccccaaaacagatttatctcctagatgtcatgatgggtgccctcagcagtggtgtcctggcctgacagaggccaaggaggggtcaaaggggccaggcagagaagagagggtctctcagtgaaaggaggggtttgggcagtgccctgttcagagccagcagagctcaagcatctaccacacaccctccaatgctcccattgcaggaggagtttgtttacgaggacatggaggccctctgcagtgtcctgcgcactctggccactgacagtaacaagtaccgtgccaaggctgatcgtcggcgccagcgctctactttccgcgccgtgctgcactccgtggaggtgtgtgtgagaacatatgtgtcctagcaagggtgcacccccaggcatagcagccaagcccagttgtgttggcacctctaccctgcagggcggtgaatgcgaagaagagatagtgcgcttcggctttgaggtgctctacatggacagctgggctcggcaccggatctacgctgccttcaaggaagtgctgggttcgggcatgcaccaccacctccaggtgcggggacggacagggaggggacatctggtgtggttgcttcagtctggcctgagctcactgccctctgccccccagaacaatgagctactccgtgacatctttggcctgggccctgtgctgttgctggatgccactgccctgaaggcctgcaaggttccacgctttgagaaggtttgcacccttgggcacctttctcttccccctattcccatttcctggaggcctggaattctgtagaggccggaagaggacccccagccctttcccttcccagctccccagggtgtcactctctgtccccactctagcacctgtacaatgctgctgccttcaaagcccggaccaaggctcgaagccgtgtgcgggacaagcgggcagacatcctgtgaagcaggacctgctgaagaggagactttctatgcccttggtccgtatttttaacagaagacagtgcaacaactggtctccaccagtatttgtcactttattttttttaatgacaaaaccaaaaacagacatggggtgggtagctgggggcccggacacttgggaccctgacccctttgtccctgcactcagccctgtggccccttcctgtcctgtctcaggccaggctaaatatgtgccttcctcagggctgtggggcaggcactagggggcctttcccttcctttcctttctcaggccttgctcccccaggatgacccactcttaggggggtggtggcatctggacaaatgccaccacagcaggtggggtggcaaagctacctggaatggatttgtgtgctgatttttaaggattattacagataattaaacagaacggtcagccttctgtggtcttaacccctgggtatttttctgttctccctccccatctactatcccaggcttgggcccaactggtcttc

SEQ ID NO: 105852 - DNA, 1164 bp, Homo sapiens
tgccaagtgccctgagaagccagtcctgccttggtgctccactgagggacgcttcggagttaaccaccgtgcacttgttcccgacgcggggctggggcgcgcgcagggcattgtgggtgcatagttcagccagcgcgtcgtcggctggtgggccccaggcgtggactaccattcccatggtgctctacgcgcagctagccgccgtcgcctgcgcgctcaggcctctgggattagtagttttagcctcgtggatgtgggcctgaatcggatggcctggaactcgccttcccggcgacctgtttggcagggcggggcgcctcgcgaagatggtggcgcgcgtggcgtgtggctcccgtcgtctggccaagtctcagcgcagcgcaccggccggcgtctcgttggcctggagcccacacccaccgggtccctgaccccgcgccccccgcgcccggttcccggcatgcctcgcgcccgtaagggcaacacgctccggaagggtggtcagcgccgtggaggaggtgagtggggtggggggcgcgggacagctgtatgagcggcgggcgggggtcctgctggatccccttggttgttctcgagggccctgggtggggaaccccctcggccagccccacgcagcttcccataactctaccgaggctggcacgtgccccagcagtcattggccacgtgcgtgcccaacttgagctcgctgcccactgcctgttgggagtccgcgctcccagcggtgacccggccagcccctccgggcctcagttgcctgctgggtggacaaactcaccggacagggcaggaagccagtcctcttgccaaaccctgatcctttcctggactggtcaaggaagttggcgggagtcctggcctgctccggtgaagagagggagggggctctgttgggaagctacctggttagggccttggcagcttggcaggcctgactccacaaggtagctgagtatcctggagcctgaggcagtcttgggactcgcttatcagcttagaccaggagcctatcttaatgcgttaaacacatatgtttactctgctgggatggggtgcctaccacgcacaaatttatttatttttattcttgagggggaagggaggagggccgggcacaggaaggaggaaaatacctaggcacaa

SEQ ID NO: 105853 - DNA, 1032 bp, Homo sapiens
cctggatcctgaacaccagccagaggagaccccagctcctagcctggctgagttgaccctggagcctgtgcaccgccgacccgagctcctggatgcttgtgctgacctcatcaatgatcagtggccccgcagccgcacctcccgcctgcactccctgggccagtcctcagatgccttccccctctgcctgatgctgctaagcccccaccccacacttgaagcagcacccgttgtggtgggccatgcccgcctgtcacgggtgctgaaccagccccagagcctcttagtggagacagtggtggtggcccgggccctgaggggccgtggctttggccgccgcctcatggagggcctggaggtctttgctcgggcccggggcttccgcaagctgcatctcaccacccatgaccaggtgcacttctatacccacctgggctaccagctgggtgagcctgtgcagggcctggtcttcaccagcagacggctgcctgccaccctgcttaatgccttccccacagccccctctccccggccacccaggaaggccccaaacctgactgcccaagctgccccaaggggtcccaagggacctccattgccaccaccccctcccctacctgagtgcctgaccatctcacccccagttccatcagggcccccttcaaaaagcctgctggagacacaatatcaaaatgtgagggggcgccccatattctggatggaaaaagacatctgaggccatccagggcaaggaactgtctttctggttcaatagactgccccgacagtctacaagcctcagcccactgaccatacctcagcccctagcccctggggggcagctttaacctgggcatgtttcctgggtaccagtggggccaggaggtggctctggctcagagccgtcagtgtggctgaataaaggctctcttgggtatggctgtgacagtttatttgttgatccccctaccctcacctctcacctcttctgcaggtcccttatccctgcagaagtctccagatccaccttgg

SEQ ID NO: 105854 - DNA, 1155 bp, Homo sapiens
ccatcaacatgtctggctaatttttgtatttttagtagaaatggggtttcaccatgttggccaggctggtctcgaactcctgacttcaggtgatcctcccacctcagcctcccaaagtgctgggattacaggtatgagccaccgcgcctggcgcatgggcacatccattgagtgtgcacttggtgccaagttctgtgccaggcacaggcaattcaacatttattggaatgatgtagtccctgtctgcatggaattcataggctagaggaggaagcagtttgcctctggtcccatggccagagcagccccaggtgaaggttatgaattatttgtcccatctaatggtgttccagcagtctgccacatggtgggaaggaggccccacagagctgtgctgtctccttcccaggatgagctggagcacagcctgggggagagtgcggcccagggggcagctggagtggtgctctgggtgagctgggaaaatacaagaaccaaggtgagcttaggcctggcatgagggtgggggtgggggaggggtggggccattaagctgacggggtagaccctgacttaccctttctacctgcaaagtcctggctgaccagcaggtgagtgcctcagtgccctgggtgggtccatacatggccatggtgtccctgacgctatcctcccttcccacctaggaatcatgtcaggccatcaaggagtatatggacactacactggggcccttcatcctgaacgtgaccagtggggcccttctctgcagtcaagccctgtgctccggccatggccgctgtgtccgccgcaccagccaccccaaagccctcctcctccttaaccctgccagtttctccatccagctcacgcctggtggtgggcccctgagcctgcggggtgccctctcacttgaagatcaggcacagatggctgtggagttcaaatgtcgatgctaccctggctggcaggcaccgtggtgtgagcggaagagcatgtggtgattggccacacactgagttgcacatattgagaacctaatgcactctgggtctggccagggcttcctcaaatacatgcacagtcatacaagtcatggtcacagtaaagagtacactcagccactgtcacaggcatattccctgcacacacatg

SEQ ID NO: 105855 - DNA, 1118 bp, Homo sapiens
ttgaggtgggcacttccagtattccctagactgacttgttctccccaacccttcttccagttcctgagctggtgccaggcaggtgacacctcctgcagcccccagcatgcgggcaggcccaggccccaccgttacattggccctggtgctggcggtgtcatgggccatggagctcaagcccacagcaccacccatcttcactggccggccctttgtggtagcgtgggacgtgcccacacaggactgtggcccacgcctcaaggtgccactggacctgaatgcctttgatgtgcaggcctcacctaatgagggttttgtgaaccagaatattaccatcttctaccgcgaccgtctaggcctgtatccacgcttcgattctgccggaaggtctgtgcatggtggtgtgccacagaatgtcagcctttgggcacaccggaagatgctgcagaaacgtgtggagcactacattcggacacaggagtctgcggggctggcggtcatcgactgggaggactggcgacctgtgtgggtgcgcaactggcaggacaaagatgtgtatcgccggttatcacgccagctagtggccagtcgtcaccctgactggcctccagaccgcatagtcaaacaggcacaatatgagtttgagttcgcagcacagcagttcatgctggagacactgcgttatgtcaaggcagtgcggccccggcacctctggggcttctacctctttcctgactgctacaatcatgattatgtgcagaactgggagagctacacaggccgctgccctgatgttgaggtggcccgcaatgaccagctggcctggctgtgggctgagagcacggccctcttcccgtctgtctacctggacgagacacttgcttcctcccgccatggccgcaactttgtgagcttccgtgttcaggaggcccttcgtgtggctcgcacccaccatgccaaccatgcactcccagtctacgtcttcacacgacccacctacagccgcaggctcacggggcttagtgaggtatgtgtctccagggccctgccttttttctccttccttgaggatccactgcacatttgggttatcaggggccactataggactatacctg

SEQ ID NO: 105856 - DNA, 1054 bp, Homo sapiens
ctggggcctagccctgctagaggctacagcactttacaagcaaggtatgctttcttccagcccctaggctgtgggcactgtatacaagtaggaacttcctttccttcacttcccttttaacccctagtcagagcatttcagccgtttgctacctcgattcctcctgtgttggacagaggctgggggcagtgccagcctgattcttccgacctacctgccatttgttcccgccttcagatggatggacagtttgctggctattgataggagtggggactgggtgggggcttctccctctacccagggctgggctgatccccctactgcaactaactgttgccccccaaccccgaacccccagttgaggagttgagagagtgcaggctggggtcaggacaggctgcggatgcttgtgcctatggggagttactccaacccacctattctgtctaatctccatggctttgcaccaaatcctccacccctccaattgggaggggactgttcaccaccttgtggtaagggacaacaccctaaggctggtgccagtagttatgagtagcctaccaccccctcccttacagtaacccccaccccttcaggatcagtcaagggaaagcactagaacccctgggtagggaaagaaaggagggaaaaaccataaaaggaatacttataatgtgaaggtttgtaaatagtccatgatgatgtcgtggcagagtctgatttctatatagaggtgactttttttttaagtactgtgcaagctctgtgcttctataatgtgggaaatggcttggggaggatggcccctagcttaggaagactgttgtgttatttgttcaatttcaataaaatgatttgtagatcctgcacatgagagtggcatcctgtgggggctctgacacccagtgtctagactaccacctgggttcaataggtaggcctggcacaggactctggcaggccccctatgaccagcaaagcccaagagtaagtctgagcccagcctgtggccatcccaactgtggccagcaggtggctgtgtgttcac

SEQ ID NO: 105857 - DNA, 1028 bp, Homo sapiens
tccaggcctgcagcaggagtggtgcagacagaagtctcctcaatttttgtctcagaagtgaaaatcttggagaccctgcaaacagaacagggtcatgtttgcaggggtgacggccctcatctatgaggaaaggttttggatcttgaatgtggtctcaggatatccttatcagagctaagggtgggtgctcagaataaggcaggcattgaggaagagtcttggtttctctctacagtgccaactcctcacacaccctgaggtcagggagtgctggctcacagtacagcatgtgccttaatgcttcatatgaggaggatgtccctgggccagggtctgtgtgaatgtgggcactggcccaggttcataccttatttgctaatcaaagccagggtctctccctcaggtgttttttatgaagtgcgtgaatgtatgtaatgtgtggtggcctcagctgaatgcctcctgtggggaaaggggttggggtgacagtcatcatcagggcctggggcctgagagaattggctcaataaagatttcaagatcctcctgctgttggaatcttttatacatataaagtttttgtagagacatgagtctctctgtgttgcccaggatcctcccaacttggcctcccaaagtgttgggattacaggtgtgagccaccctgcccagcctggactctttattattataggcgcagagctgcagttgcccctcatggtgccagaagttgccaagggtgatggacaggctcccaggtgtcttgcaaagtcaccatggaccaatttgtgaagatgtagtatgcatacatacttggtcatcactcagctccctggggctcaggttgtggtggagacaaaaatggactgcagttagaacttagggaaactggctgggcatagtggctcacacctgtaatcccaacactttggttgggctaggtgggcagatcacttgaggccaggagttcgaggccagcctggccagcatggcgaaaccccatctctaccaaaaatacaaaaaaaatt

SEQ ID NO: 105858 - DNA, 1027 bp, Homo sapiens
cagcaacctcttcatgagcttggtgagttgactgctcaggaagggggcgtggggaggagcaggtacccagctatgtgcctgatactcagagggtcacaactgaggttatcttgggtgggcgcaagcagtaatttgtgcatacccagcctagccccaagtagactgacatctcacctggaacctattatcaaggtttggtttctctatttctttagaacaaggacggttcttacacaggcttcatcaaggttcagctgaagctggtgcgccctgtctctgtgccctccagcaagaagccaccctccttgcaggatgcccggcggggcccaggacggggcacaagtgtcaggcgccgcacttccttttacctgcccaaggatgctgtcaagcacctgcatgtgctgtcacgcacaagggcacgtgaagtcattgaggccctgctgcgaaagttcttggtggtggatgacccccgcaagtttgcactctttgagcgcgctgagcgtcacggccaaggtgggcttcccaccccaccctgccctatgtgagggtatatacgcatgcacctgagcatgcaggggctgagcagctggccctgtctctgatcattacttccccttcacagtgtacttgcggaagctgttggatgatgagcagcccctgcggctgcggctcctggcagggcccagtgacaaggccctgagctttgtcctgaaggaaaatgactctggggaggtgaacgtgagtacatagttcttagtttcttggttgtcactagacaggactgatgggctgtagctacagtaaggcttggaggaggaattgtgctggaagacaagccctgcaaaacagttccaggagtgtataggcattgtaactaaagcaaaggcttccagaccactcatgccaaagcctagggttgtcccaagaagccaggaagaattgccttggtgctttgatctttcctggtgtggaaaatcttctggagatgcaggagtccatctaatgacatgaggaggcccccttcaga

SEQ ID NO: 105859 - DNA, 1038 bp, Homo sapiens
tcgagttaaaaatctctgggtcgggtacgatggttcacgcctgtaatcccagcactttgggaggtgaaggcaggcggatcacttgaggtcaggagttcaagaccaacctggccaatgtggtgaaatcccatctctactaaaaatacaaaaattagccgggtgttgttgtggcacgcgcctgtagtcccagctactcgggagtctgaggcaggagaatcgcttgaacccaggaggcagaacttgcagtgagccaagatccagccactgcactacagcctgggcgacagagtgaggcttcgtctcaaaaaaaaaaaaaatctttgggccaaatctccagacagcacaggcaggtgcagaaacccaccaggaagctgcctgtgtacctctggcagattggagcctggcctaaagctgccttttatgcagcttgggtcaaggttaaacatcatgtcacagtgatttttctcactatgtgtgagacatggagaactggctccaagtactactctgtccactggtggctggactactgatgtgcaccactctccactcctctcaccctgcagtgggtcatggccccgtgccggggcagaggagaaaaatgggctgccttctccaggacaaaccctcactccaactcaactagggtgctgtgatcagaatgtgcaattgaggtgtgattttactgattttttttttttttgagaccgagtttcgctcttgttgcccaggctggagtgcgatggcacgatctcagttcactgcaacctccacctcccgagtttgagcaattctcctgcctcagcctcctaagtagctgggattacaggcatgtgccaccacgcctggctaattttgtatttttagtagagacggggtttctccatgttggtcaggctggtctcaaactcctgacctcaggtgatccacccgcctcggcctcccaaagtgctagaattacaggcgtgagccaacgtgcccagcctgtttttgttttttgtgttttgaagcagggtctcactcagttccccaggctgg

SEQ ID NO: 105860 - DNA, 1033 bp, Homo sapiens
cagagtgacctttcctctctcctctggccccaggcaactggccctgaaggcactcaatgagcggctgaagagagtggaagaccagtccatctggcccagcatggatgatgatgaagaggagtctggggccaaggtggacagccccctgccctcagacaaagctcccacacccccagggaagggggctgccccagaatccagtctaatcaccttcgaggcagctcccccgacgctgtaactccagaccaccttgagtgtggcacctcccctcccaagccccccttgacatcctctcagctactccagggcacctgactgctctgaggagagggaagaaggcctgctggggctttccatggccttctgctgtttctcgccaacactacccaggactcttgctacctggttccaactccagacaaccactatgccaggcccggagcctctgaggcatcggccagtccaggccctcatctgaggtaagaatgtacatcagctggcagccccaagcaagtggctgcagggacactgatgccacagctcctgggccggccctcacatctgaaactggttgccgagagccctgagccaaggcaaggatttgccaaaaatgttctgggggcccagcaaatgcaggagccgacctggggctgcacatccctgcccatccccagaaagactgttcctgtcaggatttgtttccctctgctgtggcggtgactgcttctggaccagaacagctccagctcccaggtattttctacaggaccacttgagtgggcagccaagcccaggctcgcagtatcaataaagcagttctctgaggaatgactcctgggctcttgtcaggccaccttgtgcagccccctcatcacgttcaactgcaatgttagacagggacttgattgtctccatggtaactccagctggataagaagcccattgccccagctccccaccaccgccaccaccaccaccacatgcgcactgccaagcagccttccaagagctattgcctcagactcttactcct

SEQ ID NO: 105861 - DNA, 1704 bp, Homo sapiens
ctcacacagtgacacctacccacacgccagccaacaaggacacactcgctcagaggtacacgcacaaatagagctactcttcctagggaattcagcaagtgtgggggctagagctgtgttgcttcccgaaccctcaccgccgctttcaggggttagagatgctaattcatcccttcccacctcctgagaaccgacggaaacggtccctgagaactacaactcccagcacaccccgcgctcaccacaacgggaccggtccgtgctcatggcctcctgggacttgtagttctagccagaaccctgttcaactcttccccggctgcaaccaaggactccgtatcccagcatgcagaggagccggaagacaggcgcttagaggacagcccgctgccgccggggacgcgcaggcgcagcacccctgtttgtcggccccccgagagaagaggtacggtcgaagccaggagccaggccgagcgggagctgaccaggcttgactcgggtacagaacgaggcaccagtccccttgcgaaccgaagggcctcgcagtggatggaggaggcccagccctgaggtcaacgccaaccaggctagcctggcacggggcctacagggtgggtaggcgggcgtgccgcagccgtccagggccttccctcaggtcccgggcgaggggcctacgctgcggcccggcaacaaggcccgactcggcccctcgggaccagagccccacccgatcggaagcggatcctttaccagggccataggccagtgactaggccgggcctgggcctcccatcggggccggactaggacgaggccccggggaggcccctggcctaccagacccttttctcaggccgacagccgccaggaagatgcaacgtgccctgccaggcgcccgccagcacttgggggccattctggccagcgccagcgtggtggtgaaggctctgtgtgcggcggtactattcctctacctgctctccttcgccgtggacacaggctgcctggcggtcaccccgggctacctctttcctcccaacttctggatctggaccctggccacccatgggctgatggagcagcatgtgtgggacgtggccatcagcctgacaacggtggtggtggccgggcgtttgctggagcccctctggggggccttggagctgctcatcttcttctcagtggtgaatgtgtctgtagggctgctgggggccttcgcctacctcctcacctacatggcttccttcaacctggtctacctgttcactgtccgtatccacggcgccttgggcttcctaggtggcgtcctggtggcactcaagcaaaccatgggggactgtgtggtcctgcgagtgccccaggtgcgcgtcagtgtgatgcccatgctgctgctggcgctgctgctcctgctgcggctcgccacgctgctccagagcccggcgctggcttcctatggcttcgggctgctctccagttgggtatatcttcgcttctaccagcgccatagccggggccgaggggacatggctgaccactttgctttcgccactttcttccctgagatcctgcagcctgtggtgggtttgctggcgaacttggtgcacagcctcctggtgaaggtaaagatatgccagaagacggtgaagcgctacgatgtgggtgccccatcctccatcaccatcagcctgccaggcacagaccctc

SEQ ID NO: 105862 - DNA, 1035 bp, Homo sapiens
cgcagagactgaccaacaccaatcttctctttgtggtggccgagaagccgctgtgcagccagtgcgaggctggccggctgctgcagaaggagacgcactgtatcctgcccccgccctccccgccgcccgctccccctctgccccgcgcgccccctccgtgccgccgccgccgtccgcctccttgactccccacccatgcccagcggacggcccggagcagtgtgagctagtgcagagaccgcgataccggagaggcccgcacatctgcttcgactacaacgcgacagtgaggagagggggcggtggacccgaaatcccgcggccttgcgcccgcccaggccgaccagctccttgtctctccccgcaggaagatacctcagactgtggccgcggggcctccttcccgccgtcgctgggcgtcctggtctccctgcaactgctgctcctcctgggcctgccgccccggccgcagcctcaagtcctcgtccacgcctctcgccgcctctgagcaccctgccccaccccacctccactcccacctcacccggcctcttcgcctttcccaccctcctgccccacactccccgccttagagcctcgtccctccctcactgaaggacctgagctggccaggccctgagagtctggtctgcgccttgggatggggagtcccaaagcgggacgccgcaggtgtttggcacccaaatcacatctcacctccgaactgttcaagtgtccccagacccttcttgcctgctgggctccccccagtgggatgggacagggaggccacacgcactggtgccaaaaccaggcctctgctgccgcccttcctggaggctgcctatgttgggggggaccctgcctcagctgacccggcctctctgccccacccaagcccaaacttggtttctgtgagaatagtggaggaaggtgagatggccagtttgaagcctgtgcctcccagcttaaatcctagcaggagagaggctctggggcagcccccatgggctcctgcccctttcaggcctacag

SEQ ID NO: 105863 - DNA, 1040 bp, Homo sapiens
ggcatcctcgtcagcacagctgtggagctcagcctaggcaggcgcacactgaggccagcaggtgaatgtttgggacagaggtggggaaacaggcaatggacagggtactgcctgggcaggtagcactgatggtcccttgctctcccccaaagtggtgggcgtcaagctggacctagaggcttgggctgagaagttcaaggtgctagccagcaaccgtacccaccaagaccagcctcagaaggtatttgggcaggggcgggggcagtaacccagcagtgcccttcctggagtcccctggaacccccaccaaccctccactcagtggctccaacacctacatggaggcagggccagctgcagatggcctggggaaccggatgtatgaaaggtgatgggagggaggaaaactggtgggtggcttacggtcctcactctctgcccagcagtgcggccccaacagccactgtgagatggactgcgaggttaacaatgaggtgtgtgtgccctgaacctaccctggaccctagcttaccccacttccagacttcctagtcccagccgcgactcccagcacatcccttggcctgtgggtctcaacatccccaccctgacttcacagccttcccaggactgggggagtgatgccccccaactctgaaccactggactgcctgcggtggaaggtccggggcccagcccctctccattttcctccccattcccttcctcctaggacttactctgtgtcctcattgatgatggaggattcctggtgctgtcaaaccagaaccatcagtgggaccaggtgaggatcaggaagagagtgaaagaagagagtagggatttgagccttctaggggtgtagcactgccagccctgtgaccatggctttctcctgacatcctcaggtgggcaggttcttcagtgaggtggatgccaacctgatgctggcactctacaataactccttctacacccgcaaggagtcctatgactatcaggcagcctgtgcccctcagccccctggcaacctgggtgct

SEQ ID NO: 105864 - DNA, 1052 bp, Homo sapiens
cgatgctgtagtctccacaggccctccaccctccctgcccgtcccttctctctggctcctggacgtggaaatggcgggtttcctctttgctggtgtctccccctccctccagcccccctctcccctgtccttccagccccgtcagctctgagccccccggcctccagcctccccagcccccgccggataaccccccgtttctgttgcagattttgagttcctgctccccagcagctttgagtctgaaggacacgttttcattgctcccaggtagcttgcgtgtggccttgctgaggtgtcctcccctaccctgaccgccccggccccacctcctgcactgctgcctggagctctgtgtgtctgtgtcctgtgcagtgtcatcccccggcccccatacatcgcccggtatgcgcggctgtgtgcatacccaggccatgtaccgcaccaggcagcagtggccagctgcctcacggccctagctcccaccaggccggggcaggagggctccagactcatctgctgactttccctgccctcccaggcaaccaggcaggagccctttccgccctggggtggctgtctgtggcatgcccacccctcgccaggcagctgctgctctggtttgtggtgtcctgcccatccccccaaccccgcaccccatcgttgtcctgtgtcagtcggtgttcgtgtgggtctgggggccgagccagccagagcccctgtcggcagtgccgggtctaggcgtggtacttcacttggggggttgggggaggagagtgggggctttgaggagctgctccatcagatgaggagacggggccccgagcaagcccaggcctggaccatcccggagtgcacgctcagtgtgcacacacacgttctcatgtacacaccgtctgcctttggcccatgtctggggaggccgggtcccctgggtgctgaagcccttccatgacccaggcttgggatgagggcaggtgggtggatgcagctgacaagagacccaggggcactggaaggcagcacacgggggctctggacatgcctcacct

SEQ ID NO: 105865 - DNA, 1103 bp, Homo sapiens
gcccggtggcccccaggagagtttgagaagtggagagcctccagggtgccggcccctagaccatgaacctcctgcagctaagcggggagaggggtccctggtggtgggaggaggggatgctgcagctggggcctctgcccagctccaaggccatggggagggggtgccagtgtggcccgcctccccccagccgtgacccgagcttctcccccctcagcctggggctggtgctcccaccctacagcaccttctacctccaagccaatctcagtgaccagatcctgcaggtcaagtgtaagtggcccggcccctgcctgcgccctgcaccctgcctctgccccgcaccctggccggccccaggcagcatagccagcgccgcttgccggcgaggcagtccctcctgcccagtctgcccaccctcaggtgcccgcaggctggggcacctcgaaagtctgtggaaatctgcatgcttgccttttctcagattcggttccagaccattctttcatggtttctgttgaggttgctgtttttggtttctcctactccgtgtcttccctccttagcctgcctgccccacacactcctgggggctgcattcttggaagacaccccctccccttaccttccccctcccctccccacccacctccactccccttcccctcccctccccttccccctcctcctccccctaccctcccctttctcctccccctcctcctgtccctctcctctcccctttcccctccccttccctttccccttttccttccccctccccttccccccaccctcaccatcccccctcccctcaccttcccccctcccctttcctccctccacctcctctcccttcccttcacctattccccctcccttcaattccttcctccttccccttacctcctccccaatcccacctcccctctcctcctccccctcccctcctccctctcccttcctccccttctcctccccctctttcccctcccctcctctccctccagtccttcccctcccctcctcccccctcccctccccccttttcccttcccctcccctctttctccctcccctcccctctttcctctctcttcctg

SEQ ID NO: 105866 - DNA, 1020 bp, Homo sapiens
ggaagggaagccccaggtaggattccgaagggtccactcgtcccgctgctctctcttgacgtggggacaaggaggaggcacaaatcaggggcagtagtggctagaggagggccacaggggtacagaagcagcagacctgtggggccggtggtggcagagaggtcaggacaactgacagctcatgagaaccagggggagaggatgaggactgcagagcagcagcccacacgccggttagccttggcaagggctggtgcacaaggggcaacccgcctgcgggcctggctggagagacaggcttagggccacgtggcatgggggggcccttagcccaaggcaggcaaacagaatctctcggtgcggtgggaggccaaatagggaagaactccggagcccagggaaccccagcccatccctccagaccctgagcccccaatctgtgcctccagcttggagccaacggctatgtgtttgccattgacctgaacggctacgtgttgctgcaccccaatctcaagccccaggtgagccagacgggtggcctggagggtgggcaaaccttccacaatggggacttctgacttcccaccctgcctccaacagaccaccaacttccgggagcctgtgactctggacttcctggatgcggagctagaggatgagaacaaggaagaggtaaggagaggaggagaacaggggtgggggacagagcagaggagtgtaggggccctgcccctcacatctctggcccttccagatccgtcggagcatgattgatggcaacaagggccacaagcagatcagaacgttggtcaagtccctggatgaggtaaggaggcagggctgggggccagggagtcagggtgggcacccttctaccccagcgccccctgcctgctagcccaagtacctgacccagcctcctctcccagaggtacatagatgaggtgacacggaactacacctgggtgcctataaggagcactaactacaggtaagtgaggccagggctgggcgggc

SEQ ID NO: 105867 - DNA, 1038 bp, Homo sapiens
agcccacccatcctgggggcatggggcggggtggcttctctgtagtctgtggcagcccagtcgcctctgcaaggtctgcctacccaggccagccctttcctgccagtccccctcaccttctctcctccctcagccaccccgtggcgagcccccaagaagatcgacctgtacgatgtccgaaggagaccctggtgagcgagcaagaaggggctggggagggacaccccctcagttccccacctttcctgcctgctcccctccctccccatttccaagcctcctagcagggcgcagccagctgtatccaattttcatttcacacatggttgccactggaaaatggatcccatcacccaggcaggcctcccagctgccatgccccccgtccactgcccagcacccccacccactcaggactgagagattggaagggagattggaccagaaggggtccccaaaggcagatgtagcctctgtagggttggccagtccctgccccacccgtctgagccccagatatccctcccctctgttctgcccctccggcagctccctgtgactctccttccctgccacctgcaccatcccatacacagctagactgtgccctcggggccccaacctgaggcagaggacacaacaagccactgaagccagggaatgtggctcctgccccctctggggatcacctgctcatataccccctggtactttttccttgctgaggaaccagaccattcatgtcatgggcaaggactgtgtctgtttcgttaaatgtggtatcatcggtgcatagaaccctgcctggcccacacagtgcatgctcaagagaaatgtattgaatcaatatgtatgtgaaggaaggaaggacccacaaggtcccagtgggccttaccctaacagaggcatctcctgggcaggtatatccagggggcctcgtcacccaaagacatggtcatcatcgtggatgtgtgagtgagcagtgctggcaagtggggctggggcagggacgggcaatgggctagactctgctgccct

SEQ ID NO: 105868 - DNA, 1120 bp, Homo sapiens
taataaccaagtgtcgaggctgattgcagcagcaggatgcagccagtattcagagcagctcttaccctgggcatttccacctggcagccaggctgtgccctccctgcccaccacctccagccctttgtctgcctgtcacctctgcctgggccctcagcatcatccccgggccaaccagtgcttggctttgtgtcccaaagctggtgggcagcgacaaggtggagcctcaggcgtccacatccagcagagtgacagcctagctggaagagtctggctcctgctcccactcttctggatgacctgtgcagggagccctggctttgtcttggcctaggttcatatcccgccttgctgcccagggacacagggagttgtcagagcccatccctggcatggacaaagctggattcagtttgagctctgccatttgatcattgtgtggtcttgggtgggtgagtcaccctctctgagccttggtgacctcgtcgggggaatgggaataatgattgggcttcttggggctttttggaagcatgtgtgtgaagcaaggtgcagataatgaaatgaggtcctgtggaagaggctgggccatgttcataagcacaaacacctaccgcaccaatccctgagtccagggaggcccaggagaatcgaaggcctaaatcagctcccctggcctccactgccctccttcctacccccacatctttgccctctgggcattacttcccttatccccttcatctgaccttgcccttcaagttttgcctggtgctccctttcccaaagcccacctggcttagcctaaccatactcctctcccatagggtttatgtgccctttgagacagccttggatgctcactgttctcctctcatgtctgccttcatcctcacagtcttatgaggctgggactagtagaagccccgtgttagggaggaggttatcaggattcagagaatggtatcagttctgtgcattacacatgcagctcctggctctgccccatggggtactgtggctgctggtcactgtctgcccagtcccaggtcctactagaaccaggagagtaagctaagccccagtctcttcaggggccctggtagagtggacaagcacc

SEQ ID NO: 105869 - DNA, 1029 bp, Homo sapiens
atcccatcgggccagcgttttgtagagcagaattgctaattatttcagaggcctggccacagccgaagaaggaagggcagtagtgggtgcagctttgggcggcatctgtcaacagggctaggcaggcactgggatgagacacccagcctgccacccttccactgccctcccaggatctgctattgttttggaaggggggctgccctgtcccttggtttctgtttcatggtttaccctagaggaggcagcagggtctgctcttgccagccctgctttgacctcatgttgaggactctggaaggtatttttggggtcttaaattgcttgtttgtttagagagtccacaggttgtggatgagaagactgcagagaccccagtggttttctccctgtgtgaaggcagagctgttcactgtaaggaccatacctgggcttggccacgcttgcacggtgcgggtatgtggctcggtggctctctaaccttgggctctgtgtgggcctgtgggggttgggcatgactgtgtgctgtttttgcgggtccagagctgcctggcgtgactgcatgcatctgtgaatgagatgtctgtagctgtgctgcatgggcctcagaggtatggttctatctaactcatttctgtccctgcactgcaaggtaaaggaggctttggaagacagatggccagagggcactagacatcagaaggaatgggccaagactggctcagctactttagggatgtcccaggtttcaagggggctgcatggcaaactgactaggggggtgggtttcatgggggaaatggggccctggcaaccgaaaccctggcttctgcttcatgcagctgaggagccttttatttatttattttttgagacggagtctcaatctgtcacccaagttagaatgcagtggcacggtctcggctcactgcaacctctgcctcccaaagtcaagtgactctcctgcctcatcctcccaagtaactgggattacaggcgtgcgtcaccacacccggctaatttatgtat

SEQ ID NO: 105870 - DNA, 1160 bp, Homo sapiens
catgcctgtaatcccagcactttgggagcctgaggcgggcagatcatttgaggccaggagttccagaccagcctggccaacatagcaaaaccctgtctatactaaaaatagaaaaactagctaggcatggtggtgcatgcctgtaatcccagctacttgggatgctgaggcaggaaaattgcttgaacctgggaggtggaggttgcagtgagccgagatcgctccactgcactccaccctgggcaacagagtaagattctatctcaaaaaaaaaaaaaaaaagagagagaaggggatggaatggagtagggagtcatacaaagccacccaactctgacctgtgcctagatgttggcgttgggaatggggaagttagtgcataagaaaatagagtggctgaggccagagctgaggatcgggggttcttgagggtggaatctctcaggatctctggaaggttctctgcctgggttctctgtccctcagtttaaggaagagacaatctcagtggccatgaacagaacctccctaggcagacagcactgctctgcctggaagattttagtcgctaacccttggctttgctgcagggcccttccctgaagtgagggccgctcaatccttccatcttggggatcagcaaggtttgtctgtgaaagtttcctaaagccacacacacacacacacacacacacacacacacacacacacacacacacacacacacacactattctgatgaacttgctggttctcttcagaggtccctagggaggctggccttacagcaggacagcgggagatcagttcaaactcagcccttgcatcttgttgaagagtagccagggtctgctgtcaccccagccggcctatgcatccatctctgaaaagggacagagctgccatgtccagagccggaggctggtctgaatgttcgagggtgggagatggggcttggggacagagggctgaatgggtttatgctcggccccctggggacagttgacccaatctgcattcctcccccatccttcactccctttcattgctggatcagtggcagccacggagacacttgcctcggattcatggagccccaagcacttggcggaggcagagaagtaattggttctgacaaaccacagccggccccaggggcg

SEQ ID NO: 105871 - DNA, 1049 bp, Homo sapiens
gtggcccagcgacactaaacacccctttcctggttgctgggcttggatgtcagcagcctccatcacactgtcttcctgtgaactctgaatgactcagccgcacttggaggccagcagagctttccagagaaagtgctgtagaaaaagctgttccggaacaggagtcaatttaggctcaggaatagcacccagcactaaccaggctccaagtagccactgccaaggatagctgtgtgggctaatgaaggaatgatagctccctgatgtgtgcagccagcacctttccaagtttcatatcgggacataagctataccacatatcaggagttaacggtactcctccagtcaataatccttcatgcctcaaacctttagcttgaagatgttgtttattttatattcacgggcaactcaggctctgaatgtctggcaatgagaaaatagtgttcatacgtcatggccgaggtctgtctggaccagtgagcttgctagattctgagaaccagagatggaatcccagctcagcgtaccatcatgtgcccctgggtgagcctggatcctctctgatcctcattcttgacccatacacagctgggaagtctgaccggaggatgaagtggtgaaaacagcaatggacaggctgatacagatacgccccttttttggaaatcaaatttgaatttccctcattgatcattttcactcccagggataatttcccttcctttctcatgggacttgagagattctagacactttcatcagtgagcctgtctcccccaccctctccctcccagcagtcaccaaggtggtcatgctgctggcttgtagcagagctggggcatggacccagggctcctgactcctgttccaacgtgcagctccggctgtggctccacttcccctcttggtagggtggacaagatgagcctggggcagtagggagctgggccagagcagggccgtgctcagcgtggcaggcaggcaggcagagaagtgctgacctggcatccccggcttctcctggcactctggtggagtgtctctgc

SEQ ID NO: 105872 - DNA, 1021 bp, Homo sapiens
actgacctcagaaaaatgaagggacctgcttaaagcccacaaccatgagaggcagggcaggggaaaggatagatctgtcagacacttggctgcccagccagagggctggggacatctgggcagtgggcccaggaagtggaggggggcttgaagcctgaatctctgggaagaaaatgaagaggcctaggatatgagagctgggcctgggacttccagctgtaactttgccctgtctgtctctctttcctcctctgggtctcaggcaaccctgaggggccttccttggcatgaagctgccttgccagccccagtgcttatagccccagtgctgacctccatctacctcccacgtatacacaggccatcatggagcacccccagcccagagctttccttcccccagctttgagttatgggccaggcctgctctgtgtggaggggtggaggagaggaggggcttcatctggagatgagatgccatttccttctccagattccagtctgattccggagagaaaggtcatggaggtgggggtggggctgggggttgttcatggaaacctgaggctggctcctttagtcccttggcagttttgccaggtctgaggggacttcacagggctaggatcttatagatgctgggggagcctcatgccatccggatgggtgggacttggggggtttgggaaccagcgttcaagggcttgttgctagggaactctccaaggggcagctggaggtttgggagtcaaggcaggtgggctgagctctgtctggcagggcgatgttgcctgtaagataggagtggtctttctctctcttcccccttccagccacctaccccactcccgtgcggagatttgcctccagacctggtgccttgtgtctttaagtgactgggctgtgggcctcaggcctggggaggacatgctggggaggacatgaggggctttcccattgctggctacagccctccagccaactgggaagattctcttcatgtcaggtttttttttctttt

SEQ ID NO: 105873 - DNA, 1044 bp, Homo sapiens
tgccagccccgttgcctcatctctgctaattgtttttactcagtcctttcatttttaaactgctgtcttgttggtttttaatttttaattattgctgcctccccttccatcctaattggtccaggcccctattgaggctccctgtgcctgtggctgtggccagttccctcctagtagccaaggcttgcccaccgcctgccccccctctgtcccagtcggtctcagccttactccagaggcagaccgcacacctggcccctggtgcaacaaaggcatcatgattcaagttcatgctccaaacacacattagtcactgactgtacagggtgcagtgatccttgggggatgtgaatgaccagacctacctgagtactgcctttgttgtgttgtgggagggctgcctgtgttaggtgggggtacttgggggggatcacagccacctcccaactacctgcccctccagctctgctttcctcatggccttgggcctctgcgatgtactataataggacaccagcctcctcccctactgcccctagcccagaggtcactagcagcctcccctccaagcctttgctcactccggtgcccctagcgattccctttctcctcctggctcagctgaatcctgctcagtgctctctgactgttcgaattggccggtccacttgtccatccctctgtccatcatccactcatttgtctgttcatccctctgtctgcccgcctgtgcttatcagcctgtctatgagtctcctagtatgattttttgccgcaagtccctctttgcatctgccctgacctcagtccttcccatgtgtctgccttgaaacctctggttttcccttctgcgaaggccccttctgtattttatttggtcacaaacaaccagccacagccaacttcctgagaagtttcaaaattaaacttgaccctcatttctcccagctgatgtcacacacattcctgcctccaggcctttgcactcagcaggcatctctgccagatgtaccctctcttctccttgacctatccaatgaccac

SEQ ID NO: 105874 - DNA, 1034 bp, Homo sapiens
gggatagttgcttggatcacagctatgaggtggcaccccaggtttctcttgagccgtctgaggaaatgcctctggccctgacttcgaggttgccctggggcttcatttcccaactgtggattggggtcccaaggcctgtcaccccctagggtggaaaggtcaactggacaggaccttgtgagaccggaggaggaagggggcttgagccccaagggccccgacgggggtatggcacctcgggacccaaaggagctgggtctgaaacatgaaaggaagcaaaatagtgtggctttttctggagcacaggggtgcaggggaagggtggggggtgggaagccattagggtcatctgtgtggaatccacccgcagggttcagaagggtttgggggagaatgacactagggtgaccagccatcctggttttcccaggactattccagttttagccctgaaagtcccacaaaaccaggactctaagtgacatctaggctctccccagagagctgagccttcaggccagcgtcatggaaataaggggcgggcgagcccccactcccccagttccacgatggagggctgagctagaggaaggggctgggggacagggccttaggtgaggggagggccacgtgcccatgagccaacgacactggggtcacagctcagcctgtcagtgatggccttgatctttggaagaggtctcctcccctcagcagattggcaggatctggaggggcatggagtgagaggaaaggcggtggtgggctgtgtcctcccaccctgttgggtgggccttcagcccagggatgtgggagcttcagaagatccagcgtctgggggatcctgaagaaaaggggcctgtggaataaggctggctcccagggaccaggacctggatgggggctccaggagaaccccagtgcccatccgctcctgctgcctgccccatgcccctctcctgcggggtgggcttggctagacgatgtgcacagggcagctgtctctgtgggtgccagggcacatgttcacacct

SEQ ID NO: 105875 - DNA, 1078 bp, Homo sapiens
cagagttcagtgcaggcccaaggactcccagtccagtgctctccccaagtctcctctgtacatccatccgcgttttgggggcttgagtctgtcctggcacgggtagctggcaggggtcccgagttctggcccggaagggcctggccacccactgtcctccgcccaacttcggcgcaggccacggggtgagggtagtctctaaaaactgcgaccaggttctaggctccctctgggggtggagccagacccgagcgacaagcgaacggtccaattctgggcgggctctaggcccgacagccaatcggaggccgggggcgcggagcgtgcagggaggcaaggcgctgtagcttcggggatcccccgaggctgctcggcccggccccacctccgccgtgggtcccggccctacccaccctagctcaggccggcagagccagcgctcgcggatgcggctggtgcgcagtagcgggcctggccagcggctcggggcttgcagggagggcggatctcgggtcggacccgcagccccagacgccgggcttgggggttccccccgccccggcctcctgccagtcactaccacccctagcctctccaactgagctcggcgccgggagaggattaagtaagtgctgaggtcactgctcctgtgcaagaagggaggcatcacagggtcgcggaggcgggcatggggattggggcagggaggactgagagacctggtggagaacagcatgcgggttctcgaaggtcgcggtgccgaccccttttaccccggtttccttcccttcccctttggaccctgaggcaggcctggaaagtggtcagtagggcctcttctctcctttgggaggcgatgttaacagagccccagggcacgagttaagggtttggcccaaggtcacgcccgggatcagttgcaaagccaagaaaagaacccgggacttcctatgtgcccagatgtgcccagcctagctggagggagaaggcaaagagggatgagcctttctaccccataaccctctgccagccttgccccttcctcagggaccatcagaggtgtttacacatctcacac

SEQ ID NO: 105876 - DNA, 2152 bp, Homo sapiens
catgtccttggagccaaaacagttaagtttagtgttgtcaagaggacaggaagagggaggagggaggacttggggaagggatatccaggttttctgttcactaagagtgcttagctgagactgatgggatttttctgaaggaacgtcttagcgcctggcacacactgtaacagtttgttggatgaatgaatatatctctgcctaagtgttctgggatagacacctggaagcctggtgttagctgtgtaaccttaggcaggatgctgccccctctgggcccagatgatgagagggttgggcctccagaccagtgctgggcaggcattatccacataagacacctgggttgggggccttgggcccagtgagccagccacttatattctctgtggggacagtttcagagcctgaggccggcactttggacccagcccttgacctctcagcaactacagtgtatccgggagctgagtagccgtcgattgcagaggtgagcacccatggatcagacctgaaggatgtgttcagggagcagcagtccagcctcccctatccccaccaagttcagggaggaggagaatgtccaaggactagggaggtgttggggtgcaggagtggcaagagtggggccggggtactgaataggaagaagggagggagggagggttttgcctcaggagtcccaaggccctggagacatggtcttgcctgatacctttggccacaagtggtatctcaacccaggcatggtcctgttggtcctagctctgtccctgatgaccacccagctgccccctctgcaggatgccggtgcagtacatccttggagagtgggacttccaggggctcagcctaaggatggtgcccccagtgtttattcctcggccagaaacagaggtaggtgtgccaccagggcaaggcaggatcaggatgatggtggagttcagggcaccagtcttaccccaggcttcctccagggggcactggggccccatgacttcagggacagtgcctttctagacatgtatttcctctctgactgtgttggcagagcccagaggacagaggattcctgttggtccccttgactgttatgttccaagctatcaacccagcctctaggtctggcaatggcccagagtgcctcaaatagtgctgcccaagtacttagcctgttctgccatttctctgggagccatcccatggctcacccaacccacagggaacaaatgtcttccagcagcttctcaggaggcatggaggaagtggagagggctccagccggacacctggagacctggtatcagctgtgcaaccttgggcaggtcactgccctcctgccatctctgggcccagatgatgagagggttagccctccagcccagagaatctggtggccctcttaggtctactgactggtctggtaatcacctgtgttgtccctcaaattactaggactagggatgtgtggcgcaagtgtgttatcccttggtaaggcaccctggtcctggaagagacgctttatatggcccttcttggactcccctctgaccttgtagatgacagagctgggagccagagggcgcagaccagggagtagagctgggtgagagctggtgggcaagccagagggcgccaggttctgagaaggagtgtttctagaaagacctaggcacacaaacatttctgggaaaggttagttcccattcccctgctgtggccagggggccccaaacccttctttcactttctcagcttctgtcccctagccaagaaactctctgacccctctcctctccatatcatgtggttgggaggccaggtccttgcttcactgcccagtgtcagggcagggacagtagggaatctgaggccttgctgaagtcacagggctgtcaaggaagggagcatgggggcagcacgtggacttcctgactcccagctcagagccccatccctcacatggggctgccccatctgggattggcatgacctaggacacagtatggagacccagagcagggtgtggcctgccacctgcagactttgggaggcttacctgtggctcctgaaaacacgtgatctctggcgaagagatcatttgctgtctccggcttcccagggtcagggcatggtgacttttgagttcctt

SEQ ID NO: 105877 - DNA, 1029 bp, Homo sapiens
caccccaatgtaaagccacatcgggggatgccttaccaagaactcaagaggacgtggcctgtggcagggagtagtgagaatgggtgcaggggatggtttctgatgaaaggggagtctgaagtgcaaacttgcaggaggcatgtgcccagtgagttgcattttccctaagggtgagaaggtggttcagcccctggcctggcagtgaatacagtaggaaactcagggctgggggtgtgaaccattctcacccagcctgctgtgaggctgtacaggttgtgggaggctcagtgttttgtctgtgattggcttgaaggaggcaatgccacctccctgggtctgccccaccagggatgccatcctaatagagggtactcatgggcacttaggttctgcccaggccttgggccagcctcttgatggggtatggagtccatgttggggcagcagttctaggcagagccaacaactgcctgcccctcacctctttcccgcatgcgtctgtgccccaccctgttcttggattcttaccatattcacctggagggggtgccctgagcctgtgaccagcatggcttttagtcttgccgaaagagccaccagcgttaggctgagggaggctcttcactaggaggagaagagaaagtttctggactccttgggctgttatctacccctgccccaggtggctctacaaccaagatgagtttccggtgctctggagtgttatggcaaacaagaggccactagtggtggcaggggctcagtttcttagcttcttaccctccccaaggtggccatccacatacgtggtgtgtgtctttgaggtctttgagtatctctgtgaggtggctggccagtgtggctggctgaggggtcattctccagccagagtaggtctgtctatgaccaggaaaccaagagaggcttacacacctgacaacaactggtcaccctaccaacctctcagcttgtggcctcaccactgagaccacaggctctcagccacagccctatactgctcactctgta

SEQ ID NO: 105878 - DNA, 1045 bp, Homo sapiens
atccccacgaggtgggctatcctcaactgggctcagatgtacagatggggaagctgaggcctggaggggcagggtgacttggccatgccccagctgacatgaaggtcagtctggctttggctacctccccttcctacgttcacaagggtaactgcttaggcctctgtaccaagacccccaggagccacgttggcaccgactctgatccagatccctctgcttcacaggaactggttgagtgggtgctggaagaggtggcccagaggtcccatgctgtgggatccccaggcagccccctcattctggaggtgggctgcggatcaggagccatctccctcagcctgctgagccagctcccccaggtgagcccctccacccactctggatagactgtgactgacactcactgtccctcccattagtgcttcccccacatccctctgctaggagcgcttgaggggaagcagctggatgagggaggacagggctgcccctagcccactgtggttcacagactctaacgcctaccacatctatctggctagactttggccaagaagaaaaggctgttgggtatttcccttctcttctggtggggggttggaggagggtcccccaggcccagtatcttccagcatctctcagcattgccttccacatatcctctgtttgttcttgggacagagccgagtcattgctgtggataagcgggaagctgctatctctctgacccatgagaatgctcagaggtaggtgggggagttgcactttggggcctaatcttgactccttttcaggtttcaaactcaccaatgtctgatttctactcccaagaaggaggaagcagtggggtagcctggcatgggtcccatggggttctgaatgggtagtgggcagtgagtatcttgccagtccaagaagggttgactataagacctcattcttgtagtgaagggtaggggtctgcccccgtgcctacccctttctccctgtctgtgtaggcttcggttgcaggacaggatttggatcatccacctcgacatga

SEQ ID NO: 105879 - DNA, 1132 bp, Homo sapiens
gctgggagagctgagttccagggctgtgtcctgcagtgggaccttgggcaactcctttccctatgagaagctggctcttctgagtccagggccaacgccaactggcaacctctttactcttagtcaagtggaatgtgcatgctggcatctgaatgtccattcgccaggcatggagagcaagagaaggtatgtactgcctgaggtcacatgacagtgaccaagtggagacagtaagttagatccctccctttggggagcctatattgctggagtcatacccagcctaagtgttgccctgcactatggctggaggacacatttggtagaggtcacactgcagctcccagtgccccagtgtcctgccctgtgcccagccccagctgcatggactctgagctgcccctggcttcctttaaggaggctgctccagaaggaacctgggtggggagggcgaagggggtgcacaaccagggcaaggctccccacttccttagtcccccatgctcacagacctttgcctgctaaggtcctcaccagtattgccctttctgtctttctccttgtgccctttggctcttgctgtcttcagcagcatctcagggtagctgccctgacctcggagcagtctgtcgcccccctacacctcagccagtcctggcttccctgatggtctctccctcctggcctcaggcccattcctgaggaagggccttggcgagcttgtggatgttgcaccagaagagagtgcagtgttggagagtgacactgtcggggcagctggggccacaagcaggagccggcctcgggcacaactttctgcccagaaaaatgtgcagcttgactctgctgaggaaaaggtccaagccaagaggactggcaggcggggcctcaagcctgcagccactggcttgattgggccctggacgttgagcccagatgttggagccacaccagcctggatttcaatcccagaatctgcccctcacgaggatgtgaccttgggcagatgacttcacctcactcagccttggcttctaaggctgagaaatgggacttaatgctttattttataggatgcatgtgaggagcccatgggatgtgcctggcttggcacattgtggcatttttcctt

SEQ ID NO: 105880 - DNA, 2256 bp, Homo sapiens
agccaccagagactaaagagtggcgaattcaacaacgacaagatgccacctccctcggcatgtttaaaaagttgagtacgctgagggttggccaacactaggcaagtcggaagcctagcaagccatactggagggccacctggcagcgtgcagagcaaacacccgactcaaggagagctttcaagagaaataagacgtcctgcgctgtcacgttctaggttgcgagtaaaacccgggacccgcacagtagcggactgccagtacaggggcctccctgggtgtccctggaaaccgaggaagtaaccgccccctcgggaagccacgcctcctattttgttccggctcgggggcgggacccagccggggcccgcctggccctttaaggctgacctagcggggccccaagttgggatgacgcgcagggagcggggggtggagtgggggagtgggggaggggggggtggggaggggggggaggtcacgtgggcgccggcagcgcgactctcggccctgggatttctgcggccgccagctcccgcgaccgcctctcctgcccctcgccggtacctcagcaaggtgcgttgccgccaggtacgccctcgctgggccccctctgcggcctcctccggggacctcgcggccattaggcgcccggccccttcccttcttgacacgtgcccgggcggtgctcgcttgtaccccgccgcgcgaccaccgccccttgctgcacgtctgtactctcaggccgttcgtcccgcactcccagcttgccccgggctcgcagcccagcccagttcagaggctccaaggctggggtgtgttggaaaagtctgggcgggactcactcttcccctttcccccaggtgccactagaagcgccaggctggggccgcctctgagcgccccgcgggggccatggatggtgaaacagcagaggagcaggggggccctgtgcccccgccagttgcacccggcggacccggcttgggcggtgctccgggggggcggcgggagcccaagaagtacgcagtgaccgacgactaccagttgtccaagcaggtgctgggcctgggtgtgaacggcaaagtgctggagtgcttccatcggcgcactggacagaagtgtgccctgaaggtcagtgagccctcactgaggcctggggtatcctggagggtccacagcggaagcctgtgagtgaagctatgtctagcgcccctgctaagcttcctatgctcagcaacatgtttcatcgtcatactgtcctgtaaggtcaggcttgtggtcctccctacttcacagatggggaaactgaggcgtagcctagctaagctttgagtgtcccagtgagcaaggggtggagtcactatggctagagatgctgtatccggaagcagggaaggggtgactcctgactctgggattctggctggacccatgtgttcaggcccaaaggggatctcttgttcagcttggctgccccttccatgtgaagctcctctgactggaatggatctgtttccctttgctggaagctgagaccccaccaaggcttgggtgggactgcttcttccctgtggcccctgcctgtctgggctggagtggtgtgagcctcccagggctggccagaggacaaggctgatgcccactgcacctgtggagcctcaggaggctgctgatagactcctgacgagtcgctggtcccgtgttgaaagggacaggccctgggccaacccacccctggttcctgggcagagggcgggccagccatctagccacctcagactataggctccctggagacctggcatgctgatataggtggcatggtgggggtcagggggatgctgggggcgggtacctggttccagcttaaggcatacagttctgggcctagggccacaccccatacccagaatcccttgaatctgtcatctctggggtctttactcatttgtagcttgtgccaatggatgggtagagcatggcagggatagtggctcctggaggctagaagtacagcaaaggcccttctcattttacaaaagattttttttttttgaggcagagtctcactctgtcgccaggctggagtgcagtggcacaatctcagctcactgcaacctccacctcccaggttcaagcgattttactgcctcagcctcctgagtagctgggactacaggcgtgcgccaccacgcccagctaattttttgtatttttagtagagacagggtttcaccatgttggccaggatgg

SEQ ID NO: 105881 - DNA, 1001 bp, Homo sapiens
ctagaagtccttacccagctaagcaggcatttactatctcccaatattgggctaagcacaacctctggtacagttattttacctgtcttgtgagtggtagctgtggccacgaggaggaaggtgacatctccccacttatagcttctgcccattgcccaggaagaccaggacctggggacctcagtacatgggcaggcctgggcccagggagcttagccagctcatgatggatcacagtcctctccttgcatctgcctagccctctccccgcagttgccccagctcagcctaggcaacagtcgtgggctctgtgtctttctgcctccctggtgatgtactccaggttaaccagggtggcctgtcctcatcttataacttgaccttgttcaggccatctctgcccatttgtctcatgctcatcctcttggctctgttgcccaagatggaagatagtgcttaacaggaagcctgaaactcagcaaacactcataaaacaggaagagctgtggccactgtccttgtaactgttgctattctgtggaggccctagaggagcaggtccctccctcccagggagctgggcctcttccgctttcccttagcccctgaccacctgcttggttcatcttggcctcagtcatactcagtggctccctcccaaggctaccttctgctgccagtgcagccattctactccattgtaccccaagccctcattgctgtcctcttggcaggaactggaggactgcctttcttggagagggtgtatgggccaggcggtcctccagtgtctgcttctcctgctgacctcttgcttgtgccctctcccaggcttaactagttaattagtaccttcagctttccctctaactgggcacagccctgcagatttgtcacacatcagttaccccaccacatccaagatccagtccttcaaactttatcacatacatgaaaattgggacccaaagtgagtcacacggtttgaagtggggggtgta

SEQ ID NO: 105882 - DNA, 1036 bp, Homo sapiens
ccctgaattctgggaaacaaggaggggaggagtgtaaggccatttcaggaagacccaggggaatcctaaagccaggggtccccaagcaaacccaggaactgttttcacccataccatcatggcccccaataccttcagtgtgcactggacaccaagttcatctgagctctttgtgtgtgctctcattccctccttgtggctccctgggaacaggagtattagcactatccccactttccagattgggcctgtgaggctcagagaggctgaatggcctgcccaaggccacaggggagttgggaatagacctggacccctgtggctgcagctagtcctgctgtgcatggtccctggtctggggcactgggaccctctagcactcacgttcccactgttcttccctcttccttcctgggagcctcgctcaggtccctctttctagaagcatttccctccactcttcccatcccccagacttagcatttcagcctttgtttccaggttgtctggggctggtgggaagcagaccaactgaggccatcaaaatttagtaaattggaggaatcttgtcttcctaagacttgatgatttcaaaatttgtgttggctatcctgtcccagagcttcctgggaagacactaggcttggaacctcagctactccctcccctcccaagaactctggtgagaagtggtcaggtggaggttcccagcctgtcaagctgccaccctgccccccatcaggtgtcctggccttggcctagaaggggagtggttgtttaggggtcctcctttcttgtgagttccctcagaaggggctggccttctccatcttgcctgttctgccaggttctggttctggaaagaaaggagaagggaagggaaggagccaggaccagtttcccaggtgtagatgtcatcatcaagcatcccagttggcagtgactcatccatagacccctaaatccttgaggacagagtgcccatggcagcattcccagtcccagtccaggtctagcccccagacagggccagtac

SEQ ID NO: 105883 - DNA, 1036 bp, Homo sapiens
ctaacacggtgaaaccccatctccactaaaaatgcaaaaaatagctgggcgtggtggcgggcacctgtagtcccagctactcgggaggctgaggcagaatgacgtgaacccgggaggcggagcttgcagtgagccgagatcgtgccactgcactccagcctgggtgacagagcaagactctgtctcaaaaaaaaaaaaaagaaaagaaaaagaaaaaaaggtgctgggaggactttccagagagagaaagagagagagagagagagagagagagagagatggagacagagagagagagagattgatcgatctgaattgagccctgaagtttccccaaaaagagggagttgacccaacagagaggatgaggcaagaatgcacatgacagggaccagcacagacctagacacagaggcctgggggagtaaggcctgtttgggaacaacatatatatttttctggccagaacaaagtggttttggcccagaggtggcaggaagtgaggtgggaaaggaaggcaagccctgcgtgctgggggaggacatttatctggaagatgtgaggaagtgtctgtggccacaggtggattagagtcataaggggagaggcagggctgaggaccctaatgaaagcattccagctgtgagcttggacttttaagagagaagaggaggactctgatgtgggagtgagatgccacaaggcaggcagtgaggagggagtgtgggagccagcctgggaggcctgacaggagatggtcaggtcagactggggaggagagaaccaggcagggggagggggaggaggcaaagaaggaacccggtgcagggagggaggatggtacctcttggctcctgtggctgaggattggggtacccctagctagggccgccacaggacatggtggaggcaagtggggggcactgagctttctggtcccagtgctgagaaagaagctggtgattgggaattgtgcgggcactaacctgaggggtgttctggaaggcaagggcagcatgagcaaggatccatggtg

SEQ ID NO: 105884 - DNA, 1018 bp, Homo sapiens
tcagcctggtttagacccagcagaggccacgtttgaacatatggagtagcagctccagtggcacaatctccaggccccagtgcgctggttgcccagcgagatggcattctctgcaggtcttgtggttctgtggtggaactggtttagttcactatcccacttacccttggtgtggtccgagggagtaactctccttttgtgccttagtgaataagctcagtgtctaccacagaggacggtagtgaggatcatgtgatgcaaagggcttggcccagtgctgggcacacagtgggcacagaggcagcacaggctgtcactgacattaaggggctgcccaggcaggggggtgatggttcctaaggtcagtacatcctgacctcttagtgcccaccatcctgtctgtccccaggaggagatgaccagtgccttggccactatgcgggtagactacgaccaggtgaagatcaaggacctgaagacctctaacaaccggctcctcaacaagaggagaaaaaagcaggcaggcagctcctctgcctcacagggctgcaacaaccagtagctcatggggccttggaggagcctggcctctcagcctgcataacagactgaaatgtgctcaggccctggccaggagggcccagggtcattcttttaacaaaaggattattttgttgtgttttaatttgtcactcggaacttcaggatggaggaccctgaccctaaacctccttcagatctctggcccaggctcaagccctagagatgggcagggcctaggggctgggagctgcctgctgccatagcagcacctttagctaggttggcccgagtgaggcctctgtgctgtcctgccctggtgcatggccttagctttctaggccactgggagttgtggctgggcttcccatcttccacagagacatctccctgtgggatgggcagatgggcctggccttgagaaaggcattggccattggttgccatggtgaccagggaccacgttgctgcctgtgaa

SEQ ID NO: 105885 - DNA, 1039 bp, Homo sapiens
tttccctgcacccatctgctcaccagatctcaggcaggaaagcccctctctgttgaagtcaggggctatcttttggtatacttgtgtgaaagtggctggttgggagcagagctaagtggcttcccattaacctgaggtctctttctttactctgggtcagacctgaggttggggaaggcgactgagccatgctcagaatgtctggtcctggcttgggcctgagtagggcagagagggcctttcctggctgatcagagcttaccagccccaccccaccatggtagccttagggtgctgagtgcctgatactgcctgacaagtgcctgacacgcagcctagttccttcctggcccctctctcactggctgggaaaccctagaccatgtcagataggacaacactgctgggttttacatccagatagtaataaacaccatttcatcattttctcttggctcctgggtttactctttgtctacaggggtggacaaaggtggcccaagggcagcttctcagacccactagtgatttcaccccagctggagggggtgcctcaggcctgataagcatgccatgctaactccaaggccagagtcctcgccaggcctagaaaggtcagaagagctgagggatggcagctgccacatgcccccagctctgtgctgcccctgtgcagtgtgtgtgacacctacccccggtcctgtgtgtgccagcatctgcccagagtggccacccccagctgtgtgccagcctgctgaagggcgggcagagtgcctgctgcagcgctgagctattttcagaaactgccagatttcatttggcagtgagaatatcgaggaggggagggggcggcatgctgcaagactgtcttttgactactccagtaagagagcactctcacccctccggagcccttgtgggtagcttcaaggagggccctaactgtggcatttctctcccagctcctatcttgagaaacctcccagttttccaagagctcatctgctgcctgcagcgctctctcctccacccccacttc

SEQ ID NO: 105886 - DNA, 1001 bp, Homo sapiens
taaatcttattaattacagattctgaagaacacgatccatctcaagaatgtgtaaatgttacagtagaaatacccatatatgccacagaagaggacagtagtcaagccaaactacatttaaacatatttaggccaggcgcagtggctcacgcctgtaatcccagcactttgggaggttgatgtaggcggatcagctgaggtcaggagttcaagaccagcctggccaacatggtgaaatcctatctctactaaaactacaaaaattagctgggcgtggtggtggacgcctgtaatcccagctactagggaggctgaggcaggggaattacttgaacctgggaggcagaggttgcagtgagctgagatcgcaccattgcgctccagcctaggcaacaagagcaaggctccctctcaaaaaaaaataaataaacaaaaattaaaaaaaatttgaggacctgttctaattaggactaaagatgcccagccaatcagacggaaacatacaaataaatggactataacgtagttctattcaaaggcagctaagcatgggtagattacctattcataaaaaataagtaagagggcacaaaatatagttagatacaatgaataagatctagtatttgatagcacaatagggtgactacagtcagcaataatttattgcacattttttaataactgagggagtacaattggaacctttgcaacacaaaaaaaggtaaatgcttgagatgatactacatgtaccatgtgattattacacattgtatatctgtaccaaagtatctcaagtaccccataaatatatgtaaaaaacgtgttctgacagccagaaattaattatctaattgttgctaatatattagaatcaaaaaagctcatacctttatgctgaacacagatcaggaagaattttatataacactatttcatcatgtgactaattatggctccagaattattgcttataatcttattagcacaaaataaatgta

SEQ ID NO: 105887 - DNA, 1062 bp, Homo sapiens
cctcagcctcctgagtagctgggattacaggtgtgcaccaccacgcctggctaagttttgtatttttagtagagacggggtttcgccatgttggccaggctggtctcaaactcctgacctcaagttatccacctgccctggcttcccaaattgttgggattacaggcatgagccactgtgcctggctcaccatggcctttataaactgtcatggcactggtgggagtgtcgtttaacatgctaatgcattataattagtgtataatgagaaatgaggacaactagaggtcgcttttgtcgccatctggttctggtgagctttgactggcttctttcggattaaggtgttagccaccatgccccacctagattctgttattcttaaaactttggctaatctaaggaatagtgtgttcaatacactttaaaagagaaatctgctatcaaatatgtgtgaaactatctataatatgattcagaaaaaaatcagatttatactctccagcttgatggtagaaatgttcttacagaagagccaacatcaatgttagtgctacaggcagcacaggaataggcagctaagtcaaatcacactaagagaacaagaaagaagaggtggaaaatggaaatgctccaggtaaactggaagctggaatcaagcaaaaaatctatagcagaagtacatgcaggtgccaaagtcaaagcatgatacaaaactcaattctagattaaactaggacatgaaaaagatggcttcagggagctatacggagaaaaaaccaacaaactcatgcagtttggatcactggcaccagtcttccagcacaaagcatttttttaaaaaacaaataatatctcaatatttaagctagagaatgttttacatactttagaattatgagcccaggaagtgcatattaagaagaatcctggcttagaggtgatgtaatgaagacaagatacctacttgaattggctcttgaaacagattctaacactaattgggatagggaaaatgacattaaataaacaacaaacatcatgcaatggtctgaggacacc

SEQ ID NO: 105888 - DNA, 1036 bp, Homo sapiens
ttttaaactcatacattatttttaagtacatcttttttctgaagcatctattctcatgacacttatatttttctacttttaaggttaaaactactaccaggtccataattaagtttgttaagatgtttccgtttaactcttacaaaggtgacaatttttattaaactgaaaagactggaaatctgttacaccagagggagtcggggaaggacacaccgtttagaaaagctaattagaaaatcagatgaggcctagaaatcaggagtgaatttcactccagggactgtggctttatattgaaacattagttgcttcaaaatagggcaaatgattcttcctctcccaacttggatatctctcctggagaaaccagagttattgctggatggttgaaatttttgcttttatgtgaactgcaacttctgtgagggaaagcagctctgggctcctgtgtaacattctgttctaagtttagtaactttgatttactaaagaaatgaataatctaggatgtggtagagataaatgctacttttgcatgatccaaatcaattatgttactttgttggatgtcactacgtagagatttttggatagaaggaggtaatgactttcagactttaaaattaagttcctctttatattaccttagtagttcagagaaatgagcacttttcatagtttaactatttctctttttcttttcattccttttccatgtctcttgtatttcacccaacaccaaaaatgccctttcagaaacacaaagtagatcttttctacaaactacgccatgtgatgaatgaacttattgacctgcgaaggcagctactgtctggtcacctgactcaggatcaggtgcgggaggttaagcggcacatcaccgtgcgcctggactggggtaatgagtaagtatgaaaattgtttgggtatctctcagtttcatttatgataactcagtcttcagggagtttgcacctatacaaagcttctctttaatgattcaaaggcaatgttatattcttcactaagcttt

SEQ ID NO: 105889 - DNA, 1054 bp, Homo sapiens
catgtaatttgagcttcacaataactttgtaaggaagataatacaggctcttatctgaattttatgttcaggaaaatgtctcctggagagattaagtgatttgtctgaaatttcacagtctttgagtggcaaagcttgaattagaatctgcttcttctcatttcagccagccagcagtaaaggaacagcatggggaagtgtttgggagggagccctttattgttaaaggcatcattgtggaaagtctgaagaagctggatcaggcagctcagaaagtggtacagtatatggagaggacagtggcaaagcaaaaatttagtaccaggcaccgacttgtgacttgtctgttagtcagatctggaagggctcaggtttgaatctggattttgccactttcttgctatgtgaccttcagcaaattacgtccatactctaagccttagttgtctccaccaaatacgaataacacttattttacaaagttatcagaattaaatgagatcatgaatataaaaggcatagcagactgcccagcatatagaaagttcttaataaaatttagtttctttcccggtagagtttatttttctttccttctttccatagcatttatctagccggcagagtgtacagcaaagcacatcccaggtaagcggctttcctgggtcttccagcctttcccctcaactttttctgttaagagattacaacatatgaatacaccaggaaatgacagacaccactgacttcttgactgtgtggtgtctttatctgaggagctttgacctctaaacagttttggccagactctacttctactgtgcagatttgcataagcacaattaaagcagactgaaactaaaatgaatcagtctgggagaaaataaaaatgttatttagaatggtaactattacgaggtaacagtgtaaatcaagcgcattggggtcataatggcatttctttaaaatgagtttgaaaatggttttccgggctgggcgtggtggctcatgcctgtaatcccagcacattgggaggccaaggcaggtggatcac

SEQ ID NO: 105890 - DNA, 1119 bp, Homo sapiens
ctaatcccattcacagttatagaggtaacacttcctaattccatacaggcttgactgttacagccttctagccagtagctgcagcggggaccctcaggagggtggtgtggagggggaaatttcaggagattctaactttgtgcacaactccaagggtgtaagtagtgagccagaaggcagctcacctgaggggatattacaaatactcccaagttttgattaaagatcatgtggaggatctgaaatcctcatggagtcaaggcttagttagtcccacaaaagcgccctcttttctttgcagaatgtgatgtctcctctgttgcaagccagtgcaagattgaactagaaagttacttcccacactttggcatactcctagcataaaacacagcacatcttagcttgctcatttctcatatttgggatggcctgactgaaggtcttctttggtcatgtttgtttctagtctttagatttctctaggttcctaaatatacaacttatgtagttgaaccctctcattcaatattcacaagggccagctggaccctagttggacgctggggaacagagggaaagacaactcaatctcccagacctcagtctatgtttaatagactaattctctgggttattggggtcactttgacttaaatttctttagctttccaaaatgtttcttcaaaataacttatactgtctgcataaaagtttttctcaagaattttgctgaactttgcacattttcttctggaaaatgtgactgtgtcttttcaagtactatataacagggtagaactgtggttctaagaaaatgcttttgtttttgcaggtcttatcatttctctgcagcttcttcgtggagacatggaacagattcggagagaaaatcccatgatatttaataggggattggcaattacaagaaaattgggatttcctgatgtcattatgccaggtatgcagaactgcttggggctgggaaggaagatgggttaggatggaatctggtgctcccctcctgagcaggtggtgaactgtgctatggagaagacctgcagctattaaaatctcccacatcccaagtcaggctgcttactgcagtctgcagtcaatggc

SEQ ID NO: 105891 - DNA, 1051 bp, Homo sapiens
attttctaagacttgaatttctaaggttatcattgattgtaggtgatatgagccaaattacatattaaatggttttctgtcttgtcataagaagtccatctatgatttattatgttgttctaatagatgactaagtttttttcctaaagcagtggttgccgaacctcagtgtgcctcagaatcacctgcaaggcccataaaacacagatttctgggcccaccccaagagtttctaacttagtaggactgtggtgggacctggcaatttgcatctctcacaagctctcaagtgatggtgatgctgctggtctggaacctcctttgagaaccatgtcatagagagtactctgcttatggatgtttttctccttcttgattccctttactcaattactgctcccctttggacatatctattagaaggcagctatataggcatagcatccttttagaggaccctctgactcttccccttgtgctcagaaacacactctgtccttttctttgactcctgacaaaaatgtgcatgtttcatcactgaccttcaagtgatgtttctttcttttcgtgtttgtcttaattgttcttgtttttctctgtgctgtcccttcattttcgcccctttctttctgacgcagagatgaagatagttgggtgtaagttctgtcttttgtgtgctctgtctgcttattgcctgctttgttctcatcttcatttgtttcatggaatgttgcaatactggggtggggtatcatgtacatattaataatcctcatcagcctcaccttcttgggtaactgacaagacataaaaagaaaagctaccagcccatcctataacactgtgtattacttttgagtattcactaagatctgaagaaactggagacatattggaatgtctagaaaatcttaacaagcttaaggtgtatagatacaggaaactatttttgtatgagactgatcagttgcattcattgaaaagaaaaggaatcgtgcttactccaagccaaaagaatcagaaaggtggaaagcttctctttttggctttg

SEQ ID NO: 105892 - DNA, 1082 bp, Homo sapiens
tccgcaatgacctgtacctaaccctggagaagggggatttcgagagaggaggaaagagtgtacaaaagaatattgaagtgaccatgtatgtgctttatgcagatggagaaatcttgaaggtaaggcttgccagtcagtcatttgggttggaggataatcctataataattctctgtggactttatccagaggcccattctcttcaagcaggattaaaatcaccccatcagcctttttctctgcctttttctttcttgaagaaaactctaaagtgtgctttgataatgacttccagtattgtacagccattgcagaaatttatcctagtgtctgacctgaatccctcttgctccagtttagatttattccctctagttctatcctacatgttacctctcctgtcattccacctagcatagagctgcctacttttggtaactgttattaggtcccattctgcctttttattccttgagctaatacagaaagttatatttacactttggtcaagtgtggaacttagacaatcacttcctggtaccaagttataggacaaagaacagcagactcaggccgtggaagatttaagccaatgtagtacaagtgtcctctgttattcttcactgaaaatgaagacttcagtgctgtttttctgttgcatgtgagttttttcttcagtctagtcatggtaaagtctgcggtgaataacaaggcatcatttgcagcccactttgtagaagacaaatcggtgttgtacgaaccttgcttctgtgtgttggcagcagccctgtgagatagaacaggaatgatcattcccatttgacagaggaaaagggtaaaattagtcaaaatcatttcccaaatcaagacagaaatagaggagaatgttgaaatagtagtagaaacaacgatttgtatgtcattttaaaaacttaactcaaaaacctaagcctgttcactgtttgcatggagcatgccagtggcaggagaatggtcagctgatcacatcacccctgtgtggacagggacctactctggcttatgtggcccaaagcttcctgttgtccagacaagggcatggg

SEQ ID NO: 105893 - DNA, 1047 bp, Homo sapiens
tgtagggatctttttggagatgtttttcatcccaagaacctaaagagataggcatggcctgagccagccttctctccccatctccctcctcctcctctctccctgtccttcttcattctttctcctccctctaatcgttctcttttccctctttttactcttcctcccaactcccttttctccctctgtctctccctccctcttattcccagcttcctctatcatgtctcgtgatccaagctcacatctgagatagcctaggatgagcagtactttcatgctagcagtccttaaaggagtcaagcaggtcctggggctggaccaggctcctgaaagtctccctaactctggcccagctcttcagcctccacagtagggtttggcccaaggacttaaacacacaaacaggacttatattccaggaccagtattccttggcagggtcttagaggaaatgctgactggctgaggatagagccccctattcacatatccaaacctcattttcaactgtggggctgactccaaatgttttctaaagatcccttcctgctaaacaggctggctcccagatcttaagggatatgagcccaattacctgctgctacctggcacccaagccaagttctcttctcatcacccaggaccactggacagaagtggcagggagacaagaagtagagctgttcaatgctgcacgaggttgtcatgagcaaaaaattccccctctagggataaccatggccacaggagccctgagggaggttgcactacttaaactcagtgggcctgacccatttggggcggacctgctgtgttcttggatgctgcaggttctggtcatctccgtccctccaggctcccagtgcaggtctcagcctgtgtggacaagtgtggacagcatgaaaagagaaaaagaagcttgttgtagtttgagaggtaggggcacattttccagaggaaagcctggagatcctgaaatttctccctctgttaggattctcccatggtatttcaaggtgaaatatgcagagaagctcttttaca

SEQ ID NO: 105894 - DNA, 1028 bp, Homo sapiens
ggatgccgccctcagtaagcagcttgccaatcactccaggtctgaaaagcaagtcccccagccccaccccagggagccagagaggcttgcactcaggagagaaccacccccaagtctccgttctactgccgtgaactcatgtgttgccatgtacagaggccacagcagcatgaagggttgtggcttccctttttatttttttacatttccatttctatgggttttcctttctttcctttatgcagtagatgctttcttcctcctgcagttctggaccatgtggagctacatggagaaattgcacagacagaatcactttgccacactgcagggcccaggagtgggagcccaggccctccctccagggtagagatgcaccgaatggaaattgcactaaggacctcttcctttgctgtatggacagaagagttcatggttgcattcagggattgcaaggaccatatagacatgtcacaggtggaaaaagggccacaagccgttttgcacaaatgcctgcccacctgcccctcttccatccaggagtgtgctactgaggggctggctggaccaacctgctggctcaggcatgtgactggcctaactgcatgcccagggcactgccagggttcaatgggccagccgtctcctactccaccttggatttttctctccatcacatcatttctgaccatttgctcccttccattcttgaaacacctcatgccccacaggagccccagtggtgactggatctgcaagggttatctcccgccctctggggtttgagtggaggtatggagccagagaggctatcctagctaccttcctcctagggggagctggtccccttcctatgtggtagagagactggtgtaagagtgtggggtgtggcaggcgccggaaatcctcaaagctttcagaagcatccagaatgcctaccatcagctcctgaatcagggattttcagcactacctctgagccatggggttggctgcccagccaggcttccaggccctgaggacatgtg

SEQ ID NO: 105895 - DNA, 1032 bp, Homo sapiens
tatagggctaaaaagggcttggagcccggcgacaagggttggagaggggcacatcctctgctcccattcagtgaattcagtggatcagtatcacgtatttatctttaattcacatcacagcagtcaaggaagtggggaaagggggaaaaaaaatcaagtggcagatatttacatctaaaattcacattacttgttggattttgaacatgctaccacaatatatacagtaaaatacctcttgggacaatggtacaaattttgtttcctttaactttgcttttctggtacaggtaagatcatttttaaatcactttttttctttaaacatgaatacacaaaagaaatggttagaagtttccttgttttaaataagcacagaatgcgggaggttaaaaacacatttatagtgctgaataccaattggacatcacactctatacattttttgctcaaattcctgtacaaatacacagcattcaaataggtatttacaaataagcttgaaagaatgaaaatcagtattttacaatcttttcaaagggttctcatctctggcctcccatttcccctcagactgacttattctccaacaaaagggatttcagaatgtgtccttttcatttagttagggaaaatggagagggaaaacaaacggtttcaccttgcataatgcgaagccaaatgaacccatactcccctccctacctcttgtgccaccaagtggagaaggtagctgttcttatgtgatgactgccttgtccagggattgactttcagaagtgccttaaaatctaagccctcctacctatgaatcaaatccaaaactagcccctaacccctaaccctctaacacctgtgaacaccagatggtccagagattgaagcttgcaaatgaatgtaggctgagaagcaggccagccctttgaggtgagggctgctgtaactgacccatatcctcagcagccttccgccccactctgcctggagtgaacctggtggtatcagaagggacccacactggtgataaacccc

SEQ ID NO: 105896 - DNA, 1096 bp, Homo sapiens
tcatttggcttcgcattatgcaaggtgaaaccgtttgttttccctctccattttccctaactaaatgaaaaggacacattctgaaatcccttttgttggagaataagtcagtctgaggggaaatgggaggccagagatgagaaccctttgaaaagattgtaaaatactgattttcattctttcaagcttatttgtaaatacctatttgaatgctgtgtatttgtacaggaatttgagcaaaaaatgtatagagtgtgatgtccaattggtattcagcactataaatgtgtttttaacctcccgcattctgtgcttatttaaaacaaggaaacttctaaccatttcttttgtgtattcatgtttaaagaaaaaaagtgatttaaaaatgatcttacctgtaccagaaaagcaaagttaaaggaaacaaaatttgtaccattgtcccaagaggtattttactgtatatattgtggtagcatgttcaaaatccaacaagtaatgtgaattttagatgtaaatatctgccacttgattttttttccccctttccccacttccttgactgctgtgatgtgaattaaagataaatacgtgatactgatccactgaattcactgaatgggagcagaggatgtgcccctctccaacccttgtcgccgggctccaagccctttttagccctatagacatgtcctttttgcactgagtagagccaacggttcccgcatcctgccttgaaggcaggcagccaggagggcacttgaaaggagggcagtcgaaaaggaaacatcctccagtgcttctctggtgattcccgggaccccactcaggaggtcccacggcagcgggggaccccgagggcctagccggggaggcaggaggaggctggccagccaccaagccacgattcagagcttgtaagggcacctcccgagcccctcaccttcccactctgaggcgaccccatgtcctcgaccgatgatctggcccgggcgcttccctccacggtctagagtggcggcccagctttgagcttggcgcgccttgagcccttccttcagatgtcccgcagtccgtccaccccgcacgtctccta

SEQ ID NO: 105897 - DNA, 2066 bp, Homo sapiens
ttgcctgcggccgcccgcccttcctgcctaacctgttgtcttggctgaccccagaactcctgcaccacgagtcggagtccgggcgaggagatcagcaggggttttcgagggagcctggggcccagggcaggggtacgcgggtcaactcaacagatgtaaggcgtggccgaaccccattcagctagcagtacccagcctcagccacagtcgctgcccttacccaagatggcggcccacaccgcttccgtcgctgctgtagtcgcttcctgcggccagcccgggttcaatcagcggccgacaactgtctagggctcagacaccaccagccaatgagggagggcagcgtggagccgcccgtctgggctcgcggctcctggaccaatggggaagtggcatgtgggagggcgccggggggccccccgccaatggggagctacggcgcgcggccgggacttggaggcggtgcggcgcggcgggtgcggttcagtcggtcggcggcggcagcggaggaggaggaggaggaggaggaggaggaggatgaggaggatgtgggccacgcaggggctggcggtggcgctggctctgagcgtgctgccgggcagccgggcgctgcggccgggcgactgcgaaggtgcgggatagggggccgggggccgcgctccgtgaccgttctggcggcggcgctgaaccccacaacatcaccagacggccggggccaagagggcgagggcgggggcgggggcgggggcgacagcaggtccccgcggggcctgcatgaggaggctccggcgcccgccctagtaaatctttcttgggcctagaaaacattggtccgacgaagaaaagttgagactagatcccgttgaaaacttgtcctgaaatctccatcactcctgagttattgtccccaccaccatctagaggttaccgctccccgttcggcgtcgggagctccagggctggccgtgggtgctgcgccctgtctgttgggatcacgaagctgcacctctgggtccgctgttgtatttggaaattagcagcagcattttgatcatttttctcttcaccttccagtctctccatttatgaggtcacagtgagtcccgtctcaaggacacgtgttcaccatgggcttaaacttgatgaaaggagcagggagaagtcgtttataggtcattgggtgatgcttggtcctttgatgccctgggtgtaccaggggacccccgccacttggaaccgggttctgtctacctgtagacacctgagaaaaatcggtgatggaaaagctcacctctaatgattcatctccgtgtctcctattaaaattgctggcggagttcttttctggtggattggaacagcttggtgattgctgagcatctcccgtccctctcttttccagtttgtatttcttatctgggaagattttaccaggacctcaaagacagagatgtcacattctcaccagccactattgaaaacgaacttataaagttctgccgggaagcaagaggcaaagagaatcggttggtaagtagctggtgatcctccccaactggccctggctcatgttaaccctcggcttcaccagccgtttgataaaaggccttgcccacctctctgttcaggaagccagctactctctccataaactaatgtgagaagactgaagtgcttctatgtccttcccaaagcagcatgtgttctgcaactgtgatttttttttatcctgttagtctttattaagcacctactatgtgctaggcactgggaatatcaggggaaagaagtgacagtcggacacacaaataatgcaatgtctgggtgtcatgaagaaaatggaccagcaggtgctgatttagagtggccaagaagtctctgaggaagggttatcattgaagtggggtaagaccatcccatacagggaacagcagtgtgagtgcccagaggcctgaaagagtgtggcatgtatgtggacaggagaaggtgacagggtgcctacaggataggcaagggccgaatccaagacaaaagccctagtgaagcaatgggttttctaacttgaa

SEQ ID NO: 105898 - DNA, 2296 bp, Homo sapiens
aggcatggtgacaggcgcctgtaatcccagctgctcaggaggctgaggcagggagaattgcttgaacctgggaggcggaggttgcagtgagccgagccaagattgcgccactgcactccagcctgggtgacagagcaaaactttatctcaaaaaaaaaaaaaaattgttttagttagctgggtgtggtggcccacaccggtagacccagctactagggtggctgagaggggaggatcaccacccaacagattgaagctgcagggagccgtgatcatgccactgcattccagcctgggtgacagggagccctatctcaaaacacaagtaaggccctacagagagatgatgtttcaaggtgtcagtatgtttggaggagatggctctcaagcacctcctgaaggccattgtcctttattgctccagtgctactatatcggggccacagatgatgcagccaccaaaatcatcaatgaggtatcaaagcctctggcccaccacatccctgtggagaagatctgtgagaagcttaagaagaaggacagccagatatgtgagcttaagtatggtgagtatgcctagtcctttcttaatgaatgctgtgcaccttctgggtttgtttcccatctgggagaggaaaatgatgagctagagtcatgagtgggttgtattgtatgacagatggtgctaaatgctggagggctctggcatggaagtgggtggaggtcagaataggccttattgaagaagtgatatttcagcaaactttgaaggaggtgaggattagccaagaggccagctaatggaagaggatacaggcaggataaaggtgtccagtggcatggcaagtcagagagcattgcaggctggtgagggcttttaatctgcgtgaagttaggagcattaggagtttttcagcagagaagggacatagtacgacttgggtttaacaggctggttctggctgcaagctctgaagccccagtgatttttactattctgaaaagaaacactatgtccaagcatgcaagcccaagagttaggaactacagcatctctcttgctgactgggtctctggtgtacatagtcccagtcttcagaaacagtcagggcctcttctgaaaaacttgaatggccaaggacctgtgttcacctacttgcgtcttcctggtacaggtccagttggctccaggtcactgtggtcatggagagtaagttcctaactcaaaggcctgagcagggctgctctttggcaccagcctggagttgttagtatgtggtgactatgtcagaggcacttggaagatgggaaccatgtttctcctataaggacagtgtggcctctgtccctatccttgttcacgctgcatatctgtagtagacataatatgtagccagccttcctggtgaagaggctagttccctcttgtgggggcagtaggcactgacatgcctgtaaatgtgtctggaaatgtctcttcctctgaaaccagtagggctggtttggccgttcagggagtgacatactctgggactactgggggactgcaggtgctccacccagtcagtgactctccctgctctctcctccagacaagcagatcgacctgagcacagtggacctgaagaagctccgagttaaagagctgaagaagattctggatgactggggggagacatgcaaaggctgtgcagaaaagtctgactacatccggaagataaatgaactgatgcctaaatatgcccccaaggcagccagtgcacggaccgatttgtagtctgctcaatctctgttgcacctgagggggaaaaaacagttcaactgcttactcccaaaacagcctttttgtaatttattttttaagtgggctcctgacaatactgtatcagatgtgaagcctggagctttcctgatgatgctggccctacagtacccccatgaggggattcccttccttctgttgctggtgtactctaggacttcaaagtgtgtctgggatttttttattaaagaaaaaaaatttctagctgtccttgcagaattatagtgaataccaaaatggggttttgccccaggaggctcctaccagtttctgctttccagttgcagagtttggggggttattcattcccatttatctctcaacccaccagtgctgaaaataccagagcaggacataggggctggggccagctgatgtgtgtgggtgtgtaccactagagggcagcaggcactcagcagaaaggaggtggcgggggcggggggtgctgcgcttgataccctgccccttgataca

SEQ ID NO: 105899 - DNA, 1037 bp, Homo sapiens
tgcctatgccttcctcaagttccagaacctggacatggcccatagggctaaggtggccatgtcgggccgagtgattggtcgcaaccccattaagataggctatggcaaggccaaccccaccactcgtctctgggtgggtggcctgggacctaacacgtcactggcggctctggcccgagagtttgaccgctttgggagcattcggaccattgatcacgtcaaaggagatagctttgcctatattcagtacgagagcttggacgcagcccaggccgcctgtgctaaaatgaggggttttcccttgggtggaccagaccgcaggctccgcgtggattttgccaaagcagaggagactcggtacccccagcagtaccagccctcgccactccctgtgcattatgagctgctcacagatggatacacccggcaccgcaacctggacgccgacctggtgcgggacaggacgcccccacaccttctgtactcagaccgagaccggacttttttggaaggggactggaccagccccagtaaaagctctgaccgccgaaacagccttgagggctacagtcgctcagtgcgcagccggagtggtgagcgttggggggcagatggagaccgtggtttgcccaagccctgggaagagaggcggaaacggagaagcctttccagtgaccgtgggaggacaacccattcaccatatgaggaacggagtaggaccaagggcagtgggcagcagtcagagcggggctccgaccgcacccctgagcgcagccgcaaggagaaccactccagtgaagggaccaaggagtccagcagcaactccctcagcaacagcagacatggggctgaggaacggggccaccaccaccaccaccacgaggctgcagactcttcccacgggaagaaggcaagagacagcgagcgcaatcaccggaccacagaggccgagcccaagcctctggaagagccaaaacacgagaccaaaaagctgaagaatctttcagagtacgctcagacactacagctgggttgga

SEQ ID NO: 105900 - DNA, 1118 bp, Homo sapiens
cccactcagcatgtttggcagcaggtagccttcagcagctgtgtagtcttgtacaaggagaagctgtgcactgttgatgccagggggtctcggggcccctgatctgtccaggctcctggttcggcctactttctagcctcactcagcccagggatagccagtgttgggagacagagttgcctcaggttcccaggggcccgggagtccaaatactggaatggagggttggaggcagccttccttggatttactcatgaactttgcctagttgtttgtgatttttggctttctctggtcgttcaggggtgatgggtaatagagcaggcccgtgtccagtcatacctagagatttgtggggggatactgaacctctagactgaagtacttaccggggagcacagtggactaggggatgcccttgataatgacggtttcctaggtgcaagatcagagcatgtgcctacaccttgtgccctgatgccgaggtggagaccattgggaaataattaatagatatttttctggggggaaatcacaagtcactgaggtgtttgtttgtttgttaggcagtgctagagcttgaagccactcaagccagttggggaggaaagggatgcggaggtaccctctagctgggaagaagggtgagattccgtcttcttccctgtctcaagtaagtaaggaaggtactgcggacagtgtgggccagggaggaaaaccagagcacacagttttgtcaccatggaacaccccaaatgccattcttcagcgtgtctggtaccttggatgttcaaacagggaacactgtcagggctgaggagaacagaagctctggtaagcgaatgagcccctagatgataaccaggaactccaggttctgctggccgtggcatcctctctccaggtctgctcccttaccggagctaggataaggtagcatgagtgacacctgagattagaggctggggctcactgcaggctgtggagaggtcatgctggtccacaggaacacttggcagtgctctcgtagacccctcggtgatgtggaatggacaggtgcctcgcaagagagcaagcacgttcataacaaaacagcaacacaaagacatgttaagcat

SEQ ID NO: 105901 - DNA, 1313 bp, Homo sapiens
ttctgtaagatcagacagtaaatattttatgcagccgggcacggtggctcacgcctgtaatcccagcactttggaggctgaggcgggtggatcacctgaggtcaggagttcgagaccagcctgggcaacatgatgaaatcctgtctctactaaaaatacaaaattagctgggcgtggtggcacatgcctataatcccagctacttgggaggctgaggcaggagaatcgcttgaacctgggaggcggaggttgcagtgagccgagatcgtgccactgcactccaggctgggataatagagtgagactccatctcaaaaaaaaaaaaaaaaaaaaaaaaaaaatgctttgtagggtatatggcctttgttgcagctcttcaactctgctgttgtagtgagaaagcagtcatagacaatccgtaaatgaatgattgtggctgtgttctaataaaactttgttttgcaaaaataggtggtgggcttgtagtttgtcaactcctgcttcagaggattagccttagaatgaaaggccaaagtgtagctctccgccgagaggcatggctagaatcagtcagaagcagcccctcatggggtgctgttctttttggggtgaattataaagaaatgcaggccctcttgtggaggagccctttcctgtctccctttggctaatccctcctaacagccaaggggaaaatattttccctttggcttctggtttattcacttccttttatttacctttttttcttaatccaaattttgaggaacaaactccagttcttctagttatttcccattaggtttctgaagtcaagttgtcccctgactatggtaatgaatcctgcagaaatcagcaaatagttcaaagaggctgttagctctgcagctgtacatgaatcttcttaccaaggctgtattttgaggaagcttgagggtgggagggtaggggagtgtcttctatatgttcatctgctgttcatcaacttctgttttttcatacttggaggctgaggtgattcagtggagtaggccgaagcctggtcagacaaagttttaatgaacgtttttgtcacgtgtgaatagtgagacatgggaaacaagttatacctcctttcaattacaagtagttagcagggcaggttcgcagggtcagcaaacagcaggccagctgatggtggtgctcccaaaataagagagcatcactttaatttttccattcttaatttgaatataaagccactcagtttgtatttggcctgtacaattactgcctcttttagctgttgaggaaattccttctttcaagccaaa

SEQ ID NO: 105902 - DNA, 1035 bp, Homo sapiens
aacaattagaatcctttgctattggcaaggctgacagttgatgtttgagcagaaagataagtgtcttgagtggcagctacgtttacttggaaatgcctcttatccctgtcaaagcaaagaggtatctttgtgtcctctcccttttgaagggaaacagttgggattctaatgcaaacctgaaatctgtggcagatgccagaatgtaccatttacaaagcccagagtccctagaacaaagtatttcattgatgttctggtaattttcttgcctttgcaagttcttgtaagaatggaaagaaagatagtttctccagcatacttttttttctttttggcttatgacaggaaatatgggtttctgttagtgttctatattttaagtcttttgttgcaatgttgttctgatcaaatgtttgtgatagcatagttaggagcttatccacattcttggttagaagatcaagggcaagagcttgaagggctgaggagataatgagcagttgtgttcttccattttgttaaagcattgcattttagattccaggtaaaaggattttttctagtgtctcagctgatttcacttgctttggttgatgcaggtgagaaagaagagtccccttgggctcctagaatattgaaggcagagacttctgtgaagcgagttgtctgtttccttgcataagggctatgtgaccattaatccttgtctgaggggtgctttgaccgtcttgagggacatgtgtgcctatctcagccatcactgacaagtctggctggctcatgaagtctgtgctcgtctagatcactactaccctctactgacagtttcctaccctgtctctttggtcgacccgccatgtggcccccatgggtcaggcctctgtgtttgtactaatgaacattacgctttcttaccaggaagaggaagaacaggaggaagaagatgatgatgaagatgatgatgacaccgatgatttagatgagcttgacactgaccagttgctggaggcggagttggaggaggacgacaataat

SEQ ID NO: 105903 - DNA, 1442 bp, Homo sapiens
aaatctgaggccaaaactggattgtttgtcaacatcattatcccagccctcccatatccgtgcatttaataaggcagtgggcggcagtcttctctgggaaccatcacctgggtccatgtgatgcctggtgtctgtctttgagggggaggtcaactcagaggaaagttgagattgccctagacaccttgggagttggaaggctattctctgggttcgccttattcttgcagacatggagtggtgagaggcaaaggcactggaggttggtggctggctgtggaagcgagaggccaccataagggaataatttaagagttatactcctcttatcccactctctccaggaaggcttgggtcagggaaaagactgactaattcttcttcttttgtcctgcttaacttctgagaagttaagggagaaagagattaggaagggcatatggtagtggtcaggacttttgacttggatgcaggaaggaaagcaagaggctgcctcagcgtgacagccaagagtgagaggggcagggtcaagagggctctaaggagtggctctggagcccagcctgtagaagagccggaaagctttctagctcagagaagactaggtggcagggtaggtgtgcaacatggctaagttattactgtggcttccagatttcttaggatctaggcatgtttcactccatactgatattacagcttttattgatcatctggtgcatttcatgtttgaaggacctctgttagagaactgcttatcccctcaagcccttggcattttgatttttgatttagagatgtttgatttagagatacgggataataccgtatctatttgagtaggtctcttttgtaaccttaattctgttgatccatgctccttctagaatcttgtggtggagtttggctgtttttactatctccatcagatttctgcctactgcctctcatgcacagtgtgccagcttgaattttttttaaactcactttcctttgtaggaaaaccagtctctagttttactttgctttgtacgcttcacctgattttaaaactagagacttttcattttcctatgaatcatttgctattcaaagttttgtcctagtctagatatctgttctcaggtcttctcagatgttccagatatgacttatgtggctcagggatacaggcacctgtgaccaacacctttgaatttgccttttcattatagcaaaataaattcagaagcctgaatggtcagccgtcatctaataaaatggtccagcataaagagctttatcgagatataattgacatgccataaaatatttgtcctttgtccttatgcttaaataagcttggagattaagaggaaaggatgaaaggtacagctagctgtatctagatgaatgaaaacctaaacaatgtattggacacccataaatatttggttcctgag

SEQ ID NO: 105904 - DNA, 1064 bp, Homo sapiens
cattcccctcctagtgggaccttcgaacttttcatcttttgcatactgttcccgctctggatcagtgtcgcgtggtgttcaatcacacgggaacagtgatgtatggaggtaataaaccttatccttcattattctctttccttttgctctaccccttcacttaatttgatacttctttttggaaccatctctcacttgtgaattggaaagcatttgagagttgtaacataaaagataaaaaattgatagtatgaatggtgacaaaagatatgaaaataatgttggtttagggtgaaaggcagcttactttgaagataacaaggaaatcttgtatggaaagaaatttcatgcagtattttccagtgtatcattatgaacttaagagcttttgcatttgtcctcttgtgttgttataagccttgtaagtacagtaacacttcttggaggtagatgagaggctgaggatattatttgtcacaataggtgggatatgcaaggaagatgctctgagaggagctaactagatgcagagtagatttctgtacaagggaatttgtatgtaaacctatatgcaagtagattgttttgattggccattaacattttctgcacttgtgaagaggggatgtttgtgattcctaatagtgtttcctcccccactccccctcaagctatgttgcaggcagatgatgaagatgacttaatggaagagaggatgaaaagcccctttgggtcatccttccgaacatttaatgcaactgactacaaacctataggtaagcagaaagggacagacattgatcattttgtcgtgttttggtgttccttatttaagatccttcattttctggaggcctgtaattttttattgaaaaacagagaagttatggaaatacttttgagcaatcatcctgaattcctttagaggaaaagcaggttttagggtcacagcaatagtccaatcccaatcttctcacattctattttccagcaaccattgatgtgaaacggaacatctttgacctgtgtacagacaccaaagactgctatcttgctgtcattga

SEQ ID NO: 105905 - DNA, 1059 bp, Homo sapiens
tggctaatttttttgtatttttgtagagacggcatttccccaacgttgcccaggctggtctcgaactcctgggctcaagtgatccacttttcttggtgtcccaaaatgttggcattgcaggcatgagtcactgtccccagctgatagtatttacagccatgaacttatatgagatcatcaaggggactagagaagagttgtgggtatagaaccctggcatgtgtttaggagttgccaaatgaggaacttgggaaggaaatcaaatataatggccagtaaggcagaatggaaccccgagaaaaagaggtgcctggccgggtgcggtggctcacgcctgtaatcccagcactttgggaggcagtattctgtggtaatcattgatccatgtggagaatttgtgtgttaattttagaaactgctttgcacattttctctttaatttgtcagtggatggattggtctgatttttctcttcccatcccttcttctctaaagatttatgatattcagactggcaacaagctgttgactctgtttaacccagatcttgccaacaactacaagaggaactgtgccacctttaatcctacagatgatcttgtcttaaatgatggcgtcctctgggatgtccgctctgcacaggccatccacaagtttgacaagttcaatatgaacatcagtggtgttttccatccaaatggactggaggtgatcattaatactgagattgtatcctttatactcatgtcttaccttccatttgttgtctggtttgtggtgcagaaataatttgttctatctttataccaatacctggttaaagtgtccacactggtaataatatggtgcctgtcctttggtttgaaatgttagtgaaatctccaaagcactgttgccaatgttagtaattactgacaactttcactagcatgttttctatgtatttggtaagagtgaccagtttcctacctcccagttctccaagaattgaattagcttttatctgtcttcagaaggattttacttttgctctgtaaaaaatcagttgccacataagag

SEQ ID NO: 105906 - DNA, 2231 bp, Homo sapiens
ttctgcaagtatgctgctgaactcattgaacgggtgtcaggaaaaccacttctcattggcactgatgtttccctagcacgactgcagaaagcagatgttgttgcccagtcaaggatctccttccctgagaaagagctgcttttgttgatacgaaaccatcttatttctaaagggcttggagaaacagcaaccgtgctgacaaaagaggctgacctgcccatgactgctgcctcccattcttctgcctttaccccagtcactgctgctgcttctcctgtctctctaccccgaacccctcgtatcgctaatggcattgcaactcgtctgggcagccatgctgctgtgggtgcctctgcgccttctgcccctactgctcatcctcagccacggcccccccagggtccgctagctctgcccggcccatcttatgcaggcaactcccctttgattggtagaatcagttttatcagagagaggccatcaccctgcaatggcaggaaaatcagagtgttgcggcagaagtcggaccatggtgcctacagccaaagcccagccataaaaaaacagctggacagacatcttccttccccacctacgctggacagtataatcacagagtatcttagagaacaacatgctcgctgcaagaatccagttgccacctgcccacctttctccctctttactcctcaccaatgtcctgagccaaaacagaggcggcaagcgccaataaactttacgtcaaggctaaaccgcagggcatcatttccaaagtatggaggggtggatggcggatgctttgataggcaccttatctttagcaggtaagaagaggccccttcttactccctgggaattggaatgattcttttatttaaatcaaactgggcagtatcagcatagttgtcctgaaataccactgattgttactttgtgtaatacttgaacaatgtaattgtaccaccttttgtcaaccatgggttccttgtgtgattgttggcagtatattgatataatcgtttgtgttctcatctcaactagtatgttttctagaacccacaccccctcattactactgtccataaggaggctcccaaacttgtgctggtgcaagttgcttcctgttctgattcttgacaaatcttacataaaggttacgggatcacaggttttaaacatgggaattttttttttttttggagacggagtctctctatcgcccaggctggagtacagtggtgctatcttggctcactgcaacctctgcctcctaggttcgagtgattctcctgcctcagcctcctgagtagctgggattacaggcaggcaccaccatatctagctaatttttgcatttttagtagagatggggttttaccatgttggccaggctggtcttgaattcctgacctcaattgatacccccccttcggcctcccaaagtgctaggattataggcatgagccactgtgtctggcctaaacatgggaatttttgttatttaaatttgtaagtggaaatctttttcttatttaaaataaaaagcactgaaggtcactgtgattttggaagaagccatttgaaacattaatgttctgtgctttttcttctatcctagcagtttgctttttctgagtccctgcacattctttgcctgtgattctctcttttttttgcttagattccgtcctatttcagtgttccgggaagccaatgaagatgagagtggcttcacctgctgtgcattctcagcacgggagcggttcctgatgcttggcacctgcacagggcagctgaagctctataatgtgtttagtggacaggaggaggccagctataactgtcacaactcagccatcacacatcttgaaccttccagggtaagggttccttcctaggatgctctcagtcattcttccaagatgaattggtgaactagagtaaaggaggcttaccctttattgagctctctcttttaaatgagtcctcaactggaaagtctagttgaggttaattcatatttcagatggagactgaggaatatggcaaagttagtaggaagaaaggaaccatctttgacatcttctcattttcccccctcccttttatctattctatttttgtggctagttcagtaggatttaatattctcttaagtttggttattttataggacactataggtgtatgtattcaaatcctagtggcttctgaccatttcttggtttctg

SEQ ID NO: 105907 - DNA, 1103 bp, Homo sapiens
ataaaagattaagcaatctatggtcattacttcacatatgggcttttgactcaagaattgtggaatttgaaaggtattattatttaatttataattaaaaccttggccaagcatggtggctcatgcctgtaattccagcacttgaggaggctgaggtgggaggatcgcttgagtctaggagttcagggctgcagtgagctatgatcatgccactgcactccagcatgggcaacaaaatgagaccctgtctctacaaaaaataaaataattagctgggtgtggtggcatgtgcctgtggttctagctacttgggatgctgagacaggagggcagcttgagcctgggagattgaggctacagtgagccgtgatcaagccactgccctccagcctgggcagcaaagtgagaccctgtcttgaaataagtaaataaaataaaatctcttggccagtgagctgtgctcaaggaggtagtaggcagatgtagagttatatataataataatactatatatctctccttataggcatgctcatatactcatgaacagattgtggaaatgatggaatttttgatagaatatggcccagcgcagctatattgggaaccagctgaagttttcctcaaactttcttgtgtgcaactcttgttgcagcttatttctattgcctgcaattggaagacctattatgcaaggtgggaccagagagagatttcaaatgaagtttgatgcatctttttgttaaagttgatgttggtttgcacattgtatatgcttaacaaacatttgttgaattgaattgaaattttggacttgaatctgagaaattagattaggcatgaaaatatgatttttaatttacagcacacttgttcatatatatggtcttggtgattgtaaaatttgcataataggcaaggattagcctctgtactgtcggagaaggtacatgatttacacggccacagctgcagagctggggttaaagtcttgtcttgagcctggagtccaggattctttagtacttaaagtgtcttgctactacttgacaaccatatataatgtttatattacgttcatataaaattgtccttttactctt

SEQ ID NO: 105908 - DNA, 1061 bp, Homo sapiens
tcaaaatgtgtgtgaattaaccagagaatgaataccaaactcctagacttaggatcagaaatctgagccacttttatcacattggagaagttccttacctcttcctcttcttttaagtgagaatcctaatacctgtataatggagccctcgtgagcattaaatgatgtaaatatttgttggcactcagtaagtataggttgtatttaaatatttatctaaatttaggtcgttttcaggtttggaatggatcgtgttctaaaattgcctttgtattattacctaaactttgtactaagagtgacttgattggagatggtcattgtattctgcagatatctatactggcaaattttccatcctgttcaagggctcctttgcccacaatttaaaagcattgttttatttgtatttttttgcaggtttgcatgcatccccacaatgttctgtctgatgtggtgaactataccctgtggttaatggagtgttctcatgcttcaggatgctgccatgctaccatgtttttttcaatttgcttctcatttcgggccgtcttggagctctttgaccgctatgatggtcttcgtcgtctggtgaacttggtgaggttctttcagtgcttttctccctaggattgagggtcctggttgtcttggctgccctttaacggcacacccttgaagaaaggaagcttctgattagaggagttttgctgccattctttttgtgaagttttttttttttccctttcttcacaaatttctctttttctttagtagttagaggacactgtgccgttgtagacttgccttggatatagtaatcttataacggggattggcagttgatgatcttgatctttgtaaaagcaatagttttattcctgtacattttttaatatgattaaaagcttgttcattttttggtatgagtttaatgttttgctttcatatagctactgttagcatgctatatacatagatatacataaatatgcgttgatatttgtcagtcttgttaagcataaaagtttactgatacataagcagaatatgtatggaaa

SEQ ID NO: 105909 - DNA, 1050 bp, Homo sapiens
agaaggttctgatatgtggggctaaattaaacactactttgatggagcacctctcagaacgttaatatattacctgtgctttgtgagcttctgtgagagatactttcagtgatccccagttgatcatggagccttttgggagttaacatctagattaggactatattctggggattgttaatttttagcttgagttttgtttattttttaattatttttttctgactgcaaagacctaaaagagatagcttgagttttattggctgaataggcttctattgcacagatactttatataactaaggaacctattggatgctgtagtagtactttttttactcttacgaacattgaaatattaaaatttttttcatgagactgaaatctttgcttattgttaatcatgaacttgggctttttccgaaatgtactatttaatttcctttactataggagggaattgtcgagaatcttttcaaatgggcccgagaggccgatcaaccattgaggacatattctactggactgttaggaggtgctatggaaaatcaagacattgctgccaactatagagatgaaaattcacagctggtaaggactgtgttagaataaatttttatataaaatgggagagtattcacaggttcttgttacttgaatctgaataagtagatcatattgattatcttgtactggagcatggctataatttcaatattagtttccataagagtttttaaaaattgaaaatagctttttttttttttgagacggagtcttgctttgttgcccgggttggagtgcagtgatgcaatcttggctcattgcaacctctgcctcccgggttcaagcaattctcctgcctcagcctcctgagtagctggggttacaggttcccactactatgcccagctaattttttgtatttttagtagagacagggtttcaccatgttggtcgggctggtctcgaactcctgacctcatgatccacctgcctaggcctcccaaagtgctgggattacaagcgtgagccaccgtgtctggcaga

SEQ ID NO: 105910 - DNA, 1032 bp, Homo sapiens
tttatataagaatgagtttgggggccaggtgtggtggctcacgtctgtcatcccagcactttgggaggctgaggcgggtggatcacgaggtcaggagatcgagaccatcctggctagcatggtgaaaccccgtctctactaaaagtacagaaagttagccgggcgtggtggtgggtgcctgcagtcccagctgtgcgggatactgaggcaggagaatggcatgaacccaggaggtagagcttgcagtgagccaagatcacaccactgcactccagcctgggcgacagagcgagactgtcaaaaaaaaaaaaaaaagaatgagtttgggagaggaaactcttttatgagataattgtgtagatttctatgtacatcagaagaaatagtctttttctaactttgcttttattttctaccttgaccgttgaattgactgttgtagtggtggtccatttttttatgcttgtccagagttgaccccttgtttcctttgtgctaggatgtctcaattgattgaaaaagaaactgaagagtatcgtaaaggggatccagacccatttgatgatcgacatcctggtaagatttgtgctcttaagtgtgggtcttttttttttcttttaagacacttttattaaagcgagggtcttttttttcttttctaaaaaagaaaaattgcttatgggaaaatttttgaattgaaatagcgtcttttgtggtaagttttaagaccttttatttgttaaaatgttgctcaaggtggagctagtgaggaaaaataaatttctggaaaaaattggaaatatttttgatatttgccaatcgaatatcacataactaacctaaaggaacagaagtaggtgtactttagttaactcagttgatatgatgacaaagaattaaaaagaaaaattgtcttcctttcagactttttcttttttggagatgggtactcactctgttgcccaggttgcagtgcagtggcatgatcatagctcactgcagcctggatctcctggctcaaacgatcctccc

SEQ ID NO: 105911 - DNA, 1054 bp, Homo sapiens
aagatggagccccgcaagcccgtacggaacagagactaggaggattggaaggaaaaagaaaacaagggaaatgaaatgcgcccctcctccaggtaggggcggacacaccccgcccccccactccgggcggaagagttactctcgggaagcttctcgtggggagtggaggaagaacgtggaggccccgcccccaggacaagaatcaggaggaggaaaagtcctgtcaggccccgggcccagcctcccggcagaccggcccgccccctcctcgccggcggcccaagcaggtgccgcccctcccccaagcccggcgcccactctgccgcccggccagccgcgcgacctgcttcctcgcgcccctcccgtagagtcgcctccctccatttcccactcaccgtccgaggcggctccgccgctgcccccccccgaccccgccagtggccacagttcacacacacacagcctcaggtcccgcactcactctccactcacacacacacacagcgcgaccacggctccacagcggcccacatattatgcgtcactcgcgcgctacgtgcaccgcgcgcgcgcgctcgcgcctacttggcgcgaggaccgcgagcaaggggcgggaagagaacgcctgcacgatcggggaaaaaaaaaaaaaaaaaaaaaaaaaaaaaaaaaaaatcgaagagccccggggacgcctgggaaatgaagttccgcgtctaggggcgggcccaccagtcccaattgacgcatgagctcttcgcctggcgcattgacttctggatttgtagtttttttggataaatgcgaactgctgagtactcattggctgcttcggaaggcggaagtgaaaagtgagggagccaatccttctaagacagtactgtaatcgcctgatactttttcagtgtcttgttctgacctgtgtgcgcaaagagcctctgttttatttggccatttgccttatcttacctagaacataccgtgatctaagaaaatatttctcataaacatatcagaaatcacagcactcattaaatcagaaggcactggttgt

SEQ ID NO: 105912 - DNA, 1866 bp, Homo sapiens
ctccccgaccccctctcctgaggtctgggaatttggcagactggggtcgggctggggcagaagaggcattgagagtttagcttccctgaggtaactggtgattagttcctggaaaggcaggagctcagctgggcacaagagagttaagcagagagctggatcctccggggccctgatgcaccctgacgaggagtggttttcaggcaaggaacttatcacaggagtgagtagtggcacacggtgagtagtgctagctgtcttgtcgttagggtgaggccggtgggagttgtggtttggggagtgtagaggagggttgataggctactgagattggagaatcagctttatgtgggtcatggtggtggcagcctgggagatgaacaaggaaactttgcagagtgggcttcctgatggagagtgacctcttactgcgtgggagtgggtgactcagatctgttaggattcctgttgcttgctagggattgtggctgactatattggtggctgaacattgaggtggatgcaactggaagggttatgtggggctggatgagtttgttcccacgtagaggacagtgtggacctttcttactccaagtcagagtggtgactgtcattgacaacattttaagtaaggaatttctttgtggtatttggatccaaagcttttctctgttcatttttttctttcctccgttgtttttgaattgtgactcatactttcttttcagcactgtggctatttgaaatgatagacaaacttagacttcatcatacatgtaagttccaggcgttttcagtccaattcttataaatctaaatttaaaagcttcttttcactaatttgtgtaccattgtttaatgtgtgcaacactaaagaaggataagaaaactctaacatttatgttgttaaatggtctttccatccttaaatccatgaaatttcatcttctcttactgccatgaagtgagttcgttgaatctattaaatcttagtgactctcatttcagcatccttgtttactctcacaggacattgtcttcactagaagtattatccatcttcaatgaatttggcctgtacactgtctccctgtgacaatctatatcattgaaagacagtacgcaaactccaactctgaggcctgcagctgtgggccggagctctgtatgtattattcaggcaaaagttggtgtgttgtctgtaggtgaggtttaaagggaaccctacatgaacaaaaacagtatcagaatcattgtaccttctgagtttagagtggtaggaaatatagcctaactggagtctagtataaactttcaagtgcaatgttaggtaattctgtttgtagttgtactgatagttctcattattgtaaacattatctttttccttaagctttaaataattatttttcttcaatggtattctttctttcttggctgggtgtggtggctaacgcctgtaatcccaacactttgggaggtcgaggcgggcatatcacatgaggtcaggagattgagcctgcatggcgaaaccctgtctctactaaaactacaaaaattagccggtggggtggcatgtgcctgtagtcccagctactctggaggcagagggacaagaatcacttgaatctgggaggcagaggttacaatgagccgagatcgtgccactgcactccagcctcagcgacaaagcgagactctgactcaaaaaaaaaaaaaaaaaaaaaaagtagtattctttctctttctccattcattctttcataaacgaacatttattgcattttgccaggcactgctttgggcacctcaaaaatgctgatgatattttttaacattttgttagtggtagttcctggttta

SEQ ID NO: 105913 - DNA, 1048 bp, Homo sapiens
gagtaaatgtgacagttcttcattggtattgtctgatcttctgcaggccatttactgctctgagtgctttgtcttcatatgtaaagaagtgattagttggtttgggccacagggtatctagacaactaactactgataagccaccacctgctgggaatgggtaatgacttgattgattgattggagatggagtcttgctctgtcacccaggctggagtgcaatggcacgatcttggctcactgcctcaacctcaacctcctcggttcaagctattctcctgcctcagcctcacaagtaactgggactataggtgcgccaccatgcctggctaatttttgtatttttagtacaaaatttctccatgttggccaggctggtcttgaacttctgacctcaagtgatctgcccatcttggcctcccaaaatgctgggattataggcatgaaccactgcgcctggcctgggaatgggtaatggatttaacactaggatattgtgaattttgctgcctggttggccttttggagacccatctgagctcagtgtcaccatatacaggaaataacgattatttgagcaaactttattcaggagttagaattcagtgactataaaattatctgtatccgttttctgctcagtctaatactgtactaattctgaagtgtctggagctgtatgttctgagttatttacctagaagttacagaattgtgccaatttatttagttaccctcctggatcttttttgttgttgttgttttgtttttgagacggagtcttgctctgtcgcccaggctggagtgcagtggtgtgatctcagctcactgcaacctctgcctcccgggttcaagtgattctcctgcctcagcctcctgagcagctgggattacaggcgcgtgccaccacgcctggctagtttttgtatttttagtagagtcagggttttaccatgttggtcagtctgatcttgaactcgtgaccttgtgatccacctgcctctgcttcccaaagtgctgggattacaggcgtgagccatgatgcctg

SEQ ID NO: 105914 - DNA, 1158 bp, Homo sapiens
aaggaaggcatgtgttttaataaagccttttcagattgtgtatattctttggtactatgccaaaactctgataagtggtagcttctttttttttatttttttttttttgagtctcgctcttcttgcccagactagagtgcaatggcctgatcttggctcaccacaacctccacctcccgggttcaagcaattatcctgcctcagcctcccaagtagctgggattccagacatgtgccaccacgcccagctaattttttttttttttttttttagtagagacgggatttctccatgttagtcaggctgatcttgaactcccgacctcaggtgatctgcccgcctcggcctcccaaagtgctgggattacaggcatgagccaccacgcccggccgacaagtggtagcttcttaaaggttaattgtaatacagagtttgaaaaagttacctcgaggaatttttttgtactttattaacataaaaatccattttttatcttgcactttgaatggctttttttttttttttaaactggggtagcctcttgagccatggtgggctcagagactccctgaatggctctttaaaccataattttgacattgtggttccattgaaagggtcttggggactcccaggggttcccagaccacactttgagaattgctgttttagaatctggaagagatcttgaagattaactcaggcccatttctcccctgggttggaataagaggagtgattgaagctgagggaggactgacttgcccaaagtcatttagctagttattcatagagctgtggctggaattaggtttcttgactgattctgtaaacatgtctttagtgctatgctaggttctgattccctgggccaggctacattgtgctatcttttggaggtagttgtctcctgtggagagagttgtcttctgtggccctggtccttcgagtcttgaatgcatttgttcaccttttgtttcttattttctcttaagtttcaaattgccaaaatcatcattatatttccaagtaaaatgttgagctgttgtgtcagtttagctctgtggctgctttgtgtgtatctaaattttctttatgtaactgatagacactcaaaaggcattgggctacatggaggtttgaagtatgcattgggt

SEQ ID NO: 105915 - DNA, 2441 bp, Homo sapiens
gaaggtggtgatttggatacggttagcttgccttgcttagagaagttccggggaattcatgttcagcatttttttctttgtttttcttttggagagagtctcacctcgtcgctcaggctggaatgcagtggcgccatcttggctcactgcaacctctgcctccccggttcaagcaattctcatgcctcagccacctgagtagctgggattacaggtgtgtgccaccatgcctgactaacttttgtatttttagtagagatgggttttcaccatgttggccaggctggtctcgaactcctgacctcaagtgatccacccaccttgacctcccaaagtgctgggattacaggcatgagccactgtgcccagctagcatttttttctttgaaagacttgtgttcctaagcaaaacccttggtgattctgatgcctttcatcctctcctagcacccctgcagtggaccatgagtcggtaatgcccactgaggacctctgggagccatgtcagacgaatctgcctcagggagcgatccagacctggacccggacgtggagctggaggatgcggaagaggaggaggaggaggaggaggtggcagtggaggagtgtgacagggatgatgaagaagacctgctggatggtaagtgggctctattgagtgacagaagttgccttatattttcctccagtggaatttttgctgggagaccttggcgtttccagttagatttcttaggccatccatagtgggaagatacagactaggaactgagatgcaatgaattcagatgctcattcctaggaaatagattattgttcctccacataagctttgttttactgctggaagaacctttagcctttagcttgtctctgacagatgtttggactcaggtccagagattcgagtgttgcatacttgcccaggtcatggaggagtcaatggcagagttcctatggtaagactttgcagtctggaggccatgggctcttcaggtagatgtgagggtaactgtgagtggtctgtaagttttctgaaattatacatacaattgtgcttgtgtgtacatgagggaattgtccaggcagagattcttagacagattcacaacttcagaaagctcactgcatctcctgcagtgctgcgctacctcttggccattccagtgactataaattgcccctactgggagggcactacatctccatagctggtagatccccttttgatgccttctatttggtttgctcagctcactccttcctttgccctcagcttcttgaaatggcattgaacttttaatgttcagtctaatgttaggttatttggccagccacaaggcttctcaattaattccagccttttatggcataggatttagttgtttgtaagcttcctactgactgaggaatagggtttttgtctgttcataacagaccccctagtgggactgaacgttgcattagatcatctaattacttgaatctgaaggaacgtaggaaaatgtactcctgccgttctccagattccaggaggatgagcactgatcctctgtctttactggtgtttactatcttcagttctcattcatcctaacagctgtcatgtggcttgggaatccgtttgccctcctttatactgtccagaagcctctctccatttctgcggggaaatgaccattcacttttatccctccagtagcatttgctgtctgttgctagcttattcagttggagtctcatttctagaaagtagaatgaatagaaataatggaagacagtaatgtttgcttggctctcattgttcctgagatgctgttagagtccctaggtgtcagcatcactttttgcttttcatcattgggttctcataattgtatttacagacacccttagaactcccatcaggtttagattggattttagatgcttctggtgagtgtaatggatatatacacactatcttccctgttggcttcttggaattctcttttcccttttccttgtaaaattgttaattattcaaaaattatatgatatgcttctgcggactttactattatttatttagaaatgacaagaatttaattgtgatttgtctcagaataatgtagctgtgcaatttggttttggtgtttttttttttttttttttttttttttttgagatggagttttgctcgttgcccaggctggagtggaatggcgccatcttggctcactgcaaccttcacctcctggttcaagcgattctcctgcctcagcctcctgagtagctgggattacatgtgcctgccaccatgcctggctaattttgtatttttagtagagacgggatttctctatgttggttaggctgttctcgaactcctaacctcaggtgatctgcccgccttggcctcccaaagtgctggggattacaggggtgagccaccatgcccg

SEQ ID NO: 105916 - DNA, 1082 bp, Homo sapiens
tatcatataatttttgaataattaacaattttacaaggaaaagggaaaagagaattccaagaagccaacagggaagatagtgtgtatatatccattacactcaccagaagcatctaaaatccaatctaaacctgatgggagttctaagggtgtctgtaaatacaattatgagaacccaatgatgaaaagcaaaaagtgatgctgacacctagggactctaacagcatctcaggaacaatgagagccaagcaaacattactgtcttccattatttctattcattctactttctagaaatgagactccaactgaataagctagcaacagacagcaaatgctactggagggataaaagtgaatggtcatttccccgcagaaatggagagaggcttctggacagtataaaggagggcaaacggattcccaagccacatgacagctgttaggatgaatgagaactgaagatagtaaacaccagtaaagacagaggatcagtgctcatcctcctggaatctggagaacggcaggagtacattttcctacgttccttcagattcaagtaattagatgatctaatgcaacgttcagtcccactagggggtctgttatgaacagacaaaaaccctattcctcagtcagtaggaagcttacaaacaactaaatcctatgccataaaaggctggaattaattgagaagccttgtggctggccaaataacctaacattagactgaacattaaaagttcaatgccatttcaagaagctgagggcaaaggaaggagtgagctgagcaaaccaaatagaaggcatcaaaaggggatctaccagctatggagatgtagtgccctcccagtaggggcaatttatagtcactggaatggccaagaggtagcgcagcactgcaggagatgcagtgagctttctgaagttgtgaatctgtctaagaatctctgcctggacaattccctcatgtacacacaagcacaattgtatgtataatttcagaaaacttacagaccactcacagttaccctcacatctacctgaagagcccatggcctccagactgcaaagtcttacca

SEQ ID NO: 105917 - DNA, 1057 bp, Homo sapiens
agcactttgggaggccgaggcaggtggatcacttgaagttgggagtttgagatcagcctggccaacaaggtgaaaccccgcctctactaaaaaatacaaagattagctgaacatggtggtaggtacctgtaatcctagctacttgggagactgaggcgggagaattgcttgaacctgggagtggaggttgcagtgagccaagattgtgctgttacactctggcttgggtgacagaaggagactctgcctcaaaataaataaataaataaataatagggaatctccaagcctactgtggcttggaaggctgcctgaaaaataaacaaatgaataaataaataatttttggggtagaggtggggtcttgctctgttgcccaggctagtcttgaactcctggccttaacttgtactcccacctcagccttccaagtgatggaattacagatgtgagccactgcacctgagggaagtaagtgggctagccaggtggttgtctagggaaaaaatattgtaggcaagtggaatagcaagagctgttggagagtttgggcagaggagtgacacaatctgacttttaaaagcttattctggctgatatggaggtaattgcctgtatgggggataagggataaagtagggaaaccagctaggaagataatgcagaaatctaagtaagaggcgatgatagcttggtggaggtggtgaaagtagttggattcaggatatgttttgaagatagagctaataggatttgttggtcaaatggatatagattgtatgagagaaattaaggatgaattccatggtatttggactgataaactggaagatgccattttctgagcttgggaagattgtgggggaggtacagatggggagcagataggagtttggttttggaatccatcgtttaggtttgtaatccatctggaattgatttttgtatgatgtgagataggggtcaaggttcatccccctctgccccagtatggttatctaatttatctaggactttgcattgcatttttattgtaccctttgttgtaaaccaaggt

SEQ ID NO: 105918 - DNA, 1046 bp, Homo sapiens
agttacattattttgcttaggttgtgaattcacttgattcagtgttcagaaggtaaaaaaaaaacaacacagtgaaaagttacattttgactgaaggaaatttaattatagaatttttgaaataacagattttttattaagaatagtttattaaaggtatagcatctattataatgttatgtaaaaaccataatcatcatgaaacagcaaaaatgaagcacttgaaagacatgtatttacatgacaatgaactttaaatattagcacatctgtaaactaaattcctttaataagctaaaagtagttgttgaacccagaagctgaggattcattcaaagaatgctgggtggtaaggaactggtttagacatgtatcatctgtataaggcatgagaattaaatatactgtgcctgatgattttaaaattgttactgcacttggccacattcagcctcatgtcagacaggagttcacagtgggccacaagccttataacttgggatgaatgtttgataataaatctgttggtgatattgaaaggtcagcaggttccattctttctcctcccgggaacagcccattccacaaggcagaagccagaacaaggaaatacagcagttggcaaaaagttcccccctgcccagcagatcaatttcaaaccctctggacttgccctctgttctctgactctgtcctatctgcctactctctaatcttgcctccaactgttcctccaagtgattgctcaataaatttgcttgtgaaatagaaacaaaacaaaaaagaccaggagagcatcagaggtcattatcagaatcaggccagaggacccagcaaaacactaagttgaagtgtgccaacccagcctcaagtgtagtcggtatgttgtaggccaagttgcagtattggtggaagtagtcatttagcagtagatatcctctcttggggagtctgctgcccagccaactgtttgggatgaggaatttgatggcctccccttttaggagggaagaattcagggctgtgaagtaggaagaagttgacag

SEQ ID NO: 105919 - DNA, 1359 bp, Homo sapiens
gagactctatctcaaaaaaataaaaataaaaataaaaataattgtggcctctcaggaatcctttaaagtcattcagcttcttgagagcacacaatcagaagaagatcatttaaaaagctaaaatgaataaaaatgtactctttaaataggttttatctagatttttcctcataactttggattttaacttaccaaaggattgggaccttttctggtggtcaggtggatagcaggaaggaaaaaccagtagagaaagggaatttggaaggagggctgaggtttttgagatgggctctgcttctcttctcagtggatactccccatgagagctataaaagaaaaggggtggtgaattgttttgggaaatatgttagagccaaatgtggtcttgacaccgttcccttccattttgcttttcctagaggaaattgctttaagggcaagtgacggtccccaactgcctcctcgggtcttggcccaggaagtcatttgtttggacagtagcagtggcagtgaggatgaaaaaagcagtcgagatggtaagatcaaaccaggtgcctccctttcttccgacctggtgttcatgctgagatcggctatactttgaaaagagtccagtccttcctccttcaatttgggatgtggctttgactaatttccctgtgtctccttggtaaatataagttttttgcttgtcttaacttgaagctgaaagagagaaatagtaaaagtcaaaattttaataagtgttgacaagttctaactttaagtttctgtagtcttctgctctgactgtgtgcagtaaattatcttcactccctggatttttggttttgcttttttttgctgtctcagaggtgattgaactgagctctggagaggaggacactctgcacattgtggacagcagtgaatctgtcagtgaagatgatgaggaagaagagaagggtggcacccatgtcaatgatgtcttaaaccagcgtgacgcccttgggcgggtccttgtcaacctaaaccaccctccagaggaggaaaatgtcttccttgccccacagttggcacgggctgtgaaacctcatcaggtacagcaaaccttgactgttttctccttttcctttttgtttccttgttgtgaacattgcctgctggtggttattagcgtcacagcctgtgaagtacttgtttggtaccaagagcagcttgttcagctgttggaaagacctgatacttccttctagcagttgatgtttcaggattcctgatgaataggaagggacagggaaagggaagagacaagcttcaggtttgccctactccgtagaaagcactggatctcttgacctaataatttgagcctct

SEQ ID NO: 105920 - DNA, 1054 bp, Homo sapiens
acccgggaggcagaggttgcagtgagttgagatagcaccactgcactccagcctgggtgacagagccagactctgtctcaaaaacaacaacaaaaacaaactactcctatggaatgggctgccttaagagggtgagctttccaatgctgagggaagccaagctgactgaaagatcctgtcaggaatttgacactaccgattcatgcattacatggggtgttacactgtactagtgaatccttttctgttttttccaagaggactgtcaccagcaaatagatcagtcaaggtacagggaatcttctatggccatccacacctgctatctattataacgccttctcacttacttaattcttactaattacaaagtgagtaaaaactggagccctcatctttgtgagcccctctgacatttgtctttgtcccttgtcagattggcgggatccggttcctttacgataacctagtggagtctctggagaggtttaagaccagcagtggctttggctgtattctggcccacagcatgggtctggggaaaactttgcaagtgatctctttcatcgacgtcctcttccgccacacgccagccaaaacagtccttgccattgtgccggtaagagtttttgggaaggcaccacttaagtcactcctgaagagctctgtgttaatgcctttactgggcaccaaaaagcttgatgagctcagctctgagtttgttccataaaactctctttttggacttggctttctaataggttaatactcttcagaattggctggcagagttcaacatgtggcttccacctcctgaagccctcccggctgacaacaagcctgaagaagtccagcctcggttctttaaagttcacatcttgaatgatgagcacaagtaggtggcctgccctttcctctctgcccctttccttttagacttctgtccgtgatctgatgttaaggcagtctctttgagtgtgtagcctgtgcatctagatttgtttttggtttcctgatgtatcactttctctgttcttgctactcatttttttct

SEQ ID NO: 105921 - DNA, 1028 bp, Homo sapiens
tctgctgacttaccttaggctagtctaaagcagacccctcatttttccttgttgagatggcatatggagcgaaagctcagagaggcagcccaaattaaagtaagaacctcaagttcccctgtctctgtcatgcagtcagacttgacctgggacaggtcactctgcctcttagtgttagttttcatccttaaggtgagtttcttcttggttgttgaaccactctgcattattgcaaggctgcagtgcatgttgagatcctcaagagggaggtgtggcaggagtgcaaaaggctctgtttttatcttgtgctgacccctcctggccacactaccttgccgtttctgttctgtttgcctccataggagaggccacactgtgctgaagattcatctccctgccaaggaagaaaatgtgatccttgtgcggctctccaagatccagcgagatttgtatacacagttcatggatcgcttccgggactgtggtagcagcggttggctggggctgaacccccttaaggcattctgtgtgtgttgcaaggtgcattggggcctcagggaagattgagatggggactaaggatacacatggtcccaagggagttactcctactgagagtcttcaataaagggagaataaagtgagagggggccacctcagttcactgcactggaggtttgggggctccaaggagagaggtgatggttttgtaccacataactcctgggggtgccattcacacagtgtaatataactgatgccccctgcagtgtgcaactcagctgcacaacttgttattccaaggggattaatggaaaaatactgtggggcagcgtttttgactgctagcataatcagaattcaagagatatatagcttagacaagttattaggggtaccttccattggattccatacttaatcagattgagacctctctcattcttttcttgagggacctgtttcattgacttcatacctctacccctggctactcttcagcagacctgttaggtattattcttaat

SEQ ID NO: 105922 - DNA, 1009 bp, Homo sapiens
ctgactttaatttttggtgtgacagtgtttattgtgggacgtgtgtgtttgagcaagtatgtgtttccagactccctgggacacccttggaatgttttttgtcctgtgtctcctctccctttccttgaacctcagatctggaatcaccctgatgtgctgtatgaagcccttcagaaggagagcttggccaatgagcaggacctagacgtggaagaacttggctctgcagggaccagtgcccgctgtccaccacagggaacaaaaggcaagggagaggatagcaccttggcttcctcgatgggagaggcaaccaatagcaagttcctacagggcgttggcttcaaccctttccaggagcgaggcaacaacattgtcacatatgaatgggtgagtcaagcagatccttcaggaaccataaactattgctgagaagggatggtgcaagccctgcctggggaaggggtagggatgcatggctagggtctctgtatggaattataaaggtggccagtgagctgctgccttggaaggaaataattttatttctagtgatctggccttggacctgctctaagctgccttgtttctctcttgcaggccaaggaccttctgactaattaccagactggagtcctagaaaactctcccaagatggtactgcttttccacctgattgaggaaagtgtgaagcttggggacaagatccttgtgtttaggtaggatgagaaacttccatttgaggctgtgtgtctatggtaaagaatgacaaaaccaccacagagcaagaccaagaccacccccgcctcccccaagtgctattgtgaggaccttcttgcatgttgtctgtctcttggagtttctttcattgcccaatttgatttctccacagagaacaatttagaaccctaggttagcactggagtctaatctttcaaattctggcctgtttttgtttactttgagagctaaggatagtttttacatttttaaaaggttataaaaaacatac

SEQ ID NO: 105923 - DNA, 1022 bp, Homo sapiens
gttaaaaatgcagattcctggtggaggaacatcatccatatcaaaacccttagtcctgcactcaccaggactcacaaggctgaggcagagaggtcaccttgagccagtattttccaaattccctaggtgattactatacattccgaagtctaggattcttggctttagaattgacctaagatagtaaaggggagaaatgtagtttataatccatggtgcatgtgagaatcacctgggggtattttcaaattatagatgcctgggccttacttactgtagacccatgatacgtccaaggggtgagatctgagcactgttgtatttctatttgttttgctctttaaaacatatttgcccagtgattttgctgtatatccttgctctaatatatccactgcttatggttttccttccttcctagggctagatggtagcacccctgcctttgagagggagcggcttattaatcagttcaatgatcccagcaacctcaccacctggctgttccttctctctacaaggtgagtggatcccaagaggggaggtcaaaggaatctgttcaggcagttggccacctgggctggtaccccaaaactccaagttccctcagaagagatcagctcaggtttgtaacttgtttctggggtcagagagggaacttcaaaaggaaattaggttagcagggcagtcatgatagtatcataaaattttttgagaccttcattaacaatggttgtggctcatgcctgtaaccccagcactttgggaggccaaggtgggaggattgcttgaacccaggggttcaagatactgagaccttgtctgtacaaaaaatcaaacaattagctgagtgtggtggcatgcacctgtggtcccagctacttgggaggcagaggcgggaggatggcttgagtctgagaggtcgaagctgcagtgagctgtgattgagccactgcaatccagcctaagcgacagagtgagaccctgtctcatttaaaaacaaacaaacaaatgaacaacaa

SEQ ID NO: 105924 - DNA, 1017 bp, Homo sapiens
tgaggcttagatgatgtgatgaatatgaaagtgctttaaaaagtagaaagtgcaaggtgactgtaaaaggctgatggtattgtctcatgccaagcagcttgaaggctgtgctgccttctgccatcgtaatgcccttggcaggatgtaagccagtcattcccctaagctgttagactaaaaatagtggaaacatctgtgtgcagaagtttcccctcaccaaggaacatccctccaaggccaggatgcgggggccttacttgttacagaggagagtgagttttgtttctgagctggtagacactttcatgttggatttcagggcacaattttcagtgcttgaggaatgtactgtttatcagcaggacagcaaaatccttgagtatgttgtacttagggcttaggacagagtaatattggggtagaagtcacagagggcaaaactgatttgaaaaccttttttaagactaaaggctctgtgattgttggcttgtcttttaaagggccggatgcttgggtgtgaatctgattggtgccaaccgagtggtggtgtttgatgcttcctggaacccttgccatgatgcccaggcagtatgtcgggtataccgttatggccagaaaaagccctgttacatctatcgccttgtggctgattacactctagaaaagaagatctatgaccgtcagatttccaagcagggcatgtcaggtgggccatcttccagacttcggagaggcacatctatacaggctaccatccttttagtatcaagggtgggagaggagcaggatatgggaacacaggcaggcttcgagaaagccagcatttcctcctatctcattctgattcaaattgcttaaaaggtaattgacctcaacttgttgaaggtgagtttaatgataacagccaagctcgttatacaagttttccccttatatgatgtttccagtgtcaccagcacctcagacctagtctttgactttcagatatgggatgacttttcattattagtgaccttt

SEQ ID NO: 105925 - DNA, 1077 bp, Homo sapiens
aaaaactatgaatttctaattaaataaagggaaattgattgcaacgatgaccagctcagatttctgacaaagttcctgttttcatagtattctttgtttagataattgtgaaagatcctgcttgcttcaccttccttggttctggacctctgccccactgagaggctgtagggaaaccaatgaagaactggggtagatgtgggactttgcaattttcccccctccttcagtcaggccccgtgcaatctaaatttaagatctgtgtttttcctagatattgttattcctggactcaacagctccacagatgtacaggcaagaattaatgctggtgagagcatccacatcatccgtgggacaaaaggtaagagcctgaccaaggacctgttccctgcctttggttgagagtgctgggctgggaagaagaataaatacatatgacttgagctagacgggtcataggaatcatcccattaggatgtcacattccggaactgaatgagaaaatagcatttgtaggagcttaggggagttgggttgagcccatagggtattagtcagtggtttaaaagaaggaaattagggtccctacatttctctatcttgctgtctttttttttttttttttttttttttttgagatggagtcttgctctgtcgccaggctggagtgcagttgcgtgatctcggctcactgcaacctccacctcccaggttcaagcaattcttcagcctcagcctcccaagtagctgggactacaggcatgcgccaccacgcacagctgatttttgtactttttttttttttagtagagatggggtttcattatgttggccaggatggtctcgatttcttgacctcatgatccgcccacctgggcctcccaacgtgccgggattacaggcgtgagccaccgtacccggcccttactgtcatttttatgagaatcttgggatgggacaagtagacacaaggagaccaaaattggagggaaagagcggtggaatgggttataagcctacatacatttacccacttgcttggagcagggtgggggtcccctgataggatatgta

SEQ ID NO: 105926 - DNA, 1023 bp, Homo sapiens
ctttcagcttggtgggcaacctgctgggggccccaagtgaggtggggaggggctccctagctatttcccagtgacctctatcacatcatcgtctttatcctcatcatcattggagctgaacccaacctcggcaacctcatgagagtcaaatggaggcacctgggaccgtaggaggccaccagctgggtagcctgcatgtggggacatgtagcctggatagatagacatgccccgcgaaaggttgctgggcaagacaggggaaggaaaaggcgcaaacatcctcggctcggacaggagtggctgtgagaatgggagtgaatagctgggtagtatccctggcacagaagggttgagcatgaaggaggggttgctggcagtgactgaggtagccgtggaagaggaactgacggggcctgctggcaccagagggtcagtagtcactggaaacaccaggcgggcatctgccagcaaattggacagctggtagtaggagggggtactgcccataaacagggagttctccccagcctgggaggtgaagggggtggtgaggttatggtttaaggagacgggtggcatggcaaacccgccagagactggatacccgtgttcatacggctgcacgggggctggcagatgacccttcctggaccgccggcgggatgactcctgggcagcaggtggtgtggccaactttcgcttgtggccccttaagtccagcactgggtgcctgtcaccacagggctggccagtcaccaagagggaactattgaggcaatgaccccctagtcgaggctcagttccgagagctgtcccgggaacagcactgctgtccataagttgggccggggggccaggcagggcggcattggtgcttggggagctctgacgggattcccgggcagcagccacatctgcatactgctgaagctcactgatgatctctgggctgtcaggagagacgggcctggccagcccctcagggtcgggggctttgggtgatgaggcactgtgtctgccgtt

SEQ ID NO: 105927 - DNA, 2438 bp, Homo sapiens
aggcggttgctgggttgagggactgttgatttcatgttcgaaaatatcttcaggtggtccatgtaggcctggtgtctgctgcctccatctttgaaggaacatggaggagccctttctctgtaggagccctaagtctgggttttatcttaaaagaacacaccagtcattctgggtctccccttattgccattgccaggggagggtcgtctagtccttaagcataaacactggctgtcttcctactggtgtccccgccccctctgtatcccccaccccaacactttgccagacagttctttatgatgaacaaactttggctttagagctttaccacttacccatggctccctccttactgggcaggtggtgtacctgcctcttcccagcccagaaggcagcttagtcaggtcatcccagtagtagctcctacagctcttctgaccagcccatttccatctttggagggccttagcagactctggggtattgtcctcagagaagagacaaggagatgatggatggggtgcatgtgtatatgtgtgtttgtctgctgtccaataacaccaaaagtggaacttaagaagctttgtgttttcataagcaccctgccagacacttaactcttctactcatggaagccttagatctacaatttagctatgcaaattattttaataatttaaaaatagcagttccaaccagtgctttctctttcagatgcatcccaagaatggatggtgaagggactcagttggagtgagctctcaggttgaggctggtgcagtaggagtgagctagactgaatctccaatttatgggacacactcagaacctgggttacactgatgcctctcaggccctggagcactgggatcccagagatgcatgtgtgcatgtgtatgtctgtgtgtgtgtgttgtcgggagaagggggtagtatttctgtgttcacttctaggaaatcactgtactagcctccaagaatccggaaaccttcccagccgggaactgaaaccattccctggagggatgggcttggcttttgaagttgacagaaagtaaatgggtattctgagaggcagcacatgcctactgtctatccagtgttccagggactgggtcttgcttctactcagcagaggccatcattctgggaggctgacctgactagagaaggctttcttttatatgtgcagtttctattgtgtagaggggttgggggtgggatcatgggaaattggagtgctaccaggtccatggtttttgctttttttttttttttttttttttttttttttttttaaagaaaataacctgaaaacacttctgacttttccactgtctctttatatgtgctgataggcaaatgtgcatgcacaccaaacataagcatgtttgtgagggaagcaggaagtatctcagagcctaagaaccatgttttatagtttctttgatcataaacacttggtggtgtcttccacccattatccaggcctgaggggggcagggtggctggtgataagagggagggcagaaaatcaggcctaggcgttttcccttaccattgtcttccatggaatgttttcaagggcctctcaagccccattcatctggtttagccaagttctcagcctggggaacacagtactacttaatgattgaggtttaccatttatagtgatgcttgatttccttttcttaatatatttgtagataaaaattgaacagggacaaagtagctatttaagaaaggaagtgaaccatgttgggtcatatcattttctttagattggatatctatgaagtccacacccctttgagttatgctttttaggcatctatctcatcatctcctgatttaaggataattctgtctggtccttggagctctcttccctaggaattagtgtgtggagtctctatatgcttgtgatccttggagctctcttccctaggaattagtgtgtggagtctctatatgcttgtgattcacaactaaatatgaaatttctcaattcaggagcaggaagcaaagtgctggggtacagttttgcagattggttgaaacacttagccaaacttaagtggcctgggtaggaccatcactcccaaagttgtcagcagagaagggccctctgtgtgagtctattcaaacctggcattgctctgaaattgagtcctcatcccatggggaaggtcttctgggggctttacattccttgttactagtgttctggatattaccttctgcttcccacttccttttttttttttttgagacagagtcttgctctgtcacccaggcttgagtgcaatggtgtgatcttggctccgtgcaacctccactcccggtttcaagcgatcctcctgcctcagcctcccaagtagctgggattacaggtgcacaccaccatgcccagctaatttgtatatttttta

SEQ ID NO: 105928 - DNA, 1110 bp, Homo sapiens
cttccttttgatttctcagatcagtctttcccttctgagccatggccttctgtgcacccagctcagtggctcttcacccctaaaactaagtgaagtcatccttccccaaaaggacccctgggagatgttctggccctctgctgactactcccaggaatcagcacctcaaggactatttgagaatgttgtgctctctattggtcaccttgagactccgttcccctgctgccaactcttctcttctgccctgtgtattctgctgtgatccccttaacggcttttctgtgctactagcttagccctaggccttttatgaatacctgagtcttataacaatgaacttcttgagcaggcagtgtccaacttctttgctcttcagggacctgagtgtgcacctttcccttttgcaggtctatttgacatagtaatctagtgtgttggggaggggtagccaagcaggctgcagtgtctgcaatgcagagggcttggggaggtttgggtactctctgctgccactactgggatgatattcagaagagagaggacctcatactgtgactggacccaggaccctccctggaagagagctcagcccagctgtgtgtgtgtgtgtgtgtgagtgtgtgtgtgtgtgtttgtgtgctgtgctcatgtgcacctgggtgtaaaatgactgttatctggttgtgttactcagggtgggctggggactcaccagaagaatcccccccagcctgcccaagacaggtttttcccttgtaccatcttcagagaggtcaggggaagagggtccaggtgggttaaggggggtcgctatggataaccactaagaccagactgctgccaggaggagtgggggataatgaggtggccccagggtcctggcacctggctttggttttccgtcttctttcctcaggacgcccctgaggcctgggacctgtgcctggcttcgaggagcatctgtggctgggtgatccagctgctggtgtgatcatgggcttccctcctctcagcagggcaggcgctcctgccccagagactgggcaactggctgtttctatgacgtatttatttttacttgtgtttcatgtcacttttttaaaaaaa

SEQ ID NO: 105929 - DNA, 3520 bp, Homo sapiens
cctcaggactctccgtgtcccctccgtgacccccgcggcccgggccgctctttgcatcttgtcttgcccacagctggcctcggccaggtccgagggcctggatgcgaccttggggcagcccctactcttccgggcagcccacttccgcggccaccggtgcagggcatgccccggggccgtggaggtgagggaaagaggcgcgagtcgcgttttaactccgcccccgtcccccaaggccgcgcctcgcagcctgggctgcaaactttagcgtcctttaagttacagacgtgcgtggggctccgtgaggaggtgggcgaagagaaaggctctgagtaaataggcaaggcccggggtgagcaggggctggaatccgaaagtgggaggcggcggccccccaccctccatagtccttccgccctctgctagcaccgaagtttagcccaggacgggggccgtttaagggcccggccctccgccgccgcgcacgtgagcggcaccaggaagctggctgggcgcagccttccctgaggctcgctggcaccggccgcacgcgtccatcccgggcctctgagcggagggggagccgaggctagagggagggcgcagtctgcccaaggtcagcggcagcggcagtttctgggcgccaagtgtgattggagtactccaggaagaggggcgtgaccagagctctagcgaagagacctgacattgtaaagctaggtttggcttctgatttccacagggggtttgagaatgggacgagggtgctttagagggaccggtaggctttccctgaggacggtaatcagggcatgatggttggctcagtggttatttcctgggcaggggtgactgttctttcagctcccagcactggagcgctcggcccctgccgcactggatgccagcagttactaaaagtgagcctggcatttcaggtgagctcccagaccttcttccttttctcttgaatataggggaaattcacgttacctctccacgtgccgaccaaggctctgagacccccaggtgggttttcttcccccccgccgttttctgagcagtttgggaagtgagaggaagagaaaggtagatactaagtttccttgaggagacaggaagtgttcagctgagatggcagatcagggtgagggcttgtcattcccaaggcaagtgggggcctagatgctgagagttttccagctttgggctcagagatgtccaacaaggatttaatgcttcaggcgttttggaagccagtcaccagagaggagagagaaagtggaaatgaggggctggaatcagactgtctgggcttgtgttgcctgcattttggtccacgtggctctgtttaatacctgtgttaccttgggcaagtctcttaacctctaactacttgaacctttagccttacctacctctttggattgctttgagggtgaatgaagtagctgtgtttcaacatttagacagtgcctggcgtatagtaagcattcagtggaagatttctcatcattatcaaagaaaattggaatgaaagttactggagacaagatgagtaggacaggcagaaaagagagagatactgatgggtagaagcacagatgggtgagactagtgggcaacacctcaatttcttgacaccgaaagtttagaaatttactttgcctctttgtgagcaaatactgtgtgctcattgactccaaagacaatttttttttagcgtaaaatcaacacccagcacccacagggaagaaataattccacagagctaagtattccacaaagttgcagcgtggcctttttagcttcaaaaccttttaaatgttaaatattacttttaaataattggggtgggaatgtccccccagtgggtcacatggctcccttcctctttaaacagtcttctctgggctgtgatttttcccccccgccaggcaactcaggtcaagccctctgtgtaagagggttaggcctctggccccaagctgcctggagaactaggcagcctgccttgaatagctcacagactggcctctgtgttatgttcctgggactgctcttgaacagcttcttttcctcttagggataattgttacttcctcctgctgtgcgactccccttttagcagccttttcctcttactactcactgtttcttctgtgggctggaaaattgggatgaagcttgttaacattggtggttcaagtctgggaagcttagtgttggactttgttctgcctgctcaggccgctttgctctggtctttcctctggttctggatgggtaagcttgctggatagcaaggtccctgcaggccagatgtacttagaaaaggagagtttcttatgaaattctcttcctgaggcacatttttcctcacaagtttttgttccttatggtttccctgtcgttagtaagtgtttggaccctagcatttgccagtcctccctctggcagtcgtccctgaggcttggggaggctgggctggtggcgtggctcagctgtggggaggaagaggtaatgtggaggaaaggcaggctggctggtatctggtacatcttcggggagacttgtcagggcccggagtatgtctctggctgaatcactcctgtgcccctctgtgactcagtttccccaggtgtgaccagggctgccagctgacagtttgagctgctctgagatcctcaccaactgcgattaagaaataaagaggcttgtggcttcagtcatccttgtagctcccttccaggtcactctgtgtgtaaacacctctggcccctcccctttctgggtcagagcacccaaggcaggtctgaggaggttgggccagaactggttggcgggcaagtgggcacattgtcagagtaggctaccagcctcctctcccttctttctcctttgcagctgccttgaggtgcagtgttggggatccagagccatgtcggacctgctactactgggcctgattgggggcctgactctcttactgctgctgacgctgctggcctttgccgggtactcagggctactggctggggtggaagtgagtgctgggtcaccccccatccgcaacgtcactgtggcctacaagttccacatggggctctatggtgagactgggcggcttttcactgagagctgcagcatctctcccaagctccgctccatcgctgtctactatgacaacccccacatggtaaggagtctccatggggttctgccccatggatgggcctggtgggccagggcttctttggggagggtagttttggttgctgaggaaagggtgggagaatcttcaagctggccctgcagacccctcctctatgagcttgaagcaccttccagatttagcctggacttctgctcccggcatccatttgtgggctttctatttgcccaggtctggttccccttgcccatggctacttgtggatttccaaatgcagtggactataccaccatgaatccctggcttctgccaggactttggtcccctgcctcctcttcttgtcat

SEQ ID NO: 105930 - DNA, 1079 bp, Homo sapiens
agggctgagagggcagtccctggggatggggcttggaatcttacctcttcagccattctgatgcccctcaacctggtgatatggcatttccttagacctcaagctggtgctgggagatggccaagggggctagtggagccagatgagttacttagaatgttcagaatgctgaagtcaaaaactaatccagcatcactagcaccctgtgagcgtctggctgttcttacaacctatggtgagtcagagcttgctaatgtaacctactgctatgctatggggtggtgctgcccacagctggatgggctggcagctctgtcaagggttcttcagcctctactactaagccatgccaaaccaagcatttggaatccccagctctgatttccttgcctggagagctcaagtgcacaagtcctgcagtctacccaatgtgtgctgaccggcttactggggcactagttgaaacaggatgtactggttccctctctgtgccaggttctactctacacctacactctggagatgaatcagacctggctctgccctcaggaagctctgtgtggctgacatgtcagccccacataagtgattctccaacaagacactgtgcttgatgtccacagaactttgagctgtaggttcagggaggctgccatgagtctgctggggaggctcagagaaggggtagatttcagctgggccttctcatgtaagtagaattttgctttgttgggaaggggtacttggctaagaaaactgtgacagcaagagcctgaagacatgggatgaccagagaattgtggttagtagacatgtcttgggtggagaaaggtggaagggtttgcccagccaggtggtggggaagtacagcaggttgagaagaaggatgtggcacaatttgccacctttgttttaggaagttagctgaagggcaggtggaggagggaaggagatgaggcaggaggccgtagaagagattgggctgggtccaggtgagaggcgacatgggttggttgaggttttgcagtcacatggccaggagatggcactaactgaagttgggagcactggagcctgag

SEQ ID NO: 105931 - DNA, 1141 bp, Homo sapiens
accctgcccatcccagtcctgggtcagtccagaagacacctgtgtccccatttagagctaggtcacacttggcacctgggatggctcagggacacttgggtccccatttactcttggagctggtcagtgcattctctgcctgacagagattgtaacaggttcagggaaccatggacccccaggcttcaggtgctcgtggctatcacagactggtccggaaggacctgaggcctcctggtccacactccatattatggagggagaaacagattcagatagtaggagaaaggcactgatctcatatgtttttgttttcatttaacaaatatctgagcacctgctctgtaccaggctctgtgttgggcactagggtaccatggggaccaggacctgccagtgtgtgggtgttaggagcctagaggaaaggccccatcctggtcctggagtgggctgagaaccaaaggtttttgtcccctaggctgcctccaccagcagtgtgcagcgtggcatgctctggttctcagagaaagagaatagaggctgacctgttcagtgtcccacccccactgtgtccttccctagcccagagtgacaggagccagaacctgcttctctgtgagtgtggggaggcagtgaggctgtgtcaggctctgtgagtggggtggtgagtaaccaggtgagaggtgccacctggctttagatgctgcccaccccatgaggtgtgacggacagctccctagccatgcctcgtcctgtcctcagctgggcagggagtaggctggtcccacctaggctgggtgtggacccaggaagtagcacaagaaagggtaccactaagattggacagtggcagttggtgtggacctgttcatagtagctgctgctggagctgttagccttgtgccctggagtcctgtatgggaagaggctgcaggtctgggtgagtggttcttgtgaggcaggaggaaggattccattctccatccctgaaacccttggcatggttgggaatgggaaggtggggaagaagtcttttgggaagtggacagaccctggcaggggctcatgggtgtactcacccacctcagagcccagcattcatggagtgtgggccattcctcttcaaggtatgcaagggatg

SEQ ID NO: 105932 - DNA, 2409 bp, Homo sapiens
cctaggaggtggtgtttgctccaggcatggagtgggttggggaactggtggtacttgcttctgcctttagtaaacaagactgccattgaagccccctttcccttagtccaatgagaaccaaggcccagggccactaggtctgcaggggcctgtggtcatttggctggcatgaccacagcctcacagaggctggtgagagttctgatgtaggcctgtgtcacactccctcctccctcagtgtgtgtggagagaaggctccctgccctccctggaggcacttagtttgggtggagcctgggaaggggtgagggagtaggatttcccaggactgacctcctcaacaaaggcaatgggaatgtgggctgggatgtttcctgagggctcaggccgccccctatcctggttactccatggttattttctgccaggtggagtccaggcatttgctgtgcagcaggttaactatgtgggacaggtctggaagcacgagctcctctctgcccactagaactgtccttgaggtgaggtgagacgaggtgtgagaggaaggggcttcggatttgcccttctgggtttgaatcaaggctccactgctaaccaatgtgtgactttaggtgagtcacttggcctgtctgagtatgtctcctcatctgtcacatgaggataaaagaatccctacctcagggtttttgttttgtgggggctaattgataatgatatggcccaatacccagttctttaaataggtgggtgtcacacttgacatccagtcctgcctgaggacctcatgccactgggactttgtacttttagggaccctgcctgcctctctggtttagtcccagcctcctgcaggttgtctgggccatgtgaggcggcacagtgcagggaaaagccattgtgcagcccgctttcactagggccaatttccgggactcctggatgcccctgggttgtgtggcgcagctctgaagctggtctgcttgagtttgaatcctgacttcagcactcccttgctgtgtgaccttggctgaatggcttggttgtctgggccttgggaacagggttgaaaacagtaccaaccacagaaggctgtttggatttaatgagcttatgcttggaaggcagagtctggggaaagtggtgagtgcctggtcagatatcagctgtttttaggattctgtttgaaggtgtagggttatagaggaaggttcctgaaaggtttctaagtaaactcacctttgagggctggtatcttgttgactcctttctttcctcccgagcctgaagaatgaggcttgtcctctggcctagctgtctgcatcatctcgtgtcctgactggtgcctgtctccgtgtgcctttgggcataagcttcccagggaagttgggggttggcgtgttgacctgtagcacctaggagggcaaacgaggtcccgtatcaaccacctagtcatgggccagtgcagctcgtctattcccttgggagtacaagtgcaaatgaagggccctgcctctactttcccccttaacttgggtagctctgggtcagtgggctggcatgggaagagtaagggcagccctctgtgcctgggtttgagagatggtgctgctgtccctgtcaggttgtgtaggttgtgggcctggggttggcagtttgtattaaccctgaacccaatgactacatttggtctgggccgctgacaccatttctcattcctgcatcctggaagattatcagtcttgtccagttcccagactcagcgaggtcttggcttggcaggggccccgagatggctgtcttcgctatagcctcacacaatagggtcggcagggcactgtgacaccactcaggaaggggcagtggggccagccttgggactagctcgtacctggaagcctcaggttctaagcagactgccctctcctcccagtaatgggactcaggaggcttttcagcccaaaggagatgctctggggcctggcatgcctctgttgttttcctggtactcttgctttgaggacacatcctggatgggcttgtctttaccccgagtggtggtgggtctggccactgccctgtttcccagatgtggttccttgtaggtactagttctggtccaattcttgttctgggcagaggtacccagagaaatagctgatctggggaggaagaggagcaggcaggtagggctgggaggcccaggcctatgtcctagggttcggcccaaatacagatactcattgagccaaggtggatggggtctcttgcccatcaggacatcccaaccttctgggcacttgacagccttagtaggccttttccctggaggcgggtctgggctttactgggaggccaggaaagctttcctctgccactggatcagccttgccactccctaggttattt

SEQ ID NO: 105933 - DNA, 1051 bp, Homo sapiens
gcttcccagcttcaactttgcatggggccacttagtgggtggtaggcttgctgagagaccttctaggctcctccttaggccagggcaggggaggaggtaggaagtgttcttacttgtggaattagggagttgcttagccaggaaaggagctgctgtgccccacacacctcctggatcctgggagccctgtcttcttagctcccttcttccactttgacaggagctctgccttttctccaggtggagggagaggaagtttgttatggtgcagggcttgcttgtgtgtgcatgcatgtactgtcactgagcatgcctcaagaactttctgtgtgcgcaggatcctggacctttttgcctagaggcctggagtgatggagagagatggggaggccatcagttacagtgcagcacaacacctgctccctggtgggtacttgggatcagagaggaggggctgcttggtggagagcaacagaaggctttgaaggggaaagttgagctgagtcttgcaggatgggcaggagtttcccagtcagaagggactctggaatagggtgaagaaggacatttcaggcagaggaagtagcttacgcaaaggcaggaagcatgggaggatgtggcatgtttggggagctgcaaatagtttcatgtgggtgtgtgtgggggtgtggcgggtgaggaggctggcaaggcgggctgggccagagcctggatctgtccctccctctgccatgcagacactcagttggtgcctgcccacctgggctctggcccctgctggggcctgaggctgcagaaagggagtgcaaggtgagtgtgtgggcaaattcatgcagtattatgtgggccactccaaaagagccttgcctattggcttgtgaatttagtttcatcctagaggtaaattgggagccattgagaggttctgagcaagatgaccacatgtgttctggtgtcttttggctactgaagaggatgttgagctgggagtcccataaggcctgctgaagcgttcccaggaaagaccctggaactcaaacccaggcaagcc

SEQ ID NO: 105934 - DNA, 1049 bp, Homo sapiens
agggctgagaaacccccaggggatttcagagagggcttggaaagggctgtaatgggagggagaggtgagaacaggtaataatgacttcacagtgctgggaaggagggctggggagaggagtaagtggaggtagagggagaagcctgtttaaacttaggggtcatccctgtgaaggtgaactgctggcaaaaaaaatttttttgcggtgggtagggagaaaggagcctttagagttgagcaaaacccaggattgagggtacaaggtctgtgctgaatctcttggattcaagatcatatgtctctgagggcccagtctgaaggctggtacagacttaggcacctggaaagctgacgtgggaaacaggtagcagtaggtgagacaaagtgaggcctcttgatgccaggaggagaaatgagtactgggccttgcagcattcattcagtcctaggaagtgttggaggctcacataggagccttacatggctgaggtttctgggagccagaggagggaaattaggtagggaggcaagcagagtgggaagtgcaggcactagcaacctacagagatttggaggggaaccagtggtcttggcttttagccaggaagggacttaggaagtgggataggtccctggatgggccatgggttgcagaagaagtctagaggctctggtgatggtagctggccctgccagaggggtggggaggatgatctcttcacagaatttcaccagcaacccagatgtcagtgatcccaatcctatgtcctgacaggtgcttcctgcagcccctcctcagccacttgccaggtcctgaccctgcaagcatgtgtgtaaacacacacacacgtgttcttgctttcctagggcatgaccgtggagggctctgagctctttattaccactcctcagttttgctcccttgcctgccataatttctctgcctgtaaagcctgctcttctccaggagataggagggaaattagctaataggattttgctggacccaggctgcaggatcagccactgtacagttctgctggtggccc

SEQ ID NO: 105935 - DNA, 1017 bp, Homo sapiens
ctaagttggggggtgtggagtcagcaatggtatgtgtggcctggagttgaggaaaggctgggctggtggatatatttggggacatcagcctgttggcagtatttgacctgggaggctgccctgtgcctccctgcctctgtgggaccaggtaggcagtggacagcctgtggcagcaaaggctgcgcagagggcgtggccagtgtggcaggggtcagggaacaggacgagagtcagtgggagtgagagcctggtacacttggaggatccttgcaactttgttcaccaaagcagcttggggaaagggacacagcgttgatgatggaaatgggagttcagatgtccctggagtctggtgttggggctgaggaatgaataaatgaggccctgggtcaccagctgtgtccttggcggtcaaagacaggtttgaagaatcaggagtgagaagacctggaaaggggagggctgtcacggtgataaggcaagggcacagggagaatagaggggagtttcctttgtgagctggagggtggtggccaaaaggggtgtggggcaggatgtgcttgcctggctgcggttggactggaggtgggggcgggctggctggtggtgtgggcaggaaggaagataccagtgccctaggcctgcttagtgtgctgcctctggggagtcccgccccatttcattcaaggaaggcctctccagtcctgtcggtgccatcctcaacctcatgggcccatctggaggggcacccctgggaaagagacttcttgggttccagacctcagaacaggacatgtggcatgtggtgtggtggtgagcaactcagccaccaaagccttttcctggcttcaggggtttatttttagacacctttgtccaaatttcccggcccctgacagcttcacaagttgcctggttttgacgtcacctctttgatgaaagcccttcctccttcctccccgctcccatgggagcctgtcagctgtgctcctggagtgggggttgagacaaggaagc

SEQ ID NO: 105936 - DNA, 1279 bp, Homo sapiens
agatagaggccggctgcccacagaagaggcatggccgaaggtcctgggcttgttttggcagcagggtgtgggggttgcctctgcccctgtgtttagcctgaccttgcgtcttggggaacaaagccaggggagagatgaggaaggggctagctctgtttgctggtcacagcctgcagtggacaggggtggccctgtgcctctctcagcccaggagacagcaaggagagagtataaggctcccttccatccctgccttcatctcccctgccctgaggtcagagaaaggagattactaatgagactagttgcgtctcactcttctagcaccgacagcttttaactgtgtgtgcgtgcgcgtgtgtacacccttctttttctctctggatctgggactgctgtgaaggctcttcaaatggaatgacagcagccgtcagctttctgctttggcaggggtgagagaggccaggagccctgctgccaggagttgcggggggaggacttggcaggctcaccagcctctccagaggctaggtgaggggcaggggtgaatggatcttagcttcgggtttgggaggtggagagcagctgctgtcccgggagttgcagatgtgcctgagcctggaacaggattggtctcatgggacagagggacctgaagttcacggcgagaggcccaaggagaagcacttgtcaggactctcgggattctggaagggatggctgatctcagctttcctggtttgcatggcagcctctggctctctggctagccttccccagcttggcagcctggcaaactgctatagatgctggaactctgcctttctccatataaactgctaagggcccccaggctgaacactcattcccctggaatccatgcgtactgtgtgaccatcactccatatggaagatgcctcagctttgtcaggctgctccgctggagtccaaggaggtggcctctagtacaggaggagaccactccccaagtcccaggaaaggggtatcttctggaagctgcaggatggaacagagcttgcttgaaattgcaaacctgcagaggggagatggggcccagatgtgagcccagagcaatgggcagaggcccccaaattcaccagtcttaatgagtgtccagggaaggcttcggacacatggaacagaccaggactgagggatgggcctgggaattcgatgtgtgggattgtgtgtgtaaggtctctagtgcagtttgctcatatctgtctgtagcacttggtgaggaaggccattgagagtg

SEQ ID NO: 105937 - DNA, 1914 bp, Homo sapiens
gtagattactccagctcaggagtttgagaccagcctggacaacatggtgaaacctcgtctctacagaaaaaaaatacaaaaaaattagctgggcgtggtggcgtgcacctgtggtctcagctactcgggaggctgagacaggagaattgcttgagctcaggagacagaggttgcagtgagccaagatcacgccattgcacattagcttgggtaacaggagtgaaacccatctcaaaaaaataaaagtaaaaacattaaaaaaaaaaaaaaagggaaggaaggaagtaaagtaagaaagtaaggcaaggaccccagaccatagttctcagactgccctggctgtgctgaggtgccctgtggctatcagcctgtggtgggagctgtactcagaccctttcctgcttcacctggagtagttctgcctgtgagttttacaacccaggtgtcttgagcttttgtttggaagggagcttctaaggctcagctggtttgaaaacctctgtcctaagagaggggcaaaactgggcagatgccacctccagtcccgcccactacatgtctgttctcgatcctgaggatgctgtaactgcagtatgagtggagctgggaggcaccagggcccagcccttgtgcaggtagggcaggagctccaaagagaggcacttgtcttgaggggagtgtgactgattggaagctggacctggagggaccctggggagctgcaggttggagttctcctggggtggtggtgactgaactcctgagtggtgggtgatagcattatggggcagccagcttggaactaaggcctgtgggccccagcagattgcctgtggaaatgggtcagcctgttgagcagtggctgtgaggaagctcgaaacagcctggccacagcctgtgttctgtccagtgggcacagaaccgcttgtgtttgcttccctttagtctgcctcagtgaccctgagggagtcagtcggtgggtctgagtccacactggggccaaaacaccagtgcagagcaacaaggcctcggccggggaaatacaggtgaggacgccacgtgtggtggctcacgcctgtaatccccacactttaggaggctgaggtgggtggatcacctaaagtcaggagtttgagaccagcctggccaacacagtgaaaccccatctttactaaaagtacaaaaatcagctgggcttggtggcacacacctctaatctcagctactcaggaggctgaggcacgagaattgcttgaactcgggaggcagaggttgcagtgagctgagatcacgacactgcccagtgagctgagatcacgacactgatctccagcctgggtgacagagcaagactccgtctcaaaaaaaaaaaaaaaaaaagcaggtgagggagccccagcaggaatgtgaaatctgtggtcatttccctcttcctgcctgtcacctttgccaagctaacatgggaagcttccaaactttatttttaacaagggaggccctcttggcatctcagctcagtcacttattcagcagttatttactgaggtctcttgtgtgtgtcattgttctgcgcatggaggaaccagctaggaggcgtcatagagtcctaatcaaagccagcatccccattgttttacagatggggaggctgaggcctagggaaggaaggtgccccaaggtcaagggatggagcggtagctgagtccagactgggtcccttaggccgaggatcgttccgatggctatatgccttttgccactccatcctgtacataagtggggctggaaccaagaggctgagaacttgtcatcaatttgggatatgctcgggatggtgccccagggtgggctttctttccttctttctccaaccctggtagtcacagttggaggctgaggcttcaggtctaggag

SEQ ID NO: 105938 - DNA, 1551 bp, Homo sapiens
gcactagggagacactgatggcgtctgagcagatgagtgacagtatccaggctgggcttcagatcaagtctcttcagtacctaggagatggggaggaagagccagaggccacagtcaaattctgcacaaagataatgcaagttagctgaaagtagcagtgacttttcattcccagatgtccccaagccaagaggcgatcctcccaccataccacggcttggcttccccggctccccttagggagctacccttgggtattgaggtgttgggagccaggcctctcccctttgttggcctaggcactggaacctgctccttagcctctctggctttaccccacctccctcccttcccccaggaatgaaagcacaaagccagcctttgctagggcggcgtgggagccaccactctcaaaataccagctcggatattgtagcttggcagccctgcaggaccctgggggctgaagcttgtctggatggtgctgtggggttgggctgtcaccagtccagagggagccttcttccccaggcagatggaatttacttatcaaagaagaattctgttgctcttctccaggaagcttgagattggaattagggaggggaaagagattccaaggagagaatttgcagtgcaccccctctcccccaagcagaacaacttcttcttcagctgagccctcagattaggagaggctagctgtctagttatgcaggtgggaaggaaaggacttcactgaggagtggagcagaggtcagaggtaccagttggagatgagaaattcagggccttctccttctctccctctcttctgtcccctgtctcctctccattcccacttgcccacttgtccttcccctctggcaattcctgactcctctggctctcaggtgcttggcttcccagctccatctgtacgagcagccttcctgctgctggataatcatcagcaaccagtttgtcagcttgtgagcaggacagggctcaaggtccttgactacacagacaagctgctaagaatgctggatcttggagagggggtgggctgtggagcctgcgatggtagagccatcatctggaaggctgtggctctcctcccagatttgcaagggagagcaatgggatcagggctgactcacccagtgctctagctgagctctccttggggtactcactcctgtactccccaaccctctggtctggccacacaacggcccaggcccaagaaggccagagcagggctgaaccagggttgtatcttggccctctgggcctagagaaaggtaaggctgggtatggatgcaggattaggggcctcccagtccatctgggcactaaggtgcttaagagcctgtgtcccatgtgcctgcttagagggaaacattgtttccccacccctcaataccccaggctgccctgtgcttgactgctgcctaggccctcctccacaggacaccgaggaagccagggcctgcgtcgtgccagggagatgaatagaggtgtaaattgtgtggtgagctgccggctctgaggtgaaaatgaaaagtc

SEQ ID NO: 105939 - DNA, 1751 bp, Homo sapiens
cgtttccattatgtttttttttttttttttttttgagacagagtctcattctgtcacacaggctggagtgcggtggcacgatcgcggctcactgcaacctctgcctcccggattcaagcaattcttctgcctcagcctcccaagtagctgggactacaagcatccgacaccacgcccagctaatttttgtatttttagtagagatggggtttcaccatgtcagccaggctggtctcgaactcctgaccccaggtgatctgcccaccttggcctcccaaagtgctgggatgacaggcgtgagccaccactcccggcctccattatgttttctacttggctgatctgttgcacagaaaaatgggctgtgcttgagttacctttgtgacttaatgtttgtggtagtccctccattgattctttttgggttttctgagtatagttttcttaccgtcacataatggtgtttttattcatcctttccagttcctcacttcttttgagatcatctattctaatccctttctttccttccttccttccttccttccttccttccttccttccttccttccttccttccttcctcccttcccttcccttcccttccccttccttccgtccgtccttccttccttccttccttccttccttccttccttccttccttccttccttccttctttccttctttcttgttttgctctgttgcccgggctggagtgcagtggcgcgatctcggctcactgcacctccatctcccgcattcaagcaattctcctgcctcagcctcccgggtagctgggattacatgcacctgtcaccacacctggttaatttttgtatttgtagtagagacagggtttcactatgttggccaggctggtctgaaacttgtgacctcaagtaatccacccgccttgacctcccaaagtgctaggattgcaggcatgagccaccgcgcctggccaaagagggaaagagggagggaacgataggccaaaagcctacagcacccggtattccaggcagtctcccatccaagtactaactagacccgaccttgcttagcttctgagatcagacaagatcaggtgcattcagggtggtatgactgtagaccctttatttcatacttgggcaaattgagggccagagggaagctaccgatttgtgtagccaagccaatgccctaggctcctgcctggggtgctctctgccacttcctgcttcctcttttccctccctggccatcctgtcttactccctgtctcctttgcctgccattttcagagctttgggctctgctggtgtgaggggagagtagagagaggggaaggtgctcaccagcccttctgcaggctctccctgctgctgtggcaaggccccagagcaccaacagacaggtctggcttctgggccagaagctttggggcagcctggtgggggtgagaggaaagtttccgggcagaataataacgtgctaccttctagctgcagcctcttgctatacctccccaaagcatgcacgtgccatgaagaccagctgcctgaggggcctccagggtttgagtccccacttgcagggactgctgtgtgcaggcaggtgcatgttggtgtctgtaattaaaaatgagcatgcatcacttcacccagtgaggagacgccactacctcgggtgggatgcaacagctgcttgctggctgtgcagctgcctgggtatccagcctggcacagaaggatagataggactg

SEQ ID NO: 105940 - DNA, 1052 bp, Homo sapiens
catcccttgctgggcctagagcttatgtaggagatgtgacccgtccttggcccacacattgcctccttcttttgggcatttgcagccacctagttctaagcaaacctccagcctctgggtagcctgggagtgggacccatcatcagccttcgtcctgggcctgacctcttctgtcttctatttgctcccaatccctagctgaagccagggcacagggtgatgtcctgaatacaaagcactaaatgaggatagttcaggtccaggtcctctctcttacctcttttcttcctctcccataattcagaaagacctgctggggaggcactgtgggtcccgtgggggaaagcttggcctggtgtatcagtcttgccctgttgtgggagccctgagctgaatggggtaaatgcctgcaccctgcccaggagatgaactcaggctgaagtgaggtgggagtgtgtggtgtgtccccaaggtagctgacgcagtggcactgtggcagcctgtgtgaggtgggtgagctgctccttcccttttttgccaacactcctgagtgagtaagcaggtgttggtgcagggtggggtggtggtggggaagtgctggtgtctggggtctcttagaaattcctgcatcatgggtggtgtcccaagtccccatcttgtttctgcatgtggaagacccaggtgggagggaaggcccggaggtgtgtctgagggactggaactctgaatccagtttctggcagaccctgggggcaccttggcatggttcactgacttttgcctgttaggtggagaggaatgtgaacatctgcaactctcccaccttggaaagaggctttatagtctccttgggtctgtgtgtgggagtgagctgctctgggctgtgggtttgttagatggccagtggtgtcagtggcagagcacgttctcatgtcctggcaatgcttccacacactgctggctgtctgggctgtggaaggggatgtgccagggctaggaggaccccaggcccacccaggctcttcaccagtgggaccagcccagtgtgacct

SEQ ID NO: 105941 - DNA, 1269 bp, Homo sapiens
agtagggaggaccagggcccccaggtaacagcaggtaggaccaggctagttttgggcctgaggctgcccctccaggggtctgggagcaggctctgggacctggtgctccctgtgtgagatgctgtgaggagggagagctgggcagagaaggaagggctgtgtcgcagggccacagttttctctccatcctctgtctcccttgatcctctgttctccctgatggctttgagatgaaggcgacggcaaggatggaggatgcagtttccatggcaacggggctgtccacagccaggcaacttcagagccgggctctccggaggaagcagatgcgcagaacagccgcagagctgcctcccgcctgccaacgagggggctggcagaacaggtggcacagggtggcagcctggtgctgcccagcctaggggagagggtggaaagagcagtactccctcttattatcttgttatggccaagttcctccagaagggaagctagggaggtggcttgagtgttgagaggggttgggctagggtccccattgtccctggaatctctgggtggacacaggctctgtcctctgggatcttcccccaaaagccaaatgtctgctgctcttgtgatggccactcagctactaccctttgggtcctttgtccagagtgtgaggatgttggtgaaggccatgccctgactagattcagggatccttttctttcatctagctactggggaaggacctggaccttcttcaggggcctccctgcccctggcctcagtgacctggaccagtttgctgagttgggttcaggtttggcagatgcctgcctctaagtgctggcattggaggggccccagagcctgacagctcctgcttcctgacactgtgatcttgtttagcctcctcctggagaccaaggctggagtgggtatgtgagtgggtagagaagcaaagacagccatctgtgtgtttagaaatgggacgtgtcaggggcatggactcttgagatggaggaagccccgagggcacccaggttggcaaagaagatttgactccaactattaaaaaataatgactttccttcaccgaccttggaagcatcagggctagggtgttctactttgctgttgagcacatggagacttaggatggaaggctttgcctggatcacccatggagtcagaggctgagccacagccagacctgggacaggccatccacctcccgcgtggcctcctagatgcaccctcccttcagctggctgctgaggg

SEQ ID NO: 105942 - DNA, 1599 bp, Homo sapiens
aggagcacatggtgtccggcgcggacgatgggtaagaggtcctttggatgtctctggccacggcttctgctcctgagtgctggctgtccacggggccctgagcttgcctcagggcacccccagtgggggagctgttgtaacctcttttcatggatgaggatgatgaggcagagagctcagatggccttgtccgggctgtgtgcccttgatcccttcctgtcatgtggccttttttctttttttttagaattaaaaaaaatttgttgtgggtgcttagtaggtgtacgtatttgtggggtacttgagatgttttgatacaggcatgcaatatgtaataatcacatcatgggaaatggggtatccatcccctcaagcattaatcctttgtgttacacagggggccttttctgcctctggccccctcactgctgtattccctccctgtttatagctctgtggccttgtggggtctctccaagaagcgaccacttgccctgcagcgtgaagctcacgggctgcggggagagccaggcctggagcagcccttctggatatcgtcggtggcagccctcctcaacacagaccttgtggccacaggtgggtgccctgagaggcagggaggaggggtcgccgggtgggccggtgcaggggttgctcactgttccagtctccccaggctcccacagctcctgtgtgcggctttggcagtgtggggaaggcttccggcagcttgaccttctctgtgacatccccctggtgagtgagtgtgcttgaatgctcagcctgtctctgccacactgcctaggcccctggagttagctctttaaggtctttcttcctgccagaagggaaccttctcagggcagggccagctcctagcacagggcctggcaggaaccctccccactttccctcctctgctccccttcctatcctaggccctgtccagggtgctggggtacaagtcagggagcagcatggggagaggcatggaggcctggccctgtgatgaattctgtactgctggtgccagattgggtgccaggctagagggtgtggacctcactgtccacactagggtgacctgggggagggtggcaggatctgtcagtgatgtgtgctgagaatgcagggtctaggtcagtggggacagtcatggggtctccagggccccaccaccaggagccagcctcaggccatactgggtgtacactgcctccttcatcctcacaaactcactgctagccccgtgctctgcttacccccatctcgcagatgtggaggctgaggccctgacaagtgaagggctggcctgtgtcaccaggtggcaggaggcagagcagggatttaacccaggcctgataaggcccagcccttgactgtgatgctgaggacggtggtggcggggggcgttctaatgtctttccgtgttgtctttctgctcaggtgggttttatcaacagcctcaagttctccagctctggggacttcctggtggctggggtagggcaggagcacaggtatgtgtggccctcgagggttcaggtaaggtggtgcaggctggacagctcggtggaaatggggtggagactgggccga

SEQ ID NO: 105943 - DNA, 1064 bp, Homo sapiens
ggagtgctctctgggtgacagtgaaagctgctgcccggcagtggggcttatgagctccctgtccctagagacctttgggcaaagtcaggatgatgatttaatgggaattaatgctgcaggtaggtggttggactagaagacatttgaggctgtgcagtcctgggattgagtgcccggtcctcctgggttcccatccgttgctggctgaccagcggttccttctacacccgctgtagtaacagaagaactcacaccatcaatcccaaagcccttttacatcccttctcttttttgggctttgtggctgctgtttggcactaatgtccctcttcatagatgaggaaactgaggcagcttgtccggaggctcacggtggctgagccaggtcttctggccgagtccgggacatttgccatggctcttttttccatgctgccccttgaggggggttgccagccagccctatccccccatcccagtagcttctcccccacccccaactgcagggagcgtggagagtggacggaagctgcatgtgattcctcgagccaagaagggtgccgagggaaagccccctggccacagcagccacgtcctctgcatggccatctcctccgacggcaagtaccttgtaaggccaggttggccctgggggcaggcgggaggtctggtgcatggtgggtgcctgtgatcattgtcttcatccctgcaggcctctggtgaccgcagcaagctcattctcatttgggaggcccagagctgccagcacttgtacaccttcacaggacaccgggatgcagtgtcggtgaggagctgggtctatgtcagtggatctttagtgggcacatgctagtgttctaggctcagtgctggcctctggagtctctgtcctcagggaacctgcatcctggggtagcgagtgggtagcgagtggtgctgtaaaatacataaatgggctaaagggatggggaggagctgggggagaccgggccgagcttgctcaggaatcaacgagggccttgagaagccgcctctgggcgggatgtagcggctcttgcctataa

SEQ ID NO: 105944 - DNA, 1119 bp, Homo sapiens
ctgaactgcaatgtcacagtaacccccttttcatccactttgtccccacagggcttctctgtccagggtcagtatggggctgtgaccccagctgaggtgagtgacccatagcccaaggcaccccttcctgaaccatgcctcctctgacctctgacccctctttggcacaggtcaccaagctccagcagctctcaagccatgcggtcccctttgccacacccagcgtggtgccaggtaagccacccctgcacaaggaggcagggggagggtcctaagagggcagccccctcccttccagggagagtggaaatggtggggcgggaaaggcccagaaccacactcagtccctcttctccccctcaggactggatcccggcacacagaccagctcacaggagttcttggttcccaacgatgtgagcaggggatgggatggctggagggtgggtagggggtctgggggtctggacctcacccagggctgaattctgccttccctctagttgattggctgtgtgatcgggcgccagggcagcaagatcagcgagatccggcagatgtcaggggcacatatcaagatcgggaaccaagcagagggcgctggggagcggcatgtcaccatcactggctctccggtctccatcgccctggcccagtacctcatcactgcctggtgagcgcgggctgggcggcagtgggggagcaggtcacggttctcatgtgcccaagaaaggcaggggtggggagaggaagctggcctcctctctctgtctgggcccgacctctgcctctcctaaccctactccaattccccatggtctttgcctaattcaccctctgttgccccatctcccccctctatatccacctctcattctccattgctgtgtcttttccctgggtctctggccaccccatttctccctgcacctcgtgctatatctgcttgtcctttcttcccttcctcttccacctttcccatcttccccttattgttctctgttcactacctctctcttgcctttcatctaatctcatgcccatctctgccctcattgcccctctctcactcccactttcccctttgtctcccctctatatccctctctccagtctaga

SEQ ID NO: 105945 - DNA, 1039 bp, Homo sapiens
tccatccaccatctggctgctggacgaaagtgcctctcatatggagtaagctttcagcctgaactccaccttcagggccccatccacagaggttacctcttccaagaggtcagggaggaggctctcctcctgactcccataggcttcctagttaattatttcttttagtgtctcagggtaagggaaaggctaggtacctaccatgtatgtgcttattgttttaattctcatcactctttggagatgggaatttgtatccccttctacagatggagaagctgaggctcagagggttgaatgggctccccaggcttacacagctcgtgagacacacataagcaccctggtcagagtgatgtgtggcgctcaaggtccatgcagtctctttcctctgggagtttgactagcccagctctggggtccccatgtaagggcaggggcagggtggactgggctcctctcgaacccctctttggctgcccctgccagagccggccaggttgcagcgcggacacactcgcaggtcgctgtggccccagcctcgcctgacagaatgagcggctcggacgggggactggaggaggagccagagctcagcatcaccctcacgctgcggatgctgatgcacgggaaggtgagcgggaggtggagggccaggcgaggcaaggctgggctgggctgggtttcactgggtatcccagtggggaggggctgggcctgggcactggcacccatctgacggctcttgtcttgtccgcaggaagtgggcagcatcatcgggaaggtaggtgcctagctctgctctgtacatccccctccagctgaggcttcagcccagggaaggaggctgtgacctctaagttaagagtgattatctgttttgtacctcccacagaagggcgagactgtaaagcgaatccgggagcaggtgaggatggagtttgggggaggagcccagggcacctgatgtggaggggagatccctgccccactttctctctgaaccactccttctgggctgaccagtgagtcccccaga

SEQ ID NO: 105946 - DNA, 1075 bp, Homo sapiens
cagtgatgcctcatggggctgctcgttccttgggccctaggagaataatttggaagacatgggtcagaaccccttgttcttgcctaaagatgggaaagaccttgagagtctctcagaccaggaagggcgcagatagaccagcaactctctccctacccccagcccctaaacacaatacaggtgggtttaggtcaggtgaagacctggccaaagttacccactggacttggggcggtgggtctctgctggagacccaggcatcttttcatggcagaagctctagttctggccatgttccagccctcctgccccatttttcctggagccacaagaggtcatgtggagatggtttggggacaatgtcaggtctcccactggttaccatcccaagggggtccttgaaccccagaaaattttggaacttaagaccgaggctctggacaagttgtcagtcctttccaaataggatccctgtcttctagctaggcaaaggtctcagagacgactgaagcccaatccccactttcgaaggagcccgccctccaggaagaggactaacagatccagacaggagcagcctgaaaggggaggcagatggggctttggatagcctcacactagcaatgctagtcccactgtgtcccacctctctgtgaccttgggcaggttactgatcctctccaggcatcaggttctcctgtgtagtgaattcatctgctcagctaaccagtatgttagctgagttccagctgagctcagtatgttctgagcaccttctctggcctggctctgaactgagccctggggacataaggagaaggcagcagccttggctcctgctccaaggggctcctgggcttggctgtccagagaagcagaaaccaagcacgtcatcacaagtgctttgatgggggaagtgcaggcagctgggggaatgtctagcaagggcagccagcatgaggctggccaggatgctcggagagcacagtccctgcatccactgctcatctccagcctctggagtccctgtggcagaactcaaatggaaggaggagcagctgcacccaggggagca

SEQ ID NO: 105947 - DNA, 1056 bp, Homo sapiens
aaagccctgagctgggttctagggtagatgggatcagtgcccagactgcctgtcataacccagatggctgggtcccaaccctcggtgccaggtgtgaaaggagcagcatggctggccccaccccctcaggccagggatggtatggtttcagggctcaagggcgagcctcctgcccaggcaggattgattccaatggtgggttggcttgagcttcagggtgaaggtctggagctaatcttgttggtgaagcctgaatgactggaggaggagctgcagaaccgacccctcagctgctgtccttcaggagcctctcttgtcccaatccagggccaggtgcctttcacacagttaattttcacaacaatcttaaatggcagatacttttgttatccccctttaacagatggggaaactgagcagctgagagaggactgagggggacctacccaaggtcacatagacaataaatgcagaattgggttctggacccagacttcttgggcttcagagcctgattctctccaggacacttactgctggggagacaggcacagacgtggagagaagtgcctcatgcttggcacgataagatagaatgaggctactgtaggaataaacgtgggcacactgggtgttacaggaacctggccacagagaaactgacctaggagggcttcctggagagagcaaccatctcccttgttttgccattcactgcccttgtcttgtctctttcacacctgaatccctgcaggtctggggcactccaaggaagcagcagcccctgcccctattggggagctggcccctggcagcttcctggcggctgtggtggatgccttggagctgggccccccggttgtgatcagtccatcactgagtggcatgtactccctgcccttcctcacggcccctggctcccagctcccgggctttgtgccagtggcccccatctgcactgacaaaatcaatgctgccaactatgccagtgtgaaggtacccttgtgtgggaagctgaggtgcccctgccaggagcaaggaagggtgcatccctgg

SEQ ID NO: 105948 - DNA, 1071 bp, Homo sapiens
ccacttgctacttggcactttgggcaagagaatgtacctctctgagcctccatttcctcacctataagagacctataatcacgtctgctccccagcattcttggtggaaaagaaccttgtatgtgaagtgccacactcagggcctgctgtcataagcgcttgatgaacggaagtggtttcagctgatgccatgatggtggcggtcactgagcatgctgtgtgccagagaacacctcagatgcacctcctcacactgtgaggtatctgagcgcttgccctggcatgtggagtagttgagtgtgaactcccagaactttgcccagagcaagggaaagggcaagggctggagctcttcctctgctggggactctgggtggggttttgggatgggatccagggtccttgtagggactcagttccagcctcttttccctctcctctccctctccagactgtggtacagacctccatgagccggtcccaggtagccctgctgggcctgagtctgctgctcatgctcctactgtatgtggggctgccaggcccccctgagcagacttcctgcctctggggagaccccaatgtcacagtcctggctggtctcacccctggcaactcgcccatcttttaccgcgaggtgctcccactcaaccaggcacacaggtaggtgctgctccaagggtctagtggagggactaggctcaaggggagtccctgtgtgggacccccattatactcagggtgctcaggtcctgggagggcaatgggagaagcctaggaataaagaaaggtgggctacaccaggttcccagcaaacacattcccctgtgtgcctgcagggtggaggtggtgctgcttcatggaaaggcctttaactctcacacgtgggagcagctgggcacactgcagctactgtcacagaggggctaccgggccgtggcccttgaccttccaggtgagcacccccacccctttgtctagggaagccttaagtgtggctgggaggcaactggaccctagggtctggacaggccgtggcaggtcacaacataaggtggcaccatgaaaaag

SEQ ID NO: 105949 - DNA, 1040 bp, Homo sapiens
ctgggattacaggcatgagccaccgcgcccagctgccaggacatgcatttttaaatttagataactactatctcaccctccaaaaacactatatggatttatcttcccatctgtcatgtatgaaagtgcccatttccccatgtctcccccaacactgggtattatttattttttattttattttattttttttttagacagagtctcgcagtcgcccaggctagagtgcagtggcatgatctcggctcactgcaggctccgccccccggggttcatgccattctcctgcctcagcctcctgcgtagctgggactacaggtgcccgccacctcgcctggctaattttttgtatttttagtagagacggagtttcaccgtgttagccaggatggtctcgatctcctaacctcgtgatctgcccgcctcggcctcccaaagtgctgggattacaggcgtgagccaccactctcggccaagatatgcttttctaacaggcatattacattaccagaaaatagcttctgggcagttttaggtagtgtgtgccagtgccagtggtccccaactttttcccccactgtggtgggcaggaagtcctgtgccccttcccagtgcccctcagctggtacctgctgctgttcctaggttttgggaactcggcaccttcaaaggaggcaagcacagaggcagggcgggcagcgctgctggagcgggcgctgcgggacctggaggtacagaatgccgtgttggtgagcccctcgctgagtggccactatgccctgcccttcctgatgcgaggccaccaccagctacatggatttgtgcccatcgcacccacctccacccagaactacacccaggagcaattctgggctgtgaaggtactgggagaaggatctcaaaggtcctggcaccctgtctgtggcttgggggggttcaggactcaagtcttacttggagggacatggccttatccctgaccttggatggaagagttggatggtgttggggaaggcttcctaggaagtggcttgggggtc

SEQ ID NO: 105950 - DNA, 1051 bp, Homo sapiens
agcatctctgagggatatggagtgtgtcggggaggcagcagcccatttctgggtatgctccactctccgggctgcctgggctggtgggaagctgtgggtaggcagaagcagccccaagacactctgtgcctccaggagctgctgtggctttctttgaggagacagcccgccagctgggcctgggctgtcagaaagtagaggtgagcctggggccctaagcggggaagggaggtgggcctgggcacttcctcaccctgctcagaccacctaccctcctgaccatctccaggtggcacctggctatgtggtgaccgtgttgacctggccaggcaccaaccctacactctcctccatcttgctcaactcccacacggatgtggtgcctgtcttcaaggtgtgtaaggggctggggaggtgggcagtgcaggccttggggacagacatgatgcagaccccaggattcaacctcaagttgctcatggtcctggccccagtcctgacactaactctcaacatccttatgacattacaccactcaagcagccttcatccagcagcaagttctgggccagagtggggtggggactggggggtgggaagcaggagacagcaatgggggatggcaatcagctgccttcttcagcccccgtctttcctctcccaccactccacctgtcactccaaccctatggtgggctcctagggcagggccactgttgaccagagtggattaatggctaaatttggggtttgggcccctcttcccatccctgcccccaggaacattggagtcacgacccctttgaggccttcaaggattctgagggctacatctatgccaggggtgcccaggacatgaagtgcgtcagcatccagtgagtgtcctccattcctactcctccacaatgtccccactggtccagtggattgaagcaggacctgagggggtgattggagaaactcaaggccaaggaacaccgtgacctcttggacaggaactactgccatgaccattgcatggatagggagattcagaccagagaggggcagg

SEQ ID NO: 105951 - DNA, 1001 bp, Homo sapiens
ctatcccaccccagccctgtctctcctgccccatgctcagggaagtcagaacaggatagagcagatctggctagatcaggctctgctactggggccatagtttactcttggtactacctgggggtcctagcaaggctgagatgaaagcccagttcctgggcctctgcacacacagatccagggtgctgaggcctctaagatgaactgacctagtctaccagggaccctgcccctctgtggcccctgctgccaacacaagggtgtacaggttttgacaggagccagcagtcaccgttggccctctgcctgcccctcatctagcaggggcccagctggtgctattctggtactgtctcaggatcccagatgtacacccaggaagatgggagtggttcctgaggtccttagtatccctctttaatgggaatggaatccctgataggtcagaactaagtatggtggccactcaaataggaactgtggccctttcttgctaggcacagacatggctggatggtactgaatgggtgtgctgtgtcaaggggcacagagcagtgtggggtagtggggaagtgctaacagccaggctcagtttcctcatctgtgaaatggagatggtaacatgtccccaggaaaaggaaaattcttgctccacgagtgtccttgtgttagtacttcagagacagccctgtccatagactttattatttggaagggggaagaggaggtccttggcactggttgggatggaagccccaggggcaaaggtttaggagttccagggctcagctgtcactgggcagggcaggcacactggcaagggcaggcagcaggcgtgtatatatgtccaccccacggaggaacacagcctcatgcagccgttcatcgtggtcgtgcagcagcacaggtgtgcggttcatgggtgagaagcctagagctgggacccccacctgcaggggtgaggaagagccgttagggaaaagccagcactcaggcccagt

SEQ ID NO: 105952 - DNA, 1696 bp, Homo sapiens
cggaacttttcttcgcggagcctggggaagcttttccagtagtactttccggcgttgttgaccctatttcccgtgctgcaccgcagcccctttctcttccggttctaggcgcttcgggagccgcggcttatggtgagtgttggccgcgcggcatccgatgccatccgcgacttacgggtggcggcggggcgcgggctgcggagaggactggtgaccgaccgtgtgtctgtcgggagcaaaagctgcggggtgggaatggtgcttctaggtcctaggagggggatggcagggaaagccactttattggggaatgcagctttccgggggtaaggagttgatttcagggcatcattacctgggtttgggaggccaggactggcgtttggtcgtgcagagtaagccgagactcgtggaggctgcacattctctgcctgcaggctcattctgaccagaatggggggggcagaggtggcccagcctggcgagcccttaaccctgatctccacttttgtcttccaggtgcagacatggccaagtccaagaaccacaccacacacaaccagtgtaagttttttgggccctgcctacatcccagaccctggcaaggactggttcaggcaaactgggacagagatgaaggggcacgtttccattgtgggcctgaggctgattgatttcacccagtaataactttagggtttataggtttagagatctacttgagatacagagtgttttgcatttagtagtaagggtttcccatatctcaagtgtagctgctgtaggaagtgttggttctcccagacttgccagctgtgatgttgggtggtcttattagaggaaagttctttgttggcttaattccctttttttctcccacagcccgaaaatggcacagaaatggtatcaagaaaccccgatcacaaagatacgaatctcttaagggggtgagtgcactgaatcacatggaagtgtcttttcttggttccaggtgcacagtcaaggcctctcatgtagtttttctctagctttggcttctgcctgagcacagcctaactggcccacccaaagcctgcaattcctttttctaccctaccagacccataataaagctttccttggtctccacagcctgaagtgtaaccctctggtcagggtgtaacctgcctcctgagggcagtttggctatctcccttgcttggcagtggcacttagggtaaggagtggccttgtctgagtgcgtgcagggcacattcccacactgaccagccttatgacctccatctgacccagtgctggagttggggtcagcttctcttcctgtgtcagggggttctaaggattagctgagaaggctggagggtctaggggagagctgagcatgtccccagtctgttccttccctttacttttgctctctgttccgtggagtgaatcacaaactctgagcctcagtttccccatatcccaccttggctataagtcttttggaccagacttggtatttaattgacaccttcttctaaagaggggagggggtgtccctgaggggatgtcaggaaaaaacttggtcgaacccctgctgtaggaagttgaagccccacaaccttggcagacagggcagcaaagcagcttgtaattttgttcttgaaggaggtctgcacagcattacccaggtggcgtattggctccctgg

SEQ ID NO: 105953 - DNA, 1087 bp, Homo sapiens
acccgtgacagcagtcgttaacgcacatggcagtggtaggactagccatgatcacaggcattacagtagttcatgtttgttgacccctcacttggctcaggtccttatgagaccactgtgcataaataggcccattttatagatgaggaaacagacacgggtgtccagtgccttggggctaaagtgtgcagagccctctccacagcagtgctgttgacctctattccaagttgctgccctacccacactgggcttggccaggtccctcaggggtcgggcaagaccagccagccaccatgctgccctctgtgccccagccccacctgcccacccatgtgggaaggctccttgaaggaggcacctccctgacccatgccaatgtgtttcagacgaagcccgctccaagaagtgtggtgtcctggtgcactgcctggcaggcatcagccgctcagtgacggtcactgtggcctatctgatgcagaagatgaacctgtcactcaacgacgcctacgactttgtcaagaggaaaaagtccaacatctcgcccaacttcaacttcatggggcagctgctggactttgagcggacgctggggctaagcagcccgtgcgacaaccacgcgtcgagtgagcagctctacttttccacgcccaccaaccacaacctgttcccactcaatacgctggagtccacgtgaggcctggtgcacggggggcatggcaccaggcccctgctcggctctccacagggctaggtgggagagcccaagcccgccacctctggcctgaggaacccccagatgtcacctgtgcccagaggcccaggctgatcggtgtcggagcgcccctcaccatccttgggggcagggcccgcaggcaaggtctcccactgcagggcttgctggagaggcctcggctcttggacacgtggctttgggcgtccaccagggcctcatcctgtccaggacgctcctttctgctgacagcccagccagtttggctgttttttaaagacacatccacggacctgagtttactttttacttttggcaggtaaatccaagctccctggagcacaaagagtgttt

SEQ ID NO: 105954 - DNA, 1002 bp, Homo sapiens
ctctcccttcctcctgcctttcttcctcctcctccacaaacacatgtttccaattccctctcaggccccctctcccctccccagccccttcccatttcctctctgaggcatccactagcatgtggaactcattaggagaccctcagggctcgtaacccaactctggcccaggcttggggagggggccctgtccgcagcccccatgctgagccacagcggcttccccacatctggcccctgtctggccctgtgcagttacaggctggaaagcacaaggagccagccggtgccggtggaggaagcatggcctggcggccagctcatctcactgctctcctctccagccacgtcccggcgcctggtgagacatcttagccccagcagctgggccagggtggtttctgatcccaccggggcagctggacctgtgtgtgaaaagcagatcccagggccacttgagcaggcccaagggtatggggttctgagtgatgaactcgatggccctcagctttccatctgaaaaatgggaagggaagtccagggaagagaatatggtacgtagaacagccaccaggcaacagagttccacatcctccctggaggacacagtgaaggcccggttccatgggctgttagcggaggttatgcaaaacaaactggtgctattgtcaccaggatttgggaaatgccaggatgaacaaagtaaagacaaccacttccctgaaggattgtcagagcctttaatacactcccatgcagtgcagccactgggccatagagttcatggtgtttccagacatttgaccacatggtcctttttattgcagcatacctggcaggcctgggattctacagaacccactttagaaaatggtacagaaagaacagtgaggaggcagtaaggatgggtcaaaatcccacaacaggaaaagctccctgagtgtcccatcaggaattgttacctgctgggtctgagcaaagggtaggaattgatgggggtga

SEQ ID NO: 105955 - DNA, 1024 bp, Homo sapiens
ttgggtcacctgggttgggcagtccctccttcatccccaccaaggagctttccaggacgttcagcccatcgctgacatcaccctgggtcctgccaaggccctcagctcccctgcgctggactctgctctccagcctgcagggcccttgtgggtccactgccctccccactcccccctcttccttccctcctcacccactggctgccctcaataggatcctcagtaatcccagtcttaaaaatgcagtgcaactctgctgctggctcaggcttctcagaccaccccatgcctgccagaccctctcaacattcttgggggtcctcatactcagcctgtgtaatctggagcccgtcttctgcctctcctgcagggccagtccttgtcttgtgttcttggccttggagcacatctctctcagacccccatctaactcgtcaccaggtactggtgcttcgttctttgtggctatctctggttctgtccactttccttcctggcttctcctgcccccagtccaagccactgtcatcccctctcgttctctcttgcctgcacctcaccttcccacagccatgaacccactcccagactgtccctgtgtagtagccagaggagtctcaaatcccctcagcctagcaccccccagcaccctcctgctctgagggtgaagatgaagctgctaggcatgacttgcagagcccaaccccatctcctgcctcccctgaggccccctcttcttgctccagcacacgtgcctcctatggtccatccctcccgtttcttaaccttggccagctcagggcctttgcacacaccattctttgggtcctgatcctcttcctgcccctcttgcccctccgtcccagcagtgcagcccactgtctatgcgcctgcgtggcatctgcctcgttgaactgtggtgcaccctgtgggctcagccgagtctgcgtattatcatcctgggccaggcacaggccagcgttggggaggtgctttgtgagagtttgagtaagggaagagcgag

SEQ ID NO: 105956 - DNA, 1029 bp, Homo sapiens
acgcagagctagggtaggcagtggggcccggcagccctgctttgttttgatagctcatgagaccccacagcaaagagattccccttttattgtatctgttttagatcttgagaatctgagtgaagtcaaaaccatgctacaggggagattaattcaacatttttcatctctgcaatgaagccaaaggaaagttagacattcagtgcagcacagttgagaccaggggtgttgagtcaatggccagccccaggacgtttgccctggcctgccacaaatgtcctcagtgtggccgggtgactgcgccctctccctgagactcagagcagtggggaccacaccacctctggcccagttatctggctcctgtgttggtggggaggagactggagaaccccagtcccaccagggagacatcatgggggcgcccacatcaaccacaacccgggaagtgagtaaaaggagcttttcatcacaggagaacttaaagaagcagccagaccaccacgtgcatcaatggctcacaccctcccaaacctgaccacaggctgccctatttggggcctcatcaagccccatctgtgcccatggctcccccaacatcccggagctcagccagggcaatggctagaggagtcatgttccccatagtgcatgcctgtgcccagccagacagagcaagttctacatgcatattagctattaatatgaatattgcagtgactatgagaggtgtgttttacaaagaaactgaagccctgagtctggtaacttgcctaaggctgctcggcgagttagtggtcaagtttccctttgaacctaggccatgtagctgaggagccttcgtgcttaccacgtgggaccaaggttccccactaggaatccctcagtggcattttccaagggcccacacccatgaggggaggaaggcaggcatcctagcagcggggccagggcaaggaggctcctagggtaggagagtgggcgggcctcaggtgggcggggttgggcagggaaggcagtattggtggg

SEQ ID NO: 105957 - DNA, 1117 bp, Homo sapiens
ctcaggttttgtctggcttccccattgcctagctcagtgaccttgggcaagtcactttgagtctgtgtgccttactttccaaatctggaacacagagctgataataatacccacttcataggcctcttgggaagctccttgaatagtacctgacaacgccgtgcactgctgatgtgttgggtgctgctcctgttgctgccattgtcgttatccaaggcttgggggccagggggatctgcatgacagcaccagaaatagctctcccaattttccactgcctcatgaagctagacccttccctacccaggagagccattccttggccctcagagcagaggtggcaggttccttccatgcacacacattcactgagcccactctgtgtggtgggccctgtgtgagacccagtcccaccttcaggaagaactcaggactgaatctgccaaggtcagagccaggcctccccagaggagctggcaactggaataactggaaacaagtgggagtccagacaccgggtcaaggccatgggtcctctggtgtggggtaacagaagcagcagcccaggagttcaccctcacctgacgggacactaggcaaagtcgaggcctgacccatgctgagggtctggggtagagtggagatggggacacagagaagttgagacgcgagcaagggcagtgctatcatggctccatcccaggggcgatgagacaaacagcactttggctggcccctgcaaggctcctggtctccggagcaagccagcaagtggggcagcttcccccagccttcccaggccaagaggcctttcagatgaagaggaaaccaaactgcccttgggacttgcacagcatcagaaaccctttaactccagaaatggggttggtgttttacttttttatgaaagccttttttataaaatccatacattatttttcaaaagtgtatttatatggggaaaatagactttggggtgaccttgtgagccgagcaggtgcagtcttcaggcctccccacgtagttgttttagatgaaaagtcctcagagtgtggggatcacatactcatcatagttttcatcctcctggtttttatctgaggcctgccactttcca

SEQ ID NO: 105958 - DNA, 1017 bp, Homo sapiens
gaaccctaaattacagggcaaataaggctgtagtgtatctagtctgcagatatgtgtggtgaattcggtataggcttcttttgagctctgatttgagaaaacgcccgtgcctttcctcttgagaagatggacgtgaggctgagtccacgtgagctcggtgtgttccctgcttccctccccaggggcaggtttagcaaacatggaggtagacagacatggctgcctgtcaacttttcatgaaggcaaattgtcaaaggcctgaggccaggactaagaaacatctgtgtctgtgagtctcctcatccacagttagcaggctgtacagtgaacagtccaatcgaagattcagttgaaaatatttaatcatgggggtgtgtttgtgtccatttcttccagttttgcacagggcagccctgctttggaaatgtagtgacatgccttggttttcagtgagcagtggtcagacatgctgttcacctgggtctgtacaggaagggtgagtgagatagtccagctcttggccccaggtcaccttcttctcccctctcttgcctagaatcaagctttggaccagttcctggatgcttttgtttattacagtttcagtttcaggagcgggctggacaaagggcatggtccagtgttagaaattaaaagaaaagtagaaagttccaccttgagcaggtgttaagaattgtccatttcaacccctaagaggggtgtgttccatctctgctcaagctccagcctgctgaccaggtgtgtgcagaccttgctcctgactgccaagctgtgtacagactcctaagcagcggaggcctgacactccatggactgcatggctgctgcttgggaggccctgcctgggaatctctgcggctctctcaaattccactgggaaactggggctttgggaattgaactgcattgagttatgactctggctttgcatttggaaaatgtaattcccagactgatgatggaccttgtgggcctcacctggggtcttcagccttg

SEQ ID NO: 105959 - DNA, 2078 bp, Homo sapiens
aataccatagactaggtagattataaatatagaaattttatttctcacagttctggaggctgggaagtccaagcaaagcaccaacgggtttagtgtctggtgagggtttgttttctgcttcatagatggctccttctcactgtgtcctcgcgtggtggaaggggctagctagatctctggggtctctttcataagggcactaatccaaacctgatggctccacccatatgacctaatcacctcccaaaggccccacctcctaatactattactttggggttaggatttcaacacaggaattttgggggacactagccctcagaccttgcagcagatttgcttctcatttgggaggacttgggtcgcttaatgagaacacagatttatggtttggcattcactttctgtagaggggagaagtgtgggttcaacggattcttagcaagagcggtgttgtaggtgtttggagcaggagtgaaccccagatttatatgtcttagagaagagcctctcccttctccacttgaccccaatcctggcacctaattttttcaagaccattaaggttggtaggatgcagtgactcacgcctgtaatcttagcactttgggaggctgaggcaagaggctggcttgagcccaggagttcaagaccagcctgggtaaagtagtgagacccccatctcttaaaaaaaaaaaatactattaaagggaactgttggcttcctgcctgctgcaggcaagtcagaagatgcccaggcaagttacccaacttggaaaaggcatggcttcatggagcccaaacccccgacgcctcaagctgcccgtgcccttgggctcagggcatctctgggggtcaagatgtgcctgttaatgtgttgtggctctcactttgctcacaccctttggctgaatagctggcattgcccacagtcctttttatcggtgtgaatgagagcttgatggaaatggcaaagcagaccctcttctaaggggcaccattccacctcgtgtggctattgtggggctttaccggggccaggctttatgggatgacttgggaacagtggggactttctttttcatgtttcctaggacttaccaggtggcccatctctggctcctgggggaaattcattcctgccccctatgccacacagaggaggaactttgagcccagaggtgacctgctggtgaatagcctgggccccagccaagtccttgtctctgggattgaagtgcaggaacgctaataagagacccctgactggaaaagagcaagggggagtctcctcatttctcagtgggaaaaaggagcccagcatcctcacccctgggacagataaccgtgccttcccctgtgtgtgtgcacatgcatgctcatgtgtggacccctgtcagtgctgcttcagggtctcctggtgtctacattcccacaatgctctgtcaagtgcacctcccttgtactcattcatgtaatccccctgcagaccctgttgttccagttctgtggggcgtctccggtttacatgggatgtactggggctgggcacagcatgggggatgccagggatctggctaggcaccttcctggtatgagaaaaggcagcttacaagcatgtctttcctggaaaggattttcaggcagccccactaggaaggtggaaggtggatactagaaacttctggctctgggaaccacttccagaacttagttggcagtaagagctgcgctgccctagtatgctggtctgagcagaggctgggacccagcctgaggtggcgtgtctcctgtaacctcacgcaggttgtctcaattctctgcaccccgatttctccccagcattctgcattgcatcctttgtgcatttttcatttcatgggctcactctgcaaaagaccttcctgcagaagagaggccacagcagcctttgctttgggtggcagaggcctccagataagatgccccctttcatactcgggttgcattttcctccacctttatctcaatagaattcgtggaaagtgctctgggtttcttagtttcagtgggaagagagtggatactaaaaataaaga

SEQ ID NO: 105960 - DNA, 1324 bp, Homo sapiens
ccaacccaagttgtgacaaccaaaaatgtcttctaggccaggcatggtggcccacacctgtaatctcagcactttgagaggctgagactagaggatcgcttgtgcctaggagttcaagaccagcctggtcaacacagcaagatctcgtctctacaaaaaaatttaaaaattagttgagcatggtggcactcccctgtagtcctagtcacttgggaggctgaggcggaaagatcacttgagcccaggagttggaggctatcgtgaactatgatcataccactgcactccagcttggatgacagagtgagactctgtctctgggaaaaaaaaaaaaaaagtcttctgatgctgccaaatgtccctctggtgggcagaattgtccccagcttagaatcactgcaataagtcttgcctcagcggggagcccagaaaagaagctgacctagcagtgggaggagtgtgggaatgtgtctggagatggggctgtcttagcagtgggaggagcacggggatgaggtgggagaggccctgggcatgcggacgaggactattccagcagccttgagtgtgaggactctgttcaactgggccagatttgggcttccaccagcagcagcaatagtggcccaggtgtctcagcctgggtttctaacagaagtcattttgtaggaatctcatttggtcgcagtcttctggaggtgatggtaaacaaccaaaaaaaaaaaaccttttgcctttagcaactacttggttttcttcacttaaaaattggagagtgtttttgcctttcctgactaaaggttttcctggctctgggagaatatctggtcagtggtttggtggctgaccagtgtggctcgacttctcaaagagctcatgggcaccatagccatgccccaagaactcatgaatctaatgatcctctgcctacatcagctctgtctgcaccctgggcctcaggccctgaagccttgtgaaatactcctgggcatttggggaatctaggaagcccatcgggcaggtgtaggtgttgaattcctcaccatgtccccattccagcgtagcagtcgaaagccagaggggcagaccctgcatggaccccttactttacttacccactagcagaccacggcaagggcagccctgtgagcctatgatggtccttctgcccaggaaaaccccctgcccatgaccctttctctgactgcagtacttcagctctcagatcttggaatgaaggttgtccttgagcccactctgaatagagctctgttcactgcagagctattttcaacctctggttgaaattcacagcttattttta

SEQ ID NO: 105961 - DNA, 1022 bp, Homo sapiens
tccacccagaaaggcatttcacactgcagggttgaggccccctgggactcagcagacctctaggtccctgccctctttcctgtgaatccctctctattaggcacttctggtgagccatagccaaggccttttatgctcgctaccctgtttattccttatctcatcagaatgagtgggtaaatatactgctcaattcacagatgagacacctggggcttagtcaccttccccagatgcctggacctgggggcccaccaggctgatgcctctgagcaaagctagaaactacaggtggcagaggactgctggctgcttttccccatttcaagggagggccctgacatctgccgcttgggagtggttaatatctaccagctgggggagaatcccatgttcttgtagctattaggaaaataacttggatgaattgcttcttgttcctttggtcctggctcagcaatggagtatggagcacctttgcttcccagagctgtgggtgggggatcccagcatggcaggatggggcatgagtgggtgaacagctcagcagtgcttagagcaaccacttgttcccatactatctacagactcacgttggagttgtagtcacagctctgcccactggccctcactgtgtgggcctcaaataggggaaaggatgtgggtcctggggtcagagaactgggtttgaaccctggatgtgtggccccaggcaaaacacctggtcttcccaaaccaacatttccacatagtacctgaatacgcccataggcaggctctgatgagagctttgagacccccaccaagtgacttgttaatcctaaaatcattcttggttcagatcagacctctttccttatttgtcataagcccctctgagaccctgagtggatgtaagtcctcttccagacacactttcactgacacacacatgccatgtggtgtcaaccttcaggacttctctaatctgaggactcccaggccaagaggagagctaggtttttagtttgttttgccttgtt

SEQ ID NO: 105962 - DNA, 1064 bp, Homo sapiens
gctgatccatgcattggctgtggagttgctctgtccccacgtagactgcccaggtgtgcccccagcttcacctagaacatgctcttgaccttgagggagagttgtgtaacctgctggggcttctggatacccagcttaagcacctgctcaccaaccactttctgagtcctgctcggtgccagggacttaccacccctgcctgatggagttcatggtctcatgggagatccagatgtgagtcagatagttgcatgtgaatgtgaagagtgaaccgatgggaggcttgtgctgctttggaaggacaaatgaagggggtggccctaattgggaggccaggggaggcttcctggagaaggcagcttccagtaatgagctttaaggtcagggaaagggaagggcaagagtctcccaggcccattggaaacaaggggtaaaaaagttctacggctgggggaatcgacagagctggggtggccggctcttggagagtgagggacaccagaaaagatggtggggttagcctgagatggtagggaaaagagagtcatggacagggccaagctgttgagtgggtgaagtggcaggaccttgagttgcatggaacacagggggcaaaggagaggaacatccatgttggcattggatggctcactctgcaaagacctcatgtgcttaacttagtagcatccgcacagtacctcttacacataggtgctatggtacagatggagaaactgaggctcaatgtggttaagatgcttgctcaggatggatgtggtggctcacggctgtaatctcagcaccttgagaggccgaggcaggtggatcatctgaggtcaggagtttgagaccagcctggttaacatggtgaaaccccatctctactaaaaatacaaaaatcagctggacgtagtggcacacctgtagtctcagctactcaggaggctgaggcaggagaatctcttgaacccaggagacggaggctgcagtgagctgaggtcgcaccactgcactccagtctgggcgacagagtgagactctgtctctcaaaaaacgtcatgggg

SEQ ID NO: 105963 - DNA, 1049 bp, Homo sapiens
gggacgtgcggactcaccggctgctgcagcattatcagtgtgagtggtgaacagcctcctgggcccaagggcagccctggtgggactgtgatggtgttggatgttgtcctgtgctgtagtgcttaaatgggtctgagatggccttgggcaggaaggtgtcctgggtttgttgggattccaggggtgggagtctgtggcatggctggcctggcttggaaccttggccaggagatggagcctggtgctacctggcttccactgagccagtcaatgctcacctccgaagtggcagaatctcacacatactgcagggccagatggggagtcctcactggggctctggtcagggcttcccttgaggaccacttctcaggggcatgccacttgcctttcctggtgatggaggctctgccctccagggccaaggtgacagcccttgacctgtggtaaagggaacagggctgtcagtagaggccagcattggtgggaccgtggccacctctggtcttacagtgtcctccgcagatgtagagtcatagggagggttgacttagctaggggccaggcccaggatggtagcccttggaaggcagggtggcgggcagtgggcatgggctcatgtcaggctccaggtgggagttggagggcgagggcagacttagacatgcccaggatgagttcgctgagagtactgggtagggaactggcctgagagcaagtatgagtgggcagggccatgaggcgccccagttccagggatgggctcagggaagggagctggtgaggggtcattggagaaactgggaattgtgtagctggcaaaacagagatgagcaagactggaccagggccgagaccaggaaggaggcagagctggagttgtttgaagaaccgtggttgttaacctgggactaagcttaaagttcttgggctcgcttccttaagccacacctgaaatgggaaggacatggctggacacaggtgtggggttccgaccccacccacccctgacacacacacacccttcctagctgactcctggtgttcaa

SEQ ID NO: 105964 - DNA, 1043 bp, Homo sapiens
ggaggatctcttgagcccaggaggtagaggctgcagtgagctgagatcacaccactgcactccagcctgggtgacagagcaataccctgtctaaaaaacaaaacaaaaacaaaaacaaaatttagtcacagtttcctgaaaaactcttcagaaggaaaaaagaaaaatgatgtgctaaaagttaactattttcagaaacaaagtataatttaagatatgaccaaataaacagaagtaacattgcctcctaggatgcaatgcatttgttcctgaaaagacaaattagggtattcaaattaaaaaaaaaaaaatcacagcagggcatgtgaccccgggtggttcctgcaggcagatagtaggcactcggggaagagtggctgtggaagaaggtgtgtggtgcccatgtcgtctgttagtctgtgatgtgacttgtgccccacccggttcaggttctcccccgacgggcggctcatcgtgtctgccagtgatgacaagactgttaagctgtgggacaagagcagccgggaatgtgtccactcgtattgtgagcatggcgggtgagtccccagatgctgtcctccacctgtaggcgctcaagcacagagcacagacctgggcatgaggaggcccagtggccttcagtggctggagccgtgggaccagcagccttatcactgctgccccttgtctggtgctttttgcgaggtctggcaacctagcattgtatcttttgctgtgtggatggaagctttggccccatcccacaaatagcaggagtgcttaacctcaagccatgcaattctttggagctgtgtaattatttgtgctcctctttttctccttcactttctggttgtcaggattacaacatgtctgtctggcagcagttgacactcagtcgcccaaactacattttaaagcctcttggtatgttatccatgatgatggctttacaaaattcttgttgggttcttgtagcagatggtggctgttcatattgtgccacatcatcaggagagagaggtgcctacatttgagtagag

SEQ ID NO: 105965 - DNA, 1001 bp, Homo sapiens
cttgtgtctggatggtggggtacagtaagtattaagtttatctttgaggcaataaaagaaagaaataagtggttttcttacatactgtgcaaccagatctgatgcttcactttttccatttcctccctcagaagacaaaactgctaaggccaaggtccaacagactcctgatggatcccagcagagtccagatggcacacagcttccgtctggacaccccttgcctgccacaagccagggcactgcaagcaaatgccctttcctggcagcacagatgaatcagagaggcagcagtgtcttctgcaaagccagtcttgagcttcaggaggatgtgcaggaaatgaatgccgtgaggaaaggtaagagatgagttgtgaaccattagtggtagtgaaggggtccttttagttcttttgggccctcagatttgtgtatgagctattattagggcagtatttatggaaacaccttcctcttttagggccagagaggaaggtcttcaagatagacagtcaagggactgtattgcgaaagtgggactttctttctggtgcgtgtgtgggatgtgaccagcttttatagttactacttaatttctgaaaataacctgcagtcttgagctgccaccagctgccttttgtccctttggtctttcccatcatctgctaggataaagatagaaaataatggttttactgcagtaagtgctggtcctagggctcccaagccgtgtgtcttactgatggtcattgaattgcaaccttaactccacaatatataggtgtggctatatctgcagagaactcaaggctccccaaaagcctaaccagcagaaattatgcatatggccaaaattgttttctatgaagaaaattgagattaggaccaggcccagtggctcacacctataatcccagcactttgggaggccgaggcaggtggatcacttgaggccaggagtttaagaccagccaggccaacatggggaaaccccatcccta

SEQ ID NO: 105966 - DNA, 1523 bp, Homo sapiens
agtcttgggagagggaggtcacatcaggctcctgcccaccagctaatcctgtttgagggcttcctggggagaggggcctgggcccaccccgacctggtgctctcccatcttcccttggccctgggcagaagctggacctagagcgggaaaccattgagctggtgcacacagagcccacggatgtggcccagctgccctcccgggtgccccgagatgctgcccgctaccacttcttcctctacaagcacacccatgagggcgacccccttgagtctgtaggtgagtggccatggcagggctcccaagcctgtggctgggtgggagcagggctggtctgcagtggggcaggcctgctctgggtgcgaaggtcagcaggtttctcaggcctcccaggctcacctcctgccccccaacagtgttcatctactccatgccggggtacaagtgcagcatcaaggagcgaatgctctactccagctgcaagagccgcctcctcgactccgtggagcaggacttccatctggagatcgccaagaaagtaggcgccctccccagggcctcacctccccaggccctatcactccaatctccatgtggggcgctggggtcctgagatgacggcagagcaggaatcgttgctgtcgtgttgatcatagggcatctgaggcccaaggagcaacacgcatggcccaaggctgcccagctgatcggtggctcagaaaagtccaagtcctggctaccatgtcatgtcctttccctgggcctggagacagggaggaggtgaccccagcgagcagagtccaaggcatgcagggcagcaggccctaagctcttgctttcctgggagtggcattccaggtggggaatcaaggggagacctcaggagaccccagggctaggatgtgagagtaaggggtgccccaggagtgggggctaccaggggtggtgtgtgtcagagcccctcccattggggtgaccactgccttgccccatgcagattgagattggcgatggggcagagctgacggcagagttcctctacgacgaggtgcaccccaagcaacacgccttcaagcaggccttcgccaagcccaagggcccagggggcaagcggggccataagcgcctcatccgcggcccgggtgaaaatggggatgacagctaggaggctggagcagggccggccacgtgtggactgtggggctgcccaccttccgctccctgccaccatcctccttcctgggctccaggaaagtgtttctgggaggtcaggagggctggcagctgaacgcacttgcagcgtccgagggccaccgggctggcattttgtgacccttccctgttgctgtccctgcatctcgtctgtgtgcccagggtgtccggggaccctgcctggctggcttaagggggctgggtcaggggcctggcatgaacctggcctcccggggagctgagactagggtcccagcacagcccagaaacctttggccacaagaagtggggtcagtcagggctggggcagg

SEQ ID NO: 105967 - DNA, 1011 bp, Homo sapiens
gcgctcaagaaacggcccctggggaagagctggcgcgcccacccacaagcagaccccttcctgggtgcaaacccgtgtacgctgggacccactcctattcggagacccacctggcttggggcgcacagatcgggcgcgcgcgcacgatccgccccacccacagaccaccgtgatcagggcgcacagacacacacgcgcgtcctcccacgcacgctcggtcacacgcaggcccccctctcctgccacagaggaacgcgctggcgtgcgcacggcggatcaatcatcatccttagacccacccggaccgaggcgcaggctgcgcgcacgcgcggccccgagtccccgcctccctgccgcgcctgtcgggggcggggcgccgctgggggcgggtcctgcggcaccgcccgggaagctgcgcgagggtcgacagcctccgccacatcctccacctctcttggtccagcgagcgttgccgggccagggtcaagcggagggctccgacggcgcggacggagcgaagcgccgagccatggcgcaccaaacgggcatccacggtgagggcggatggcgggcgggcagggggcctcggtctgggctctcggaagcgcccccccccggctctcggcccctccctccaccccacaccagccgggagaaagcttcctgttctcttttgcagccgcgggtcgcctggggtgggcacatctgggggagtacggacgtggtgtgcatagctgggagtgggtgtatgtgtacgtacacaactggggtggaagtatctgtgtgcctacctggagatgaatgtggctgtgtgtgcccatctgtatatttttgttcctttccgggagtgggtgtacacgcatgtgcacacgtcttccgtgtacagtcctgcctgtgcacctctggatgtgactcgcttgtgtacatctagggtcattcatgcactggcactagtgactgtttgaatggacactgtaggtcgcataggaccctctttagacatcagtgttt

SEQ ID NO: 105968 - DNA, 1079 bp, Homo sapiens
tcaaaataggaagagaaaccagcccctgcaccaaggaccaatagggtattcaattagatgatgcaggtaaaagcagttagcacacagtaggtgctggataaatgagaggggttatgctgatagtgatggctgttagtaacaatccaaccaacccaatctcatcctcccaatccaaggatctggtgtgatgaccatgggtatacagagatgccatttcctgagatccccggggcaaaatctccacttcttccccagccaaaagccacacactcacacattcctgaaaggcactctccaatgccccgatcaccaagtcttctgccctgatgcccttttcctccacaaactgagggtcactggggcagatgcagcggccattgaggtgcatggggggctgagtggccaccaagccttccaccacggcctccagctgccggcgcaagcaggagtgcagggtgttggcagccaagatggctgctgcaggaccgccgtgcccatcgaacagtgcccagtaatggcctgtcaggaactgcacaggaagggctcagtgtcagcctctgcctgacttccccacttgtcccctgacgcaacctaactaggacctggggcagcagggtaagaacctcagcctgcaggtcgtggccccagcctgtcggagggattccagccaagaactcagactgcactcacctcctctgggcacagggtcagccactcttcttcagccccaaactcacatctccggatgcacagcttcccacaggcggcttgatcctcattgaattcagatttctctgcattgataatcctgaggccgggaaatggtaagcgaccctccagggacacacctatgtccccatgggcacagggacccaagccagcacagggagaagacccctccctctggggcaacagctccccagtgctgtccctaacacacacttagacaaccacgatgtaagcttcctaacttcactggcctcatggctaaggtaaaagtcagggcccagctcctctggagcctacctggtgacccagggctagacggtaagggtaggttgccattcctgcccctgtcc

SEQ ID NO: 105969 - DNA, 1007 bp, Homo sapiens
caaagctggcccagatgctgatacacagcacacagggaaaggaagacagtctcacagaggaagggcaggtgtcctacgatgacgtctctgtgttcgtgattcccttgcacagtcagggccaagagagcagtgaccactgaggattcagacactgtatcccagaactgctctagtgcccgggtgtggtctgggcatccctccagtgtgaccaagagcaaatcctgcctgccctatccctagccaccgcccagtgctctcactatccacctcaacacacatccatctcaagaggaacatttataccaggcagtcagagctggaagtgtatggagagcccagcccaccaggtcctgccttttgcggtgataaccttctctggcagagtgactttacaacttaactaggaaacccatgtgaggctcctcagacaggatcttgaacagcccaaagtatcattctcagataggggcacccaagctaagggtattagccaaagatgccaggatgggtagctagcccatgtttagatccaggtctccaattcatggttatcagggcatgtgttcaacaacccccaaagtccacgcaggtggcttgtagaaacctttgggcagcctcatgtctgctaaaacagccatcttcaagacagcccctgaaaagagaccagttcaggtcctgccctgctgttctttgctggagatgaggaacaggtgctggggctaaagtttggggtagagcacaagggacaagaggaactcttggagttggctgggtgagagggctctccatttgctacctgtagtagcctgcctcttaactggttgcttctccctagttccagccctgccctggtctgatgccccaacactgcccttgctttgttttccctgtcacctccctattattaaatgttttctacagaagagccttgtgagtcatgaattgctgtacagcttggattaaggatacctattgctaatttttgttacctttgagtggattagttt

SEQ ID NO: 105970 - DNA, 1186 bp, Homo sapiens
ttctgtgcatagatttttggtgtgtttacatagtcgttattctgtatatacaattttatgtcccttttgtacttaacgtataaacattttttccatgttacagtcttaaacagaattttatggctgcagcctcttcgatttgagtttctgtagcatggtttgcctggttcccagagctggagggaggcttgggttgtctcctgttagttctggctcacactgcagcttgctgtaatgctgtgtagacggattgctgggctccctgggactgcctctgactgccccttggtaactaagatttatgggctggtgggaggaacccctagaaccagccttcaaccccaggctgtaatagccatagagccagcaatgactgacggggcaaggcaagcctgagccagcctgaatcttcggagactgtctggcacttacctcaggctgccttgcatcctctactgtttactcaacccttcaccagattgacaacctctagttggaatatgttttgtcctgctagaccctggtttcaggaaggcaagaatactggagtctctctgaggccccagcacccagtctggcagaaggcaattgctttggtaacccatttgcctggaggctgctgctctagctcagcattctcagagctgtagaacctgcttcctgctcttgcctcgccctctctggaccagagaagaaaaccttgggcctgccacattttcacattgctcatgggactctgcaacagtggcggagggaacatcctagcttgtgtgtgacaggccatgcacaggctcttctgacactacgtacgtaggaagagaccccctcctggcctggtgggaggactgctgccgtgttcagctctgctgggagacatgaacaagtaggtaagcatggctgcccttagagcagccactctggtctctgtcctgctcgcaactgaaagacctacttcacccaccccccaggcttcattcagccttgtgacgtgaggaacaacagcaggcatggtagcaagctaggcaagcaggctgtgggggcgagctggctcagcagttgatgtgggtaagagaagcaggcacaggatgctgcccacccttttttttttttttgctcaggcggagtggtgaggtagtggaggctgtggtgaggaaagaggaagtgacactcctacaggctggtagga

SEQ ID NO: 105971 - DNA, 1042 bp, Homo sapiens
tgctaccatgcctgctgttgttcctcacgtcacaaggctgaatgaagcctggggggtgggtgaagtaggtctttcagttgcgagcaggacagagaccagagtggctgctctaagggcagccatgcttacctacttgttcatgtctcccagcagagctgaacacggcagcagtcctcccaccaggccaggagggggtctcttcctacgtacgtagtgtcagaagagcctgtgcatggcctgtcacacacaagctaggatgttccctccgccactgttgcagagtcccatgagcaatgtgaaaatgtggcaggcccaaggttttcttctctggtccagagagggcgaggcaagagcaggaagcaggttctacagctctgagaatgctgagctagagcagcagcctccaggcaaatgggttaccaaagcaattgccttctgccagactgggtgctggggcctcagagagactccagtattcttgccttcctgaaaccagggtctagcaggacaaaacatattccaactagaggttgtcaatctggtgaagggttgagtaaacagtagaggatgcaaggcagcctgaggtaagtgccagacagtctccgaagattcaggctggctcaggcttgccttgccccgtcagtcattgctggctctatggctattacagcctggggttgaaggctggttctaggggttcctcccaccagcccataaatcttagttaccaaggggcagtcagaggcagtcccagggagcccagcaatccgtctacacagcattacagcaagctgcagtgtgagccagaactaacaggagacaacccaagcctccctccagctctgggaaccaggcaaaccatgctacagaaactcaaatcgaagaggctgcagccataaaattctgtttaagactgtaacatggaaaaaatgtttatacgttaagtacaaaagggacataaaattgtatatacagaataacgactatgtaaacacaccaaaaatctatgcacagaaatgtctagggggaacatttaacacca

SEQ ID NO: 105972 - DNA, 2914 bp, Homo sapiens
ttttaaccaagaaaaaaatgttagaaaaaatacagcaaaaccatccagttccttactttttacagcccaggaaggtgggggcctgttggaggtaacctggtggattagcaatgaggacaggttacttattcacccacctcccaggcagcactcctttttttcccttcctttaaaaaaaagggggcggggggtctgctttggtggaaggtggacagtgattattggagaaaaacagaaccattttactttcacatagaggaaagagtgtttctgtctccttagagcatcggggttggttggttaggagagagggctaccagagccactggggttgggcacatttttgctgtggggtgggatgtgaagaaccgttggcagtgaggagatgcttggctttttaaagttgatttatgttctccttctaggccttttggttgcccaccattgatgactgaccctgttgctgcttggctatttctgtatagtgagggcggccagcaggaagaaactcagagggaactgagataatagtgggattggatcatttgactgggctggagaacatccttttacatggccttcccatggatgtgctgtacatctgctcaaaagaaaataattactttgatgagcgtcttcaaaaggactcttggtgcaacagactcaattggaactcagcttttctaactgtcactgcaccaagctctgctggaggagtgaccagactcacgatttggtatagtggggctctcaagcatcttcaatttgaatgtacatgctgctgaggagccggtgaagtcatcagttccgcacatcccttctaccctccaactgcatgggaagccaaagtcctggttttgaaatgcttgggcagctcagccgcttgccctcaccctgcatgtcttgttactgggtctccctgtgtacttgtggcattatccacaaccatcatgtttcttaggtgccaaacatttacagaaacattttcatatatcttggggtcagagaaagggacagatacagaaggaccttgcttgcaggaagccatgcagttagtttctgcagttagtcgtgtgaggctaggtggttgggcaggcctcgggctgtaggtgttgggtgggaaaaagacccaagggcctgaaagggagggaaaggggagggtagcgggagggtagcaggtgagttcctagggctggaaggtttagcagcagcctggtgcagtgccctgtcatcaagacaaacccacggtcctcctgggtgcctaccaagcttggtttgtacaaaagcaaggtgggagtctatttttgtacatgagatacatcacacttacctgtgggccagtattgtgaagtgagtctgagttgtttacactgatgccttccctgcccaccacaaattgtgtacatagtcttcagatgataccacccctttccccagctcccaaccaagagctggttctaggcctgtgttatatgtcatatttagcgtttttatatatgacctttgatttctgttgtttgtattttagcacagtgtatgcaccttcatttaaatacatctgtgtgcatacagatacgcatatatgtgtgtgcgtatgcatatatctctcatctgtagtttccaagagttcagctgaagcagatggagtcctgcagcccaggagacaccctgcatccctgctaatagtgtttgccacaagtattagtgagtcttccttattaatattttcatttcagaagactgaagcaaagctgatagtgtttgctgtttctttggcagctaagtgagggtcttgggatgacttgctgtgttcctcaagctgcactttggggccatctctgcagtattagccccctttttgcttggtggtactctgtctgtgcctgtgtgtgtgtgtgatagtcactcttgcatggcttccatgtctggtttgtggcatttggggataaggtgctgaagccagagcatttgcagtttgtttgaggcctcgttgccaatgatagatcactcctgttgacctggtatgtctgcttgcttgctgcttttccttgctttctcttggaagaggaaaggactctggtcaggcccaggctgagtgagatgagctgcagctggctcatggccttcttagagcagagagaggagtatgtcattttactaagttcctaaacaaacatttatgcaggcaacactccttgcagatccagaaactgaggcacaatagggttatgacttgctcaagaatatgtagctgctagggggtaaatcaaggcatcacaatttctgttcagcgggcaggaataggctgtgaattgctagcactttttttttttaagcaattactttttgacttgttcctctgaaagtgcaagaggcgtacacctttcccaaatgtagactagaatctgcaggatgccacccactgtatagttctgctttcccagagaggaagaacttttagaaaccaaatgatcttaattgttattgcccacccctggcttttccgggtagaaaattcacagtaggaatgattgttaagagagagtgcttggaaccatgggttaacaggaaaggctacctaacttcacatatctgcaaccagagcagccaccaagcattacttagcagcaggaaaatgattgtatttgagttcctgtgtgtccaaaactgagcaccatgttctttgaaaacatgccacctcaaggctgggcgcggtggctcacacctgtaatcccagcactttgggaggccgaggcgggcggatcaccggaggtcgggagtttgagaccagcctgaccaacatggagaaaccccatctctactaaaaatacaaaattagccgggcgtggtggcatgcgcctataatctcagctacttgggaggctgaggcaggagaattgcttgaacccaggag

SEQ ID NO: 105973 - DNA, 1077 bp, Homo sapiens
actttcagaggaacaagtcaaaaagtaattgcttaaaaaaaaaaagtgctagcaattcacagcctattcctgcccgctgaacagaaattgtgatgccttgatttaccccctagcagctacatattcttgagcaagtcataaccctattgtgcctcagtttctggatctgcaaggagtgttgcctgcataaatgtttgtttaggaacttagtaaaatgacatactcctctctctgctctaagaaggccatgagccagctgcagctcatctcactcagcctgggcctgaccagagtcctttcctcttccaagagaaagcaaggaaaagcagcaagcaagcagacataccaggtcaacaggagtgatctatcattggcaacgaggcctcaaacaaactgcaaatgctctggcttcagcaccttatccccaaatgccacaaaccagacatggaagccatgcaagagtgactatcacacacacacacaggcacagacagagtaccaccaagcaaaaagggggctaatactgcagagatggccccaaagtgcagcttgaggaacacagcaagtcatcccaagaccctcacttagctgccaaagaaacagcaaacactatcagctttgcttcagtcttctgaaatgaaaatattaataaggaagactcactaatacttgtggcaaacactattagcagggatgcagggtgtctcctgggctgcaggactccatctgcttcagctgaactcttggaaactacagatgagagatatatgcatacgcacacacatatatgcgtatctgtatgcacacagatgtatttaaatgaaggtgcatacactgtgctaaaatacaaacaacagaaatcaaaggtcatatataaaaacgctaaatatgacatataacacaggcctagaaccagctcttggttgggagctggggaaaggggtggtatcatctgaagactatgtacacaatttgtggtgggcagggaaggcatcagtgtaaacaactcagactcacttcacaatactggcccacaggtaagtgtgatgtatctcatgtacaaaaatagactcccac

SEQ ID NO: 105974 - DNA, 2816 bp, Homo sapiens
tttctccatgttggtcaggctagtctcctgacctcaggtgatcctcctaccttggcctcccaaagttctgggattataggcgtgagccactgcgcccagctggcttaatgtttttaaaagtgttcctagagcttttagcttcaagggatttatttttatttgaattctgtgtctgtaatattgtgcagttagagttgatcagaaattgttgtctggagacctgttttttaaaagcttcattttagttttatgttttttttgtgtgtgttctgtaggtaggctgatatttgtttgtatgcctttcttagttttaattgggaaaagtaaattatatagtggtaaggtcctggattcatttttttttccccattgtaccagcagtctttggttattccacgtatggttgtggcatgtgtgttttagtgtatttcttatttcttttctcttagggcctcatgcatctgcaggggaagccagtttgttcttttgatccagaagggttaattttcgctgcaggtgtcaactctgaaatggtcaagctttatgaccttcgttcttttgataaggtaaatctttgaatctttgagatctttgagctgttttttgttttgttttgtttttgagacagagttttgctcttattgcccaggctggagtgcagtggtgtaatctcagctcactgcaacctctgcctcccaggttcaagtgattctcctgcctcagcctcccaagtagctgggattacacgtgtccgccaccacgcctggctaattttttgtatttagtagagatgggtttcaccatgttggtcaggctggtctcaaactcctcacctctggtgatccacccacctcggcctcccaaagtgctgggattacaggcgtgagccaccgcgcccggccctgtaagagccttttctacaaaaggaaaaatgtggtagatattagagagtggcagagaagtagctcattctctgctttccttagtcaaaaagtaatctaaaggaataggatgggaattggctctagcagaagaaattattaatatgcctggggctactgttttttatcttttgcaggggccatttgctacctttaagatgcagtatgatcgaacttgtgagtggacaggacttaaattcagcaatgatggcaagctcatcctcatttccaccaacggcagcttcattcgtctgattgatgcattcaaaggagtggtgatgcacacatttggggtgagctgacagccttcaagcatggctgtttccatgctcatacttcctatgctaagaattatgttagctggttggtggagaccaacagttactcttgacttactcatgaaggcatgcacttgtattttcttcctgctcatgaacttacctctcttggatttcgtagatgttcatttctcaccaagtgacccaagtttggtatttagatataaaataatttcctaacaataaagttttcttgcccccttgagtatgccttgaatacagagttgagggtgggagtggattgtcaacgatggcaaccacatttggaagcttggtggtgtagtacatgacaaggaaagggtttcatggaaaggaaggtgatgcatgtgctgagtcagtgtttgtaggcagctgtttttattaatggctctgtaagaacaaaagaactgctctgttttgttttagggttatgccaacagcaaagctgtcacactggaggcttcatttactccagactctcagtttattatgattggtgagtttccttttatcccctgtgggggttatttctctggtactatgcatttctttgtttaaattattaactgagacattattatctatttgatagatgttcttagatttctgtatagcacattatgccaaggacatagtgtcttttaactgccctgactggaccaaaatttgagttaaactccacaagcactaccttattagtaatgctaatgtcctggtgtaaccctacattcagtcatcttagtggctgcctgttggtagggtaatggtattcggccccttttttagatgagaaaactgaagttagaacggaagtgacatgcctgtgaacaaatagctagggtcaagataaatttccaaagtgtccttccttcactgcctctcctccctctcaattttgcctgagggatgggtcctaaagcttggcgtatcctcagatctcaatccatgtctcatttccagttgtctttgtattgcgccttgagctgttacattttccgtgaatatcctctttaggttcagaggatggcaagatccatgtctggaatggagagagcggtataaaagtagctgtgttggatggtaaacacacaggcccgattacctgtttgcaattcaaccccaagttcatgacttttgccagtgcgtgttccaacatggtatgtgaacagtaagaggtatctgctactcagggacccttcccagttggggtggtgggtgcctcaacaagcacagcaagctgtgttctacataggtacattacaagcatccaagtacatgtttctcaactggtggtttccctatttcatctcctattatttgatctctggctgggctggtcttgcctttcatttttattcttcctagaggtgatcaggaatcatctttgagttccaaggagatcataggccagtttttgctctggaccctaattttaggtccaaactacctgggctatgcttggcaatttttttgctccttaaaatactctgaaccggccttttgtggtttcagttttccattcctgttggtttacgccaaattcccagaaatttctaca

SEQ ID NO: 105975 - DNA, 1206 bp, Homo sapiens
gttgctgttagcataggcttgtggttctctaggtgtggtgcccaaaacagcagcctcacccatcacctgggggctagttagaaactcagattcacagaccccaagtcaggcctactggattagaggctctgggagcagatcctagcagtctgttttaacccaccctccaggtgatgctgatgccacttaggtttgagaatatctgtgtagtcctcacacatcttgataaggaatcatgcttttttgtgtttttttaattgagatacagtctacatactgtaaatgattcctttaaaaatgtacagttcagtggtttttactatatttgcaaagttggacaactatcaccatcatctaacttcagaacatttttatcactccaaagagaaactctgtacccattagtaatcactccctcagcccctaccaactgctgatctacttctgtctttatagatttgcctattctagacattttgtgtaaatggatcagttcatatctgatcttttgtgcctggcttcttttacttagcatggtgttcccaaggttcctccatgttgtcacatgaggcagtactttattactttttattgccaaataatgttccagtgtatagatacagcacattttgtttgtccatccattagttaatggaccatttgggttatttctactttttggctgttatgaatagtgcagatctgaacatatgtgtacatttttgtgtggacatatattttcagttatcttgggtaaatacctaggagtggagtttctgggtcacgtggtaactttttttggaaaaacttttccaaagcaactgtaccatttttacatttccattagcaatgtatgagggttccaatttctctgcatcctcaccaacacttgttatctctcttattatagctatgctagagggtgtggagtagtatttcattgtggttttgatttgcattggaatcatatatttttattttgtagctttaaatttttttttttatactagttgcctttgtttgttccagatatggttgtggtatgtgtgttttattgtgtttcttaaaatggcaattttgggagaacaggtatatatatgtatagataggcagagtggtttagaattcacatccaatttttgctaatatttcgcatcaactcctatttatctcgatgtattgcagggtggtggccttgtccatgtc

SEQ ID NO: 105976 - DNA, 1279 bp, Homo sapiens
atcatctcacattttgcagtaaggttttttttaggccggtggctacatagtggctcatgcctgtaatcccagcacttagggaggcctaggagagtggatcacttgagcacagaagttcgagattagcctgggcaacttgggaaaaccccgtctctacaaaaaatacaaaaattagccaggtgtgatgggacgcgcctgtagtcccagccacttgtaaggctgaggtgggaggattgcttgagccctggaggtctagggtgatcacaccactgcactccaacctgggtgacagagcgaggctccatctcaaaaaaacaaaaaagatttttctaatgtcattccacaaggatagcttatactgctattttggctgtgcctatctcagagcagaatgggcggaagtccttttttccatttttttttttttttaatgagactcttctgcctgtattgatttttagttaagtatgtcatttctacttttcatgcctgtatttcagaagtggttttctaaggaagcagtgtagttaatgattttggaaaagaatgtaaaaccttaggatcctgaggaaacatgtctatgtgatcatccgaatgactggtttatttcttctgttgggatgtttttctgagtgattaaatgaggattctccaaatgtggtgcaagatgaggcaaatgtgtggcacttgtagctttgctgccaagcctctgctgtgaggatgttccctttcctgtctcaagtgcatcctgaagagttcctccagcgctccgtttccttttgcctgattccaggctgaggtagtagtttgtacagtttgagggtctatgataccacccggtacaggagataactgtacaggccactgccttgccaggaacagcgcgccagctgccaagtggggctgagaggatggcgtcaccctgctcatctctgggaaaccaggtaatggggaggaagtctttttcttcttagggcaggtgagtcattgttagcagtagaataactagaaatacttcgtagttgtcattcaagaagtttgaagatgttttcaaggaaaattgtgtagtgttcaagttatggaatatacaaatatccctattcccctattccccctcccaagttaaatgccctcttattagaaagcacccctgtgaacccctgggatgactcgatgctttcaacccctttattcctatgttctgtttgccttcagaatgttctttctatggttttctttctgcattttggtaccattttcccttagctgtttctcaaca

SEQ ID NO: 105977 - DNA, 1025 bp, Homo sapiens
acagtactgaatactgtaggcaattataatatagcgttaagtgtttgtgtatctaaacatagaaaaggtgccgtaaaacagtttaagggatttaaaaaatgaaacatcggttgtagagggcagctctattataatcttatgagaccattaccctatgtgctgtctgttgttgataaaaatgtcatcacatggcacatgattgtattttttctcaaagcttttgaacattgtagtaaagactgaattgaatccccagatttacttttacttcccacctaaccttgccactaggtgttctaaggtggaaagcttcttcagatggctgttgcttgagcgttgttttttcccttttggaagaagttgtttctttccagtgttagaacttaccaaaaatcctcacctttgccacatcattcaagtgcttctctttatgtggagatcccagattttgatgatggagaatgttcatgattttctgtctctattttcttatcagaccaaagagaaccctgtacagtaagaaatatggtgtggacctcatcagatacactcatgcagcaaacacagttgtttacagctctaacaaaatagacggtaagcaagcctttttaggaagttaaggtcatggtttcctttgttaaatagttcatggaatctttgtgactacttctgctttgtgactactttagtttaagtattttcatataatgttagtaatgttaattgcattgttttgactgaaggaatgctggaagcaagccattggcacttttgaaggacttgggactgagtatgaaaagtcttcaattcagagtggggagtggaaaaaggaaacaactaattgtgtttatgatttgtacttcctgacacttaaaagaacgcttttaaagccgggcgtaggggctcgcgcctataatcccaacctttgggaggctgaggtgggcggatcactgaggtcaggagttcaagaccagcctggccgatatggtgaaaccttgtctctactaaaaatacagaagttagct

SEQ ID NO: 105978 - DNA, 1310 bp, Homo sapiens
tttcatacttttttttttctattacactttttggtccactttgaattccaattctgatcatgaaacttttatgttgccacaagtcatctggagacccaccatacctgcatcttttcgcaaaatctaagcacagcactttgcctttttccctgggggtccttgtcagccctcctcaccgcacgcctgtggacttgcagctccttggagccaaaaactagtttagattaaattcgttttacccttagccaccttccccaagaaggcttgctgatgtttggtttaattcggtggaccctggttttttcagacttgattttgtcacctagtaacagatattattattattattattattattattattattatttgagatcttgggtttttctccaccttctccagctgttcctttttcctttttttttttttagactggtgtccttcttttggaacatatctcttcatttgtgaatttgattatctgaagtaatgctagtttggactgagctataatggtatccccccagtttttttccccactggggctgtgagaaagtattatgtaaccggctctggatctgcctgcagtttgtggcagagtggtctgcagtggtggtcttaaggaagagggaattgttagctggacaaatagttatttgagtcagtgttactcattgagtagatggatttctgtcctggtctggtcacttgaatcagtttagaagacgaagtaacatttaaaggtgtggtagtagggtcagcattgtggggtcctggaggagtaatttgaagctggcttgcatgaaatgtatagtgcttatgcacagattagaacctcttcccagaacctgagggtggagatgtatatcctcatttaaaggaaatgaaggttgttatagcatttctttgcagtttgtccccaaatttggcgtaattttgatttgggaaggatgaccttgacatgaagtcctgtctttcttttttttgtttttttttttcgggtgggggacggagtctctctccgtcgcccaggctggagtgtagtggcgcgatcttggctcactgcaacctctgcctcccgggttcaagcgattctcctgcctcaccctcacaaatagctgggattacaggcgcctgccaccataccctaacttttgtatttttagtagagatggggtttcaccatgttgaccagactggtcttgaactcctgacctcaagtgatccacccgccttggccttccaaagtgctaggattataggcatgagctgctgtgcctggccaaatcctgtcttgttaaaagtaaaat

SEQ ID NO: 105979 - DNA, 1375 bp, Homo sapiens
tagctgggcgtggtggcgcgcgcctgagcgagagactccatctccaaaaaaaaaaaaaaaagtaaagaggtcgaagctgtctaagcggacgctgcggtggactagcggtcaagcttgcctgcgagcggctcacctgagtcacccccaaaaccggcctccagcagcatacccgaccctgcagtaccccctcccacgcagcctgcgatcgggacgcctgcaggaggcgccagagtcttcgcgggggttgcaatcccgcgcaagggcccccggctcccaaggcatccgcaaccttccgatcccccgggaaggccctgcacgtctcggccgctccctgccagcagcccgccccgccactacactccgccgcggccgcgctgacgtcaccaccccgcctccccgccttgctccgccgttcccgccccgccccctttcccggcgtgcgccgcggctgaggctcctcgccctcagcttctgcctgtcgccccaaaatggcggacacaatgagccggcgacgcgccggttgtccgtgaggtggctgtgaggacgaacggtcggcgaggctccacagtccaggcagaagaccctcgaccaagcaggaagaagaggaggaggcggcccaactgttggccgacttcccgctagccgccggcgcggcgcccgccccgcctgggttggcccctcggcagcccgcccgctcgccgccgggccccgccccggccctgcgccgccgctgccttccccagccgccgccatgaagctgaccgacagcgtgttgcggagcttccgcgtcgctaaggtgttccgcgaaaactcggacaagattaactgcttcgatttcagccccaacggcgagacggtcatctcgagtagcgacgacgactccatcgtgctctatgactgccaggagggcaagtgagtgcggcggaggccctgggcccgagtctcagtgcctccctccggtggcccagcacaggtccctcggcctgccctccgtcccgacttcagcccccagcctattttgcacgcgttcctgccagggccgcctccaccccgcagccgtccaggagaccttttatttttttcttcttaaaaaaaaaagataacgatagtcataattttataatattatttgtatgtcttcggtctcctttgagcgctatgcatcacttgccaaaccccaccttgaccttgacctttaaacgcccggtccgcccaccctgggcccaccaggtagcgttttcagctcctcaggctgtcaaaggtgctggtctgctccggcctcgacgcaggactgcaggggctgcttttctgcctccttcggcagcgtcagctctctcttgtgctctctccactgtgacctcgattccgccctggc

SEQ ID NO: 105980 - DNA, 1055 bp, Homo sapiens
ctagttttatgttctgacacccatacacagtcatgcagtcaccaccacattcaagatttggaagagttgcactatcctgtttgtagtcaacaggattattttaaaggttctatcatataagtgattatttgccttaaaagaaagtttatctctaacaaaggaaagcagtatttgaacagaaaataggaaccaagcttcctaaccttaactttctgggcaaggggttaaactcaatgccaacctatgtggcttcacagatctgtatcttgtgtgaagctcctcaaaaggttaattgcctggggtttccaacaatgaagatggggattatttatttttgctttctttagctaaagagaaacaaaaacgaggaaaggctgtgagacatttcagtcgctattaggaaggttattatccagagacctgtgcaatggtaaaaaacaaaatggaaaccctgggacagttggggtctttctagaaagaactagaggctgtatcccaaccccctgggtaaaaggagagccaggatccttatacataaagagaagttgttctctaagggaagaggcaagttcctggctaagtctggggtataattgcctcctgacaaagagcagagcttctggctacaatttgttctggggtctggaaaaagccggtttgagtgaaacctgaatagatggcaactttccaaactgcacacaatggaagaaaaaccctccacgtcccagatcacttgctctgcttccctgtaattcctgtgcctttatttcagaagctagaaagtctgatacagcgtctgcttcgaatagtttagaaggcaacaaggacagatcgagtaccatgttctagaactgtcgggaagtgaacacacccagtaagatgatgccatattttggtccatgttaatctacaaaaataaccacagaaacagctgtaatctactgaatgttgccagccaaaataaatctttgcagggtatttttcaagtattgtacttcctataccttttccagatttcaccgttaagaccaaaccttcctcccaagacttgactt

SEQ ID NO: 105981 - DNA, 1028 bp, Homo sapiens
gagagaaatggaggtgtcccagccactcagaaagcctatagtagagctggaacctcaattcccagcctccttaccctgctcagtccatacttgctgatgaagtcagcttgcaacatttatggtaggcatttattaaagtagatgcaatagtacatatgtagtacagatgagctgtttgggtctttgttgttcctatacccctctacagcttcctgaccttcgccccaaggcttctttagcttttactctgcccagtggggaaaatggctatgggctcagttatgggagcctggcctttgcctacttcagcccttgggctctcaccactgtgggtggtgtgacctaggacttgtttttgttatcttggaaccagaaggcgtgttcttggcagggttgggtctggccaactgtgtgggtagaagggcatccttttctgtcctgcaattgggcttcatggcacatggcctcacatggtgcctggggacttttctaaggttccaccatgagccagactttgccctcactcctgatttgaacctaaacctcttgctgaactggtcctgcatactgagattcctcagattgcttgccctgaggatgtgttctgggtttgacctgataaacctgcagcctcctatagaccctgacttcccaggctcctaatcccagtctcatgagataatgaaatagagaagactggaggtcaatgggctcagggtcagttggtgggacaatcaacagcttcctggcagcagaggtggtaaagaggcaaggaaggagtgccagaaaggggcgttgccccagggtaacagcgcagaagtgcagggggtggaaaaggggtgggatgggagcccactggtagaaattactccctctgtcaatgattaactcccagccaaaggggtgacctgggaggagggcccagctaataggaactttggacttgaggcagagtatccagagggccggcatgtggtctgcagaagaggaggacgtggctgggtggcagggctggtctccaaggacga

SEQ ID NO: 105982 - DNA, 1049 bp, Homo sapiens
ggctaccaggctgtggtgctgagtgcagccatgcaaggtgatgtaaaaagtatggcccagttctacgggctgctggcccatgtggctagaacccgcctcaccccatccatggctggggcttctgtggaggaagatgcacagctccatgagctggcagctgagcttcagatcccagacctgcagctggaggaggctctggagaccatggcatggggaaggggcccagtctgcctgctggctggtggcgagcccacagtacagctgcagggctcgggcaggggtggccggaaccaggaactggccctgcgtgttggagcagagttgagaaggtggccgctggggccgatagatgtgctgtttttgagcggtggcaccgatgggcaggatgggcccacagaggctgctggggcctgggtcacacctgagcttgccagccaggctgcagctgagggcctggacatagccaccttcctagcccacaatgactcacataccttcttctgctgcctccagggtggggcacacctgctgcacacagggatgacaggtaccaatgtcatggacacccacctcttgttcctgcggcctcggtgatggcataggtcacattttgggagttcagaggaggcctacaagggcaaggtcagatggcagagcaaggttggtcctcagggcctctctaagccttagggcccctcctctccttggccttggctgtttggttaactgtcaccttccactcagggcctctgctctatatctattcccttccagccagactggcagatgggggcttccccctacccctgaggatgaggacaagcccctcggccagttcagcgttcccgtgcttctcccttgggcagcctctctcttgagcccctcaccctgtttctttctgtgaagcgagaatgtctgaaaataaataggaccatgccatgggttctcagtgcgccttccctcagagtgaggcctcacgggggagccgctgggaggggagcgtggtacggctgcagccacagtaccagggcctggcaggactcttaaca

SEQ ID NO: 105983 - DNA, 1031 bp, Homo sapiens
ctgtgctcaggggagagcacgtcagggttgtagaagtcctccaagatgttcatgatgcagcgccggtcccagtcatcagtgacacggcccccgtaattgatctcccctgccgtgtacttgaggacctatggggtgggtgggtgagggctcccctaagtgcccagtcccccaggccccagtctgccccaggcccaccttgtaggggatgtcatcatattcgtccaggaacatcttgagctggctgatgcagatgcgcagatctccatccgtgaactcataggggatgttgaagcccaggggcccaaacttatggcgctccagggcgttcccatggaacaagcacagagacagcagcagagacttgaactccatcacctgggggaggtgggaggcaggggaggtgaggagcggggacgggggcaggtagggtaggcctgcaccaagtgtgcctcaccttgtggcaggagttgaggaagtcttcaccaaggctactataggacttcagcaggttggccctgacaccgcgtggcggctcaatggtcatcttggagccgttctgcaggatggacactgggaacttgttgctgggcaggctggtgagccagaggcggaagtccctgtgtacctggtggccatggctccacgtgagcattgagacccatatctggtggccaccctgacaccaggctccctcctgcccagggaccctgaggtgggtcaggcgaggctgcacagacaactggttaagaattgggcttttggctgggcgcggtggctcacgtctgtaatcccagcactttggaaggccaaggcaggcgaatcacgaggtcaggagtttgagaacagcctggccaacatggtgaaatgccatctccactaaaaatacaaaaaattagctgggcatagtggcgggttactaccagctactcgggaggctgaggcagaagaatcgcttgaactcaggaggtggaggttgcagtgaaccgagattgcaccactgcaccccagccccggtgacagagtgagactcc

SEQ ID NO: 105984 - DNA, 1035 bp, Homo sapiens
ctgctctggatccccattcttgatgtatatgggcttggggcttgcagtgaggggtgctgtgtatgggtgactattcttggtttcacagctgatacccaactcttgtgcaactcatgccttgctgagcgtgctcctgaactgcagcagcgtggacctgggacccaccctgagtcgcatgaaggacttcaccaagggtttcagccctgaggtaggctgcagtgccttcatcctggctcacagccaactgggcagatctgaccctgagggccactgggaatgctaccacatgatattgggtactattaggctgtttctttttcaaatgattgtttatgttacatttgactcttaaataaattgtgtaaggccattgtttttagatgcagttgcggggaaaggacacaggcctagggagggaggagagtttccttaagtcagaccatgtcagaaccttctctgtcaggacttttcctctcaggccatgttgcttcctagtgtccactaattaccatgcaaggccagcacagtccatctctttggggctccagagctcttttctgcccccaccagccttttaagaaagttcgtctgtgttccttccgattcctggaatgcctccaggctgctctctgaagctttgccttccacccatagtcctacctgaggagaaattattctgatacggccttattttcttccccgtagagcaaaggatatgcgattggcaatgccccggagttggccaaggcccataatagccatgccaggtgtgtgggagctgtgggagctgatgtggggtgggagtagggggagtatcattttttgggccctgactctgtttttccccaggcccgagccacgccacctccctgagaagcagaatggccttagtgcagtgcggaccatggaggcgttccactttgtcagctatgtgcctatcacaggccggctctttgagctggatgggctgaaggtctaccccattgaccatggtaggcaccatgagctggaggcctgttgggtgtctctgcctac

SEQ ID NO: 105985 - DNA, 1039 bp, Homo sapiens
aaggtagtcaaagggtttttacaaacacagagctcttccctgtttctcttacagaaatatgcccacacatcagcaaagcatttcttcaaatgtccacagtgtaacaatcgaaaagagtttcctcaagaaatgctgagaatgggaattcatattccagacaggtagtgggaaccccaaagcaggaactgagccagggagtgggttgcctagatttctagagaggaggtgagtgagaggatagttcagagaatgagagcagcagaggcactgataagaaggaaggggaggagggagtgcttttcaattatcaaaacagaagggagggggaagaagtttgcgggggaatggggtgcttgttgctgaaaagggcatttggggaatcagaattccctggggggttgagttattggattccagagtggaactaaggaacctgcatgcatgttccattcatcctgcttcaaccctctcccactgccaggccacttggccagccttgttggaagtgttcaggcagcctactgaactcttgctgtgcttagcttgggctcttcctaactcctccctgatggacaaaagtttcaccaacccattatgttcttattcactgtttcttctcccactgcagagatgctgcctgggaactcgagccaggggctttctcagacttatatcagcgctatcagcactgtgatgcccccatctgtctgtatgaacaaggcagagacagctttgaggatgaagggtaggggaaggcttctggctagaaagagctctcatcagtgctatcttagagttagaccttggcacagttattagaagtaagaaattcactcttgtatgcagaccttaggataaacacgattgctaagtctcattcttgaccagcccgactcacttgtgtgcacgtgaacacgtctcccctgcaaggtccgcttcaccttgtgcccagtggagagacattcagagccaattcctttcctaatctacctttcaaggggttacgactgatggcaggcttctgggatcagcactcatc

SEQ ID NO: 105986 - DNA, 1062 bp, Homo sapiens
aattgtattggtatttctaatgctaattggatttaaagaggccaaatcccaggtgcactagtttggtcactgattttggtactactgcagggaggggctgtgcaagtgctgacaagcgcctgccctcaagcttcttgccttggtcttacataggcacagagcctcttagtctgtggttgatgtgcttatgtttttttacagctcgttgcagagagaaagattgataaaaatctgcttccgcccaaaaagataattgggaaaaactcaagaagcttggtggagaagagggagaaggatctggaggtctacctccagaagctcctggctgccttccctggcgtgacccccagagtactggcccacttcttgcattttcacttctatgtaagttcctcatcgggttttcacctgtgcctgcaaacccacaactgccaaacttgaggcagcaaaccaggggagacctcagctttgaggtgggctggggtttgaccctaggttagaagatggaggaacgtcaccctggttaggaatgcattgtggccagaagcatgttagttgacagatttgccgtaaattagactaaatgtggccacagagatgctttcctccaccacaaggcattttgtttagcaaaaatggcctgtgggtgtttaagctaggtttccatccagatggatgaggctggattagaaatagctgacacctgggatagactattgttgagttgttggtgcatagcccaaaactaattaagggattagtctgtgatggtggaatatcaccatcttggggcgtgtcatcagggtccgcgctgccagggtgctaaggttgagggtggacaccttcctgtgatgggagagtgtgtcatagaacagctctgtactccgtccttgaaagaggaacaactttcataggttgccggtgacagaatgcgttgtcagactttaagaagggcacttaggcagtgtgaaaccacaatatttgtgcttttgagacggagtcttgctctgtcacctaggctggagtgcagtggtgcgatctcggctcactacaacctccgcc

SEQ ID NO: 105987 - DNA, 1144 bp, Homo sapiens
tcagccttttctccaggctgggagctctctggggaatgtttctcttaacttttatactgtctgtatcctctctgaaattgttccacatgtgttctgcctcttgtgttgctgacattggatagggtggacccagggaaccctatttggctatggtgtgaatttttttatttttattttttgagacggagtttcgttcttactggccaggctggagtgcagtggtacgatctcggctcactgcaacctccacctcccaggttcaagtgattctcctgcctcagcctcccgagtagctgggattacagatggcccgccaccacacccagctaattttttgtatttttagtagagacggggtttcactatgttggtgaggctggtctcaaacgcttgacctcgtgatccacctgcctcagcctcccaaagtgctgggattacaggcatgagccaccacgcctggccatggtgtggatttttaaaaattgagatataatttacataccataaaattaactttttaatgtgtacaattcagtagtttttagtatattcacaaagttgagcgaccatcaccactatctaattccagaacatttcatcagcccaaaaaggaacctgtacctgttagcaggagcttcccatccctctgtcccccagcccctggcagtcactaatctactttctgtccttatggatttgcctgttctggacatttcatataaatagaatcatacagtgtgtggccttttgtgactggcttctttcatttagccttatcttttcaaggtccgttcatattgtagcatgaatccattggtccttttatgacggagtaatagtgtattatttggatatgccacattatgtttatttattagcagttgatggatgttaggtttgtttccatttttggccattgcaaatgatgctgctatgagcatttgtatgttaatttttgtgtgaacttatgttttcatttttgttggatatatagccaaaagtggaacctgagttatatggtaactatgtttgactttttgagaaactaacaaattgttctccacagttgttgcaccatttgacgtttccatcggcagtgtataggttctaatttccccacattcttgcttaacacttcttgtcc

SEQ ID NO: 105988 - DNA, 1350 bp, Homo sapiens
gggaggctgaggcaggagaatctcttgaacctgggaggcagaggtggcggtgagccgagattacaccactgcactctagcctgggcaacagagcaagactccgtctcaaaaaagaaaaaaaaaaaaaaaagcaggttgtgctgatgcacacctatagtcccagctacttgggaggttgaggcaggaggattacttgggcccaggagttccaagctgcagtgagctatggtcataccattgcactccagcctgagtgacagagcaagaccctgtctctatttaaaaaaaaaaaaaaaaaaagcagttatcgcttttcctcttgtaggatgttgggaggattcaggagccttcagtggctcagggcatgacccagtatgaattaggatccaagcgtgttgtttgtatgactgggggcttggccttgtcctgcccttcatcacatcatttaaaaaggaaatccttcccgcttctttcttgggaccctggggctgagtgttactgttgtgaatctggaagggatgaacacaagaagaaaacaagtgttcactcttttcctgagacacatttgaaacgtgagaggaagtggaaatggtcattcccagggagggttagctctgggtggtccttcatcccaccagggtgataagagcctctcttccagaaaaaacaggacttttctctctgccacaccctctcctaggaacacccagagccagttttgggagctgctggcttcccaaaagcccttagagtaatgcagctctgctggcctcctgggctacagtgcccttggccctatggactggagtcgcagcattaggctgatttcccttctgctttggaggagacatttcaggtatccacataactagaatacttagtttccctttctaagcttcttgcttcattgtaggtttatgccctcctttctttagtttaacttcctagagagatggcactggcacaacagaggggatagatagcggggaatgtgaccccagggactggggtcaggtggactttctaagggcaaattttgtgttctctgcaggagataaatggcatcaccgcggcactggctgaagagctctttgagaaaggtatgtggccacatgtccctgaaatactgagcataagttgtgtagttttatgaggcggccagaggcacaggatggcatagaagtcactctggagcccacctacctcccctgtaggtggccaggtctgaggagctgtggtccttcagtactcttgagtaccatgtcaggggctcagcccagacttgggctgtgttccaaagcgctgtggtgggtgctggaaggtgggtagcacactgctccctcgcacctg

SEQ ID NO: 105989 - DNA, 2385 bp, Homo sapiens
gcagctgtatgccgtcacggagcagctgcagcagggaaagcccacgtgcgccagtggggatgccaagaccgacctcgggcacatcctggacttcacctgtcgccttaagtaccttaaggtaaagctgcagcagctcagtcatggagagccccgcagtcggtgggggtgcaacctgcgggggactggctggcagtttgtgtgaaggagaccatgggggactgttggtggaaggaaggccgcccggttattcttggcactatgcttctggctgtgggcaccagggggcggtcgtgacccagtgtcccgttaaattaagtcctggcctgagcctgctttgttgaagacagaagtggtcaaagttgtcttcaacttgtcagctgctgcagcactccccgatgggcatgcgacactgttcccaatttaagccttatctttggcttcaggtttctggcacagaaggaccttttgggaccagcaacattcaggagcagctcctgccgttcgacctatcaatattcaagtccctgcatcaggtggaggtaaggcccagcgctgcacagcatcctctcgctcccaactcagaggctagagagtgtttgtgatgttgggtgtcctaatttaatcataaggtgctgtgctttcgtgtttggcagtatgtgacaggttctgcgtaggtgaccaggccctctgaaggcggagaaagagaggcctctcctgtccctggctggtctgcacacaccttccctggcgtgagctgcaggggcggttagccagggtggagcaccagcacctggctcattctaggactcctcataggggcagggggcatgtgtacctcaagttcaagtcctgggaagtcatcctgggggtcagacagaactaaatacaagtctgtatttcccaaggccgattggcaaagagctttgaagatgccctgccctctggggcacccacacaagaaacactctgcatctgtcactactggactctttggtttgcgatgccaattttagcatttttgaaaagaaaagtcagtaatgaatacaaaaaaagttttaaagcataattttttgagcatggcttttgtgttctgccctgtggccccatgtctccttgattgaatcttcccaacagccccgtgaagagggcacttttatttccattttacagttggggaaactgaggcttgggcagataaggaagtttggccagggccacacagttaatgagcggaaacctgggatttgaattcagctgagactgcctccagagcctctgctgtgcactgggctgttccgtctacagtggtctagggaaacttgtggtgtgccctgctgccgattgaggacagggaagtgaaggggaaacccgacccagccctgccaagcaggctgaggctctggatctgggtcttgggtgtgcttgggcaggtggcttggggagtgtgctttgacctgtggcctgcccctcctcaccacaagacagctcagttccatggagtgggggctgggtgaacaggaggatccaccccactcgctgtgctgtggaggccccttgttctccccagcagtttccatgacccacactttatgttcacctgccaagccccaggcagcccttacagaggaaatggaatttgtggtccattgtgagtctgaggggccaggcacctttcttactagatacttcagggaatgtttggtcggcactgacactgggaaaaagagacactttggtcttgagtggcctcccatctctgaggatttgggttgcctgtcattgtgcttttgtatgggggtaggaaacacctgcatctggggacttctgacggagcaaggattctgtttctgagatgcagctgttctttgttccagataagtcactgtgatgctaagcacatcagagggctggtcgcatcgaagcccaccttagccacgctgagtgtccgcttctcagcaacctcgatgaaggtaagcttcacctatatcctgcctggggcaatgtctgtggatcagggtcctgggctgtggtctccaccactaaggatgggtgaggacactgctatgtctatcagtattcagaggctggaccttctgtggggtaggcagacactcatggggggcctcccagcacttgacagcccctgggacactttagttcacatctgcataaaaagttcgtgttgttaacaggacattttaaggaacttggcttctttccccaaaaaataaaaaatgtcattggtgtttttgtgttgttttgtttttgttttgagctagagtcttgctctgtggcccagactggagtacagtggtatgatctcagctccctgcaacctctacctcctggggtcaagcgattctcctacctcagcctcccaagtag

SEQ ID NO: 105990 - DNA, 2933 bp, Homo sapiens
aagacagaaggatggcttgagcctgcgaggcagaggtggcagtgaactgagattgcgccactgcactccagcctgggtgacagagcgagactccatctcaaaaaagagaaaaggctagaaaaggcatcaccaggtcaccagggcaaaggccctttgggcttgaaaagcattgctcctaaagcagggccaggacttaattctaagtggctgttatgtggtaaattgttcagctttgaacgatttcacaatcgtttaaagacataggaaccaaaggcatgctttaatgcaagtttacttccacatgctaaatatgctccagcccttccttaaattctgcaacgactgtgttcccagtgagtgttgcgtgagggcccgagtgtggtgctccacacagatgtttttatgcaggaagtccttgttcctgaagcctcagaatttgatgagtgggagcctgaaggcacaaccctagaaggccctgtgactgccgtcatccccacttggcaggcattgaccacgcttgacctgagccacaacagcgtctccgagatcgacgagtctgtggtatgctctcagcagcaggtgccaggggtttctctggccccaccaaaccctgagtttgagtatttaactcagcttttttaggaaggaccacggaaaacctatatctagtgctctgtgcattgcctgccattttaagttaattacaaaatgggggctgggcgtggtgggtcacacctgtaatcccagcactttgggaggccgaggcgggaggatcacttgaggtcaggagttcgagaccagcctgaccaatgtggtgaaaccccatctctactaaaaatacaaaaattagctgggtgtggtggtgcacacctgtaatcccagctactttgggaggcttaggcaggagaatcgcttgaacccgggaggcggatgttgcagtgagctgagatagggccactgcattccagcctgggcgacagagtgagactccgtctcaaaagaagaaaaaaaaatgggatcatttaaaattggtgaggtagtacttagaaccaaataaaacataataatttcatgtaaatttggtaaactataacacactaaatgatgacatttgctccaaagagtggagcagaaaaatcactccttagatgacagatgtgcccatgaaagaatgacacccagagggcatttgggcagtaagagtgtcgttcccgtgtttgcgctgctcagggagtgtgggcagggttgaagaagaacagactctcttctctgtctgggaccttgctgtgtgtcattttcacaagccaagtgttccatgaaaactgagtagtgcccagcactgggggccctgtgtgtgcctttggatgtgctactggctgggcagcgggagatgtcccaccagtggtcctgcagggacggcccgtgggagtccatggtcgggaggaagcgtcctggggtgcccgtccactgtgtcggggaccgtgtttggggtccagccccctacagtaacatcgggtgttcttttctttcacaagaaactgatcccaaagattgagttcctggacctgagtcacaatggattgctggttgtggacaatctgcaggtagtgcctttggagaccagtgctgcccgcacacactcccaaggccccgccctgagatttcaggagactgacgcagccttgggaattggccaggggttgtaagggcaggggttgctgtcttcgctttaggatcccagcaatgcactgagtgattgttgctctagttccaaagaattaggaagcatgagtaaatacaaaccaggcatgatgatgcacctccgtcctgaaggtggacagccatgttttcaacgcccaccccaactgtctgcaggggtgccactgtgctgtggcatgtgcggcagagaagagggacttcccttcctaaaataactgtcagagtgacttgcagaactgggtagtttgggttggaaggcccatcctgccattagtgtcaggcccctatctttggagacttgacctgagccactttacgctgttctccacgccgctgcagcacctgtataaccttgtgcatctggacctgtcctacaacaagctctcctccttggaagggcttcacaccaagctggggaacatcaagaccttaaacctggcaggcaacctcctagagagtctgagtggcctgcacaagctctactcactggtcaacctggatctccgggacaacaggatcgaacaggtgagcccaaggacctcacagttttgggatttctgtgccttggtgtgtatcatgttaaagaagaatgttaagattcctttcatttaaaagagaccatgaaacgtgttggcgtgttgctgaagtgttaagagaagggaccaaaggggatggaactcataccttgcagatggaggaggtccggagcataggcagcctcccgtgtctggagcacgtgtctctgctgaacaaccctctgagcatcatccccgactaccggaccaaggtgctggctcagttcggagagagggcctcagaggtgagccccagcacagtcagaagagcccagggagaccttcgggatgcagtcaagtctgcatgggcggtagggggatatatgtccattgttctacccttgcctgcttcagaaagaggtcctgtcccttaggggcttttcagttctgggaagtccactatctccccaggaaaaagctcccttgcatctcctgcccctactgtctgggataacattgtttattctaggaaagggtcagaaataagatccttaaaatattcatatctcctggacaacctgtggccatagtgcctgactgtaaacccaaagggtttgcctttgccagtgtagcccagcctggtgtctgctgcccctcgcggtgtctgtgcacctgccacgatgctgaccagacaccctt

SEQ ID NO: 105991 - DNA, 2903 bp, Homo sapiens
catcagacccagcagctcccctcccactgtggctcccgcatctgcctccctgccccagcccatcctctctaaccaaggtaatcgtgtatgtatcttgcttctagtggagccacacagccctgcctgggccccctggctgggctggggttgggggagaggtgccagcacctgcttccaacagggtcagacacagggagggcagtgccttctgcaggctggtcctcgcggggggacacatggcaggggtgcctggcctgatgccagctgttgcttgcttggtgaggactcccaattgctctgatgcccacatccagctcctctaggagaccgcagggtgtctgacaggccctgaggctgccctctgaacaggctcggggctgttggctcatgggacccattccctcaccggcagcacaagcaggttggctcctggttacaggaagccgggcttgtgactttactgtctggagcccgaatccctgtgcagggaaaagcttgcttttatcactgcctcatctctgtggggtgacccagccccagaacaccatgtttgtggggccaagatgggccatctctgtccctgtggacccatggaagaccaggcccattcgtctgcccactatcttagcgttttcaaagggctttcacctctgaacccaggcatcctcggagatgagtgagtgaagcaggtctcatgagcgtgtctgctggcccggcccccacggaagaggggagggtgtgccgtcccgagtggagccgaggctcgggacacgcaggaaaggacgccgcctgcccgggctcctggagacgcagaacttggtgtgaggtcttgggaaaacagttcaacccgatgttttaagagccagaaaaacattcccaccccttgacctggtaaccccactggtggggattttctcttagagggataagataccgggaaggggaggtgaaatgctcaccactgccaaaacacgggctgcaactgcaacatcggaggatgagagggagagtcggctgtggtgcagaatgctcagcagccctcccagcagggacaggaagactgggcaggaagaggggagaagcattcaagttaaggcaaaaggcccaacgcagagcagcacactgaggtcacacctgtgagatgtggaagagaattcctgagcgtggagcgatggggttaggtgccaggatgattgcccattttgcttctgtcagactcttgactaaggatttctggttgcattttattacataaaagccagggaggttatatcacggtgagaaagcttccctgacgctgcctcctgtagcgcagccaagcgagcctgtggaggtaccatatgactgtaggcctctggggacagggagctgcatctgcttctcaaggccagggacacagccatttctgccagcatctgttgatcagtgagtgagtgagtgggcaggtagagcaggagccagtgaagagcaggccctggatgggtggggatgcaccatgtccccaggctgcagctgcaggcagccccccacattgtcggagaagcctctgcaccagctcagccccctcctcactccccttgtgccctggggacactctgcagaggggcactctgcagtctgtccccgccatcgctggacttctggacatggcctccagatttgcacctcttaaataaaactgcagtggatgtctttgtgtgcacctctctttccttttggtgagaaacagcaaagatcggacccctaaggactctcctgatgtctccgctctatccgctgagtgccctttctgaccacttgtttgtacaggccacggtccaggacgggagcagatagactgtccctgtccctgtccacatttccttggtccaaacagggcttgtgggaggtagtggcaaaaggtgttggtctttttctcactgatttggaggcctccccgtgtgttttttcagccgcgtgttcctgggtcttgcctggatggacagggttttttagcgcgtgggagcagctttgctgacccatgcctgttgcttccagcctgattcccgagaagggagcctgcttgcgaaggaactggcactcgggcctgcctgaagggggcgctgtccagacaacacccagcctcccgtcgtggcaggcgctgtcggagccatggatgattgtgaccaataggggtggtcgccagagttgattgtccagccaggcccaggggctgagaggaggctgtgtggagaggtggttaggagccagggctcggtcagctgagttcgcatgccagcttcctagctgtgggacctcaagcaacttgtagcccctctgaagctgttttctcaactgtgaagtggacgcaccctacttcattgattctaagaggcacgcatttccaccttgtgacttctctgaaactgaggtgcgtctttcagtcagtggcgtctcatagtcgctgtcagccagctggtattcgagatggagtcgtggaaaacccgtggacaccttccgctaggaccaagatggcgccacctgccgcatcttagatttgatgaaatgtggtaaataacgagaggcatgcatgagcgaatgctggggaggcgcttggcactacccagagctccacagaggtggtcgatgagggctgccctttcccacatccttagtagggggttcaagatgacccagactgtgcccctggggagcttggagccatgcgggaggatgagccatgtgctggaggagaacagggtaggatggtgtggggcttttgtagactgtctagagcagagaaggtctgcagtggaggtggtgtctgaggtgaatctcgaaggtgaataggagttgaacgttagcaggcagagggtggattgcaggagagcagcggcctgggcaggtgcccagcgtggcccatc

SEQ ID NO: 105992 - DNA, 1582 bp, Homo sapiens
cgtgggggcgtttgagcttgggcccacctgcctgcctcgcttgtgggcagaggacccaggctgtgtgagttgtcctgtcccggggagcagctgagctggtcgggggtctcgacctgtggggctcagaggactcggggtcatttcactgggctgtggcgatgctgggctgtggaggtaggcctagggctcctgtaggcctcagtgagactggcggccgatgcccagtgttcaccctgctggcggcagtcaggaacatgttcacaaaggctttaccttcaagtggtctagaggtgatctgaggtggagtaacaggtccagataggctacgttcataaaacagcttcagcggggtttaggaacactgtgcatttacgggacgcagtgggtcagagtgctgctgtccgtgggaggtggccccagggcaggtcagtgggcacgtcctgtggtaagtgggactgtggatgtgggctcaggctggactcagcagccctgctggataccaaggcctgcaagggctggccccctggtgaattgtcccgtgccctgtgtatctatgagtcctgcagagatgacaaatcaggggacggggtcatgtctagtcaccgtctgggaaaatgctccaggagtgaacacatttcaggctcttgatggatgtacctccaaactcttctctggatgggtgggccagcttgcatgcctgtgccggcctctgcccagcgaggtcagggccaggccacacagtcagtctgactttggcagaagttgagaggcaacacttgtctcttgtttcagcttgcctttctttgtgtacttctgagagcgagcattcttttcatgttctatccgctggccgttcttctgcggaatgtctgttcacgtcctttgcagtctgttaatgaggtttccaaccttccctcatttttgtaatctgtaagaactttttacagactagcgatataaatccttgtcaaatattgcaaacacttttctcatttcatctggttttaatctatcctggtttttaaaaaatgtgtctgtggaagtttaatttttatgtagtcacatctcagtttttttccattgcatttattctcagaatgcttctccctgccctgagattagataagcagtcatttgttctttcttgagttattttgagatttcagttttaacattttcttctataatccatgtggctgggttttgggatctggctaacccccgccatgccagtagcctgaggggcccagccccacttgttgaacagccgctctccccgccccacccaccctgcctgcctgcccacccgccctggtctctccaggaatcatgttcgttcaggaggaggccctggccagcagcctctcgtccactgacagtctgactcccgagcaccagcccattgcccagggatgttctgattccttggagtccatccctgcgggacaggtaatgccctcttcccgcttctggggaccatacatctgtgggtggactcttctgcttggggttgtgtgcagtaggaagtggcctagctggagctgaggcagatgcttccagggtttggcgtcctctgctttgt

SEQ ID NO: 105993 - DNA, 2005 bp, Homo sapiens
cccacttccctgccccggaggccaccaggggtgacaagtagattcatgccctggagtgttccttctctccggggcttatggcagcaactgaatgacttagaagtccatgggagtgcttctgttgtgggaactcgtgtggtctgggcatagctgtgccaggcacctatggtccaagcccctagaagcatagactctgaccaaactggcgacccagccttccagcaggcagcactggctcccaccagggccctcatcctgggaactgacttggccatgtgggaggcttgggagacccatgggttggtttctcagggtcagggtgtagcagtgggctccagatgtggcaggtgggaggtgggaggggcccctcccagcatgccactgacctggcctctccctgcacagcccagaacatgccgagccggaggtccaggtggtgccggggtctggccagatcatcttcctgcccttcacctgcattggctacacggccaccaatcaggacttcatccagcgcctgagcacactgatccggcaggccatcgagcggcagctgcctgcctggatcgaggctgccaaccagcgggaggagggccagggtgaacagggcgaggaggaggatgaggaggaggaagaagaggaggacgtggctgagaaccgctactttgaaatggggcccccagacgtggaggaggaggagggaggaggccagggggaggaagaggaggaggaagaggaggatgaagaggccgaggaggagcgcctggctctggaatgggccctgggcgcggacgaggacttcctgctggagcacatccgcatcctcaaggtgctgtggtgcttcctgatccatgtgcagggcagtatccgccagttcgccgcctgccttgtgctcaccgacttcggcatcgcagtcttcgagatcccgcaccaggagtctcggggcagcagccagcacatcctctcctccctgcgctttgtcttttgcttcccgcatggcgacctcaccgagtttggcttcctcatgccggagctgtgtctggtgctcaaggtacggcacagtgagaacacgctcttcattatctcggacgccgccaacctgcacgagttccacgcggacctgcgctcatgctttgcaccccagcacatggccatgctgtgtagccccatcctctacggcagccacaccagcctgcaggagttcctgcgccagctgctcaccttctacaaggtggctggcggctgccaggagcgcagccagggctgcttccccgtctacctggtctacagtgacaagcgcatggtgcagacggccgccggggactactcaggcaacatcgagtgggccagctgcacactctgttcagccgtgcggcgctcctgctgcgcgccctctgaggccgtcaagtccgccgccatcccctactggctgttgctcacgccccagcacctcaacgtcatcaaggccgacttcaaccccatgcccaaccgtggcacccacaactgtcgcaaccgcaacagcttcaagctcagccgtgtgccgctctccaccgtgctgctggaccccacacgcagctgtacccagcctcggggcgcctttgctgatggccacgtgctagagctgctcgtggggtaccgctttgtcactgccatcttcgtgctgccccacgagaagttccacttcctgcgcgtctacaaccagctgcgggcctcgctgcaggacctgaagactgtggtcatcgccaagacccccgggacgggaggcagcccccagggctcctttgcggatggccagcctgccgagcgcagggccaggtgagatcaagcacagctctcaggggccccgggggcatgggtctggcatgtgtgtgatctcagcatctgcggctagtgtgggctgggagttgctgcgagagctgggccccctccccccctgcccctcgccccccccgggcctccctctacatcaccaccccaggtttggtgccaggctgctccttatctc

SEQ ID NO: 105994 - DNA, 2284 bp, Homo sapiens
tggcacggccagtcctgagggcgaggccaagcttggcttcaggtcagcctcaggtccctggacttccctgatgtcggagtcctcagctgagctgctcacagctttgaggacctgggcagtgaggtcctgagttgccctcccctggccatttgtgctgtgtcaccacctcctgtgccacttccagccccaggtagacctcccaccaacagccatctcccacccctctcttcctctctgccttgaagcatacggattcattggtgagccaagaggggcttcccatgtctccttgtggaagctgtgggcatgtccctggtatgtgcaggttgctagggtggtggagctgacaggaggccccccgtcttcaggttgaaaacgaggagctgaggcacctcatgtggtcctcggtggtgttctaccagaccccagggctggaggtgactgcctgcgtgctgctctccaccaaggctgtgtactttgtgctccacgacggcctccgccgctacttctcagagccactgcagggtaggcacagggcctgctggggctcaggagcttggagtgtgtggttggggcaggcctggggggtcattctctggagccagctgtgtggcttcaggcagcagtcagcgacttggctgcagtgggctgagagttccttgtctgaggaagggagctgtcatgagggaggggtccatggccagatgtgaacgcagaatgcactgagccagggcctggtgactgcttgggaacagccagtgatgagaaggggttaggcagcctttgcccctggggctgcacaggaagccctagccagcgacctggtgactcccctgagctggaagaggctccgactccagagggcattgcctatggggctttgcacgggtggaagccaggccagccaagaggacctgttcctgctggatgtgctgcacacctaggaaccttgtgcttgcctgccaccgcctccctctgtccctttctccatcacacagatttctggcatcagaaaaacaccgactacaacaacagccctttccacatctcccagtgcttcgtgctaaagcttagtgacctgcagtcagtcaatgtggggcttttcgaccagcatttccggctgacgggtgggtgaccctctgtgctttgtcctatttcgggtgaaggccagcatcaccagtgggcttccaccttccgtacgtgggtgggttatcatagacagttatctctgtgctcaagagccacttcttaaccggggtgggaggaagcagcttcaggaactgctgagagagcagaactcacgctccagggctcagagcaggaggtagggtgtgcggcaagcgctggcccggacagaagcagagtgggccctggtctcgggcaggatgtttctgactcacatttcctgaggagagaaagctaagctctttgcctaatgtctctgtctccccttccagaaaaatgcctcagctcttccggcctgaaggaatggcctcctcccgggccccatgattctttcctgtgtgggccctcctggccctggcctctgggctgaggcttgctagggactcggggtggctctaaggggcagggatagggctggggagcgccggcctgtggccctgaccagccccttctcgtgcaggttccaccccgatgcaggtggtcacgtgcttgacgcgggacagctacctgacgcactgcttcctccagcacctcatggtcgtgctgtcctctctggaacgcacgccctcgccggagcctgttgacaaggacttctactccgagtttgggaacaagaccacaggtacccctgtctagctcaggctgcagacaggctgcctggacagacgtcatgggccccagggtggctctctgtgccccagaaccctctctgcctctatgtctctcttttctcacttagctggccagggttttatgtggggcttttcgatggcagagtctccactccagcagtccctcaaccatctggcagacacatctccagtgcctgctttgggctcctggcctgtgggccccacacttggagcatcctctcctgcctgtctcatgccggggtctctcggttggcttggggcccttggtgctcccagccccaccaggggccggttccaggctatagcccaggtggcatctctctgcagggaagatggagaactacgagctgatccactctagtcgcgtcaagtttacctaccccagtgaggaggagattggggacctgacgttcactgtggcccaaaagatggctgagccagagaag

SEQ ID NO: 105995 - DNA, 1186 bp, Homo sapiens
tccgggacctggaccgagtgctcatgggctaccagacctacccgcaggccctcaccctcgtcttcgatgacgtgcaaggtcatgacctcatgggcagtgtcaccctggaccactttggggaggtgccaggtggcccggctagagccagccagggccgtgaagtccagtggcaggtgtttgtccccagtgctgagagcagagagaagctcatctcgctgttggctcgccagtgggaggccctgtgtggccgtgagctgcctgtcgagctcaccggctagcccaggccacagccagcctgtcgtgtccagcctgacgcctactggggcagggcagcaggcttttgtgttctctaaaaatgttttatcctccctttggtaccttaatttgactgtcctcgcagagaatgtgaacatgtgtgtgtgttgtgttaattctttctcatgttgggagtgagaatgccgggcccctcagggctgtcggtgtgctgtcagcctcccacaggtggtacagccgtgcacaccagtgtcgtgtctgctgttgtgggaccgttgttaacacgtgacactgtgggtctgactttctcttctacacgtcctttcctgaagtgtcgagtccagtcctttgttgctgttgctgttgctgttgctgttgctgttgctgttggcatcttgctgctaatcctgaggctggtagcagaatgcacattggaagctcccaccccatattgttcttcaaagtggaggtctcccctgatccagacaagtgggagagcccgtgggggcaggggacctggagctgccagcaccaagcgtgattcctgctgcctgtattctctattccaataaagcagagtttgacaccgtctgcatcttctaaaccaagggtcactgggatcccagcagggcttccgtccagggcgtggtcacatgggggagggagggtgccctggagacaggagggtgaggggttgggggaaaggaaggagcagccctccaggagccagatgcttcttggaacatgggaggcatgacagggccatggcctctctggacagtgccatgctgggctgtggctaaaccatgagcgcagggcaaacaagaaactcctcagggcacccctgacacaccagccgctgcccctctgcctgggtgcggggcatgccaccctcttcaggctgtcctgcagg

SEQ ID NO: 105996 - DNA, 1051 bp, Homo sapiens
gggggaagccagcagctggccaggggagcaatgtggaggtggccaatgcccagcctggcctgcaggaaacacccccaccctctcagccctgcccacttctctgcctcccacccttccgcacccaaactctccacagccctcgggcccaggtgcgtcccttcagctctgagggcgctgctctcccctgccttggcatccagcctcagctaaagagggtcatacacctttgtgagaaacacatgactttcttccctggcagctttcaggcagttctttatgcccagtattctgaagctgctttccactgtgtgttggatcctgcctgtcagtcactaggagtctgtcagtctcctgccctttgagactctttctcttggtctggggcctgcctgggcctctgcccctccacttgaacttagttcagcaattggcttctcccacaccacctgtttcccccagcgcttccacttctgaggcttggaatgcacagactgcttcaagaactgtgcttgctgggtgtcaattattctcgcttttggggtgtggactcctaccctggtggctgctgcctgagcactagtctggtgattcctgctctgggccgctcagtttctgccaccctgtgagcttccccagttacatgtgggcctggctgagtgtctccatctttctctggctccaagatgctggtggccccggtgaggtctgccattggtctgccaggtccctctgcactgaggcaggggaggccagcaaggacttcagggctgcagagccttccctgcagtttctaccttacaaacagggatctaatccctaacctggggtacgtgtgagaccacagggagaaggccctcgaggcatgggcaccatgccaggcctgtagggcaccttcctgcagcaggcagaatccccttcccaagtaggaggggaaagtgacaagaaccagggcccagggagggagcagcaaggccatgggaaagggcagccagcatccggctggatttgggctgcctctggggattcgggagggaggactggtggaggacaa

SEQ ID NO: 105997 - DNA, 2888 bp, Homo sapiens
tggcagcccgatcggcagaggggctccccctcccactaatgttcctgagccccagtcccagctctgggcaaggtagaaaagtcagcatccatggcctcaaccccctagtctggccatacagagccagcccctctgggttggagtcctcagtgcccacatggtatcctcacacataatcccagggaggctgagagatgaggccagggggcagggcagggcagctgagaggagcagaggaggcgctgaattgtggggggccagacagtggtgttcctgcacgggttttgagcaagtgggaggctttgctttgtagagcatcccaaaagcagctgttctggggctaggcggtgaggagttgagtgactgctgccagggttctagcatggccttgtgtctgatggggcttagtggtgagggcctggagtagtcacgggctcagtatacctggtgggctataggagatagtgtaatgtaggcaggtgtaaccatgaggaggagctccagccaggggctctgccttaccctaactgcgtgaccctgggcaagtgacttctctctgggcctgtttgaccatctccagcactggaataagaggtgccattgtggggcgtttctgaggctcacagggctaggtccccacagagtgctcaggagccatagctgctgcagggatcatcatccccatcactgcctccctgcatctccttcctctagacctcctgccccccgaggtctgcagtctcctgaacccagcagccatctacgccaacaacgagatcagcctgcgtgacgttgaggtctacggctttgactacgactacaccctggcccagtatgcagacgcactgcaccccgagatcttcagtaccgcccgtgacatcctgatcgagcactacaaggtgagacgggggtccttgccaccaacaaacccagggcttggaggctggccagacccaccttggcctaagctcagggctgagtcgtggggctcccctggccctcttgcctggcagctgccctgggcaggtggctggattgaccccctggggtggccacccagccagcaggtctggcagggctattggcttaggcctggcccctttcccccggcagtacccagaagggattcggaagtatgactacaaccccagctttgccatccgtggcctccactatgacattcagaaggtgagtggctggacctgtataggggctccctccttggcctcctcttggtatggtcattacccctccgtcccatccagctggggttctggcatgggctgaaagaggctggcttggggccacggtgaaactgcctcctcaccatccgtcctgcctccctggcgcccccagagccttctgatgaagattgacgccttccactacgtgcagctggggacagcctacaggtcagtcggctctgccccaaccccacccccgccccaccctacactgctgttctggctcaggactaccttggactgatggtatcttgggcctgctcaggggcctccagcctgtgccagacgaggaggtgattgagctgtatgggggtacccagcacatcccactataccagatgagtggcttctatggcaaggtactccataccccagcagccagcctgccccatggacatgtgcccatgtcccaaggcagatttggggccctcgtctccagcactgaaggggttggggtcccaaagggtgtctgagacaatggccccctccccagggtccctccattaagcagttcatggacatcttctcgctaccggagatggctctgctgtcctgtgtggtggactactttctgggccacagcctggagtttgaccaagcacatctctacaaggacgtgacggtgaggatgctgggcctgccctcggatggcaggaaagactaagtccagccacagtgggacagccccacctgggccctgctgtaccctcattgtcctccactgcccccaggacgccatccgagacgtgcatgtgaagggcctcatgtaccagtggatcgagcaggacatgggtaagtgtggacagaagccctgccgtggccggcctgagcaggtggcaggactgaccctcacagactcatctgccccattagagaagtacatcctgagaggggatgagacgtttgctgtcctgagccgcctggtggcccatgggaaacagctgttcctcatcaccaacagtcctttcagcttcgtgtgagtccagcccctgtggatggagggacagcagggccagggctctgggtggggagggcaggcacggagccgccctcagactacttgccacctgaaactcctccacacagagacaaggggatgcggcacatggtgggtcccgattggcgccagctcttcgatgtggtcattgtccaggcagacaagcccagcttcttcactgaccggcgcaagtatgggcatggtgggggttgcagggccagggaaggggaatagaggccccaccccaatgaggggactgaagcaggaggccaacctggcccttgcccactgcccaatgtgcttggggtgagaacacccccttgctggcatgggtccacttgagcaggtgggcctttacggaggagggatgggggttgcccggcccgtggcccagccacagactggaagtcatgccctttacctgcaccccaggcctttcagaaaactcgatgagaagggctcacttcagtgggaccggatcacccgcttggaaaagggcaagatctatcggcaggtaagggccatctggggagagcagcatgtggtgggggcatggggcctagctagggccccaggctgtgcagaggcagcctctgaagaagcagcacagctccttggccctgagcagcctcacacaggcaatggct

SEQ ID NO: 105998 - DNA, 1127 bp, Homo sapiens
ccagggtgccgctcctccggggaaacacccagtggggctcgccagggccccggagcgcaagggccgggcggcttttcgcgagaagctccggccgttcatcccgggggcctctggggcgccccgacgcccgggggcgggcgggaggtttgttccccggctcggtctgcaggagctcggggctcctcgagcggctgccggagtgctgggcccccgccgacttccttcggggtcccgcctgccgtgaagccgcggtggaaacgcccccaaccccttgttctcggccaacccttagttggggcgggagagtgctgtggacaaagccagcgagcggcgccgggcggaacgggctcctagggacggccggaccaaaggggacaccggttggacttcccagacacacctcgatgtcgccctggaggtccggccccctctcagcccgggcagcgaaggctgggagaagccaagtcacccccgccccctggagcccagactagggctgcaaagggcacttaacctccctgtccctgctctctccctctgagaaatggcgtgaggaggctgaggccccttcttggagggggccggctggggcgcactagtgaggccccagagctgagagtgctggacatctgcctgcttgtctccgtgggtctagtggggccctgcttctgcagcagacagatatggtttgggtcgtgaccctatcactgaccagttgggtggtcccccagcaagtctcaccctctctcaagcatgaaacgcagtcctggggcctctctgtcccagggttgggtgatgactggaaccaggccaagcagggcaggagagcttccggaggaacccccaggggtgacgtggcttttgttgtctgataaaacaaagtagccctgtctggaagattctaactggctagacaggggttttcactccggctttgtggggtggcggagaatcacttcttgaccagtaaaggcaggatggtaaaggcccctgaggaatggtcattttgaagccttgggcatctgtccaccctcgaggtcccaggttgagtttgtgtctgtggaggggcggcccagcgttatttaagaagtctttgctctgggcccggagaagaccctcagagtatc

SEQ ID NO: 105999 - DNA, 2864 bp, Homo sapiens
aatttttattgcattttactgtacatcacaaggccatttttatatacggacacttttaataagctatttcaatttgtttgttatattaagttgactttatcaaatacacaaagatttttttgcatatgtttccttcgtttaaaaccagtttcataattggttgtatatgtagacttggagttttatctttttacttgttgccatggaactgaaaccattagaggtttttgtcttggcttggggtttttgttttcttggttttgggtttttttatatatatatataaaagaacaaaatgaaaaaaaacacacacacacaagagtttacagattagtttaaattgataatgaaatgtgaagtttgtcctagtttacatcttagagaggggagtatacttgtgtttgtttcatgtgcctgaatatcttaagccactttctgcaaaagctgtttcttacagatgaagtgctttctttgaaaggtggttatttaggttttagatgtttaatagacacagcacatttgctctattaactcagaggctcactacagaaatatgtaatcagtgctgtgcatctgtctgcagctaatgtacctcctggacaccaggaggggaaaaagcactttttcaattgtgctgagttagacatctgtgagttagactatggtgtcagtgatttttgcagaacacgtgcacaaccctgaggtatgtttaatctaggcaggtacgtttaaggatattttgatctatttataatgaattcacaatttatgcctataaatttcagatgatttaaaattttaaacctgttacattgaaaaacattgaagttcgtcttgaagaaagcattaaggtatgcatggaggtgatttatttttaaacataacacctaacctaacatgggtaagagagtatggaactagatatgagctgtataagaagcataattgtgaacaagtagattgattgccttcatatacaagtatgttttagtattccttatttccttattatcagatgtattttttcttttaagtttcaatgttgttataattctcaaccagaaatttaatactttctaaaatattttttaaatttagcttgtgcttttgaattacaggagaagggaatcataatttaataaaacgcttactagaaagaccattacagatcccaaacacttgggtttggtgaccctgtctttcttatatgaccctacaataaacatttgaaggcagcataggatggcagacagtaggaacattgtttcacttggcggcatgtttttgaaacctgctttatagtaactgggtgattgccattgtggtagagcttccactgctgtttataatctgagagagttaatctcagaggatgcttttttccttttaatctgctatgaatcagtacccagatgtttaattactgtacttattaaatcatgagggcaaaagagtgtagaatggaaaaaagtctcttgtatctagatactttaaatatgggaggccctttaacttaattgcctttagtcaaccactggatttgaatttgcatcaagtattttaaataatattgaatttaaaaaaatgtattgcagtagtgtgtcagtaccttattgttaaagtgagtcagataaatcttcaattcctggctatttgggcaattgaatcatcatggactgtataatgcaatcagattattttgtttctagacatccttgaattacaccaaagaacatgaaatttagttgtggttaaattatttatttatttcatgcattcattttatttcccttaaggtctggatgagacttctttggggagcctctaaaaaaatttttcactgggggccacgtgggtcattagaagccagagctctcctccaggctccttcccagtgcctagaggtgctataggaaacatagatccagccaggggcttccctaaagcagtgcagcaccggcccagggcatcactagacaggccctaattaagttttttttaaaaagcctgtgtatttattttagaatcatgtttttctgtatattaacttgggggatatcgttaatatttaggatataagatttgaggtcagccatcttcaaaaaagaaaaaaaaattgactcaagaaagtacaagtaaactatacacctttttttcataagttttaggaactgtagtaatgtggcttagaaagtataatggcctaaatgttttcaaaatgtaagttcctgtggagaagaattgtttatattgcaaacggggggactgaggggaacctgtaggtttaaaacagtatgtttgtcagccaactgatttaaaaggcctttaactgttttggttgttgttttttttttaagccactctccccttcctatgaggaagaattgagaggggcacctatttctgtaaaatccccaaattggtgttgatgattttgagcttgaatgttttcatacctgattaaaacttggtttattctaatttctgtatcatatcatctgaggtttacgtggtaactagtcttataacatgtatgtatcttttttttgttgttcatctaaagctttttaatccaaataaatacagagtttgcaaagtgatttggattaaccaggtttggttgttctgttaaagtggtgtcagatgtttcaagcagatttaactcctgcaagccctgatttcatgctgacaaggttgtatgtgactgccaatttaagagaacaaagctccacagatggagatgaaagtcagtgtccagacctctggttcagggctcgggctgcattaacacagagccaaatgtagtcagactgcagactgaagtgccccacgccacgcctcaggctggcagtcaaggaattcct

SEQ ID NO: 106000 - DNA, 2372 bp, Homo sapiens
acattaattatttaggctgccccttttattaaaatttttgaagtctccaaagaaacttctttaaaaaaaaaaaggtcatttattataattatttgattactatgaaattatctgacaggcttccccaaggatcttctgcaaagaatcctaatcctgcaagatgtttagccaaaaaacattttgtggcaaaaccagtttgagaagcattccaaactctctctcttggaaacttatggtgcatattcccgtatgtgtgttgtcaggcccaagggcctcctctgtccttatcaaggggagtgctaaccttttctcctttcatacagcatgcatattcccatattaaaggctttaagaccaccagtaaataagctgttttatattatctggcattttctgaaatttgaccaggtatttatgtagtacctatgaataccctaaagaactaacattttgcagaatattctttggaaaaccctagtcagttccataagaacctagaactttgtggagctttgatatttctgaccttattgaaagttaagacctactacaccactgagctggaggagtgttgaaaatcaagctcacatgaatattgctgagcgagcagcacagcagcagcagcaaggcaaatggagccagtgctggatggctggttatttagagtgtgagcaggagagagatacctgaagacactgtgaaggtaaaaacactggagtaggaatgaagagagggagaggtgatggcgtctggaacatccttccaaattcaaaggggagtctgaaagtgagtgagaacctagtgaggggggagttatatgactcagcagcatctacctgagacataaaatctgaacttttgatgttttctctcattgaattcaaagcccaaagtttagagtttgggtagccagtccaatattcaatccacaggccttatttttttttttccatttcatttttttgctttcccactttactgtgtcacttgtataatgaaaatactagaatttgaagtggaaccctaggtcgatttttttttttttttttactgctagctcaagtaaatagtttgttcaaatggccttcgtttctcatactcattgtacaaagggtctgtaaactaggacagtcttagtgatgataaggctatgcaggcaactctgtcacagccaagaggcctttgattgcttgactttcatattcttaaaggaggactggagctgtagcttcttgattctctgtaaagccatatgacctcgagctattttccccctcctgaaatcagtggtgttgagttccatgttaaagggtttatgtgtggcagttggagtgtgatatcaggagttagggccatagggttgctggttctctctatccttggacaagtgactgcctgtctcccagcctccatttgcctatgtgatgagtggggggatcttctatttatgaatggtgagacaagaaaccctgtatggtgggagctttggaaatacagcatttcaggagttcttcagtaggggttcagtctgctagctcacaaaaagactggaaacatgatcattggagctcccggctctggagatgcagagtagctcagggccggggagtggggaggtagcaggatgtattctacggcccagaactgccacagcaaatgctctttttgcattttgaatgaagtaagagggattctggaattttcattgatttagggtggtttatggtcagtattgaactgctcagcttcaggaaacctggttctttcagtacattgtccattgctacatacgtgtttatttaattctctgcttctgatgattgtagcctgaagtataatgcatttttttcctttggggtttattaaacatgacttctttgcttcattagaatgtagaaattagttgtttccctaaaaccttctgaaggaggcagtcagctacttttcccttacagagttaattttcttcagctgctaaactccatgacactcgtgatgagtcctcaaatcttagtaaaattgggtacaaagaatcaggaaatatatatagtaagtaacaattgtaccaaaaattataatgggccatggaattgcttcatattgaaattataaataatctgtaatgctattaatactagaataatggtagcgcttctcatcttcagggtgcctcgtgagattaaccatggtggttatgctggtgacgtgtttacataaaacctgtgctttctgaatgtgtgttgcagtcttaacattcttgaaatctttgcagaccagttctcaagatgggataggaaagctggactctaggttaccaagtgaaatcggcccgactcctcctgtgttgagactagtcatctactgttccttcc

SEQ ID NO: 106001 - DNA, 1287 bp, Homo sapiens
ttttttttttttttttttgagacagagtcttgctctgtcgcccaggctggagtgcagtggcgccgtcttggcttaatgcaagctccgtctcccgggttcacgccattctcctgcctcagcctcctgagtagctgggactacaggcgcccgccaccacgcctggctaattttttgtatttttttttttagtagaaacggggtttcactgtgtcagccaggatggtctcaatctcctgaccttgtgatccacctgtctcggccccccaaagtgctgggattacaggtgtgagccaccgcgcccggctggcttctgaaattttgagcagttaaccaaatgtaatgttttgatgcaccataagacctttctgtcttacagtctaccccaaagtctgccaaaggcagtgcaaagaaggaaggctccaaacggaaaatcaacatgagtggctacatcctgttcagcagtgagatgagggctgtgattaaggcccaacacccagactactctttcggggagctcagccgcctggtggggacagaatggagaaatcttgagacagccaagaaagcagaatatgaaggtaaatagagcctaggcacaactgtctttcgaagcaagggggtgtttcaggaatgcacgcgcacagacaggttttactcttgttcttaccacttgcacatgaacttttattttggggactgttccaaatggcacccaaccagtattttagatgctagccttgtcctgactgagcagagcactgcccctgacttggcctctgatcctggtgttgtattttcccctgcaaatttctccaaaatattttgctactaaaaattgcatgatttttttctttcattgagccctgtaagcacacatgttgagctagggaattattgtacaatgatgttaaatataattttaattaaaattcgtctgaaaagggcctcttaaaatcagtgatcttgtgttacagctcttggtaagccatatatttaaacttcaggctgagtctttgctaaagtgcttggtttcctaggtcagtcctggcctatactgtgtctgtattcatagctacttctaaggtatttgggtcttttttataaagctcaactgcctttattttccttttattctaattaaatcactttgggcagtgagctgtcattcaagaatttggtggttcttagccatttagagacaaatacttgagattttttgttttttgttgttgggtttttgtttttgtgggttttttttaaatatcagacatggacttagtaaagaaa

SEQ ID NO: 106002 - DNA, 1059 bp, Homo sapiens
taccaaaaaaaaaaaaaacgaagaaacaaagatgtgtagggcacctgcacacgcatgtgcacacatgtgcgcacacacacacaactataagaaaattattgagaaattgaagacataagtaaatgaaagttatccatcatatttatagctggaaaattcaatattaaaaagatgccagttccccccaaattgatctattggttcgttccaattccaatcaaaatccagcaggtcttgataatttttttatactttattaaatgaagttttctaaactttcatcttttccctgtcttttgggggcttggtaggagctccaagtcaggacacagagataccacctccattccaaagccaccaatcacttttactctttggttgtaagcagaattattattttttcctaatgtctatttttccttctataaaatatggaaaattgtaattatcccttttctgaattaaaaggcctttgaattatgtaaataaaagtgctgtgtaagttcaaagcagtgatagtaattgtagctattttaagctttggaaatgtttctgacctgtttttcatatacatgtttagtaagttgttagctatgaacattcctgttaaggtcaagagcaaaatagggatgttctggctgggtgcgatggctcatgcctgtaattccagcactatgagaggccaaggagggcggatcacctgaggtcaggaattcgagaccagcctggtcagcatggtgaaactctgtctctactaaaaatacaaaaattagctgatgtgggcgtggtggtgggtgcctttaatcccagctactggggaggctgaggcaaaagaatcacttgaacttgggaggtggaggttgcagtgagccaagatcgagtcactacactgcagcctagcgacagagtgagactccgtctcaaacaaaaaacaaaaaaagaaaagaaacaaaatagggatgtccttatcacacttatttaacattgttctagaggtactagccagtggagttagaagaaacagaagtctaaaataagaaaagtaaggaggtgaaaatt

SEQ ID NO: 106003 - DNA, 1661 bp, Homo sapiens
cctgttgcacactctcaaagcaccacatatttccttctccttagcgtatatatcacatatcggtgttcattgtgttattgtcaggtttcacccttgtattccctgctcaaatcatagtgcatgaaacatagtagggcctcagatatttgatgaacaagtaaatgacaaaaggatgacagtatggttgaatggcaaacacagcagagtctggtatagggttgggtaggagaggatagtggctaagaacagtagttcattccctgagtcccagctctgttagttgtaggtccttaggtgaatgatttagccctctaggcttcagtttatatctgttcatcattcagtaagcatttattatacctactatttaccaggctctgtggatacattagtgaataaaacagacaaatattctttttcctggggagcttttttctagtgtgaagacaaacaacatcttgaataagtaaagtgtatagtatgttaggtcatgatacgtgccgtagaaaaaatagaggagaacaaggggagaagggggtcccatggtcagagcagggagaatggtttatataggcctcactgagaagtcggcagctgaaccaacacttgaagaaactgagaaagtgaataatgtgaatatccagggagaaaggattccaggcagtgggaacagccagtataaacacctgaggagaaacatgccaggcctgtttgttagtaggagagtgagccattaatgagttagtaagagataagtgccaggggtagggtgcatatcacatagggcctcagagaccattatagggatttgggtttttactgagttaatggagtgccatcgattgtttcaagcacagagtgacatttggtttagatcttaataggattgctctgcctattggttgttgagaatagactgtaaaaagtcaaggcagaagcaaggagatccaccgcctaggatgctgttgcaataatccaggcaagaacaatcatgcttcagaccagggtgattgcaaaagatagtattttgaaggtcaaattaatagtattcttgataaatggagtgtggggtctgagaaagataaaaaagtcaaggatgactcctgtgtgtaagcctgaggaacaggaaggttgcagttaccattaactgaaataagtatgatacttcaggtcaggaatcacgataatatggagcaataataatgtcagctttatgggttagttgtcaagaataatggctttcatcaaattctgaaggggtgaaggggcactagatttttttttttttttttttttttttttgagacattgtctggttctgtcacctaggctggaatgcagtggcatgatcttggctcactgcaacctccacctcctgggctcaagccatcttcccacctcagcctcccaagtagctgggactataggtgcacactgccagggctggctaatttttgtatttttagtggagatggggtttcaccatgttgtccaggctggtcttgaactcctgagctcacgtgattcgcccaccttggcctcccaaagtgctgggattacaggcgtgagcccctgggcccagccagggatattagatcttgaccttcaaaaagattataaaccactgtcttaaaggaatgtctgccactcatgtgatctga

SEQ ID NO: 106004 - DNA, 1026 bp, Homo sapiens
gagactatgtctcaaaaaaacaacaacaacaacaaaaaaagcatgtttatatcacagaggctatgctattcctttccatgttggaataaatcaaaatagtaaaaattttagatctatcagttgttttttgtggtttgttttcttttgtttgagatagggtctcattctgtttcccaggctggagtgcagtggcacgatctcagctcactgcaaactccaattgccaggcccaagcaatcttcctacctcagcctcccaagtagctgtgaatacaggcgcatgtcaccaaagacagctaatttttaaatttttttggaaatgagatctcactgtattgcccaggctggtcttgaactcctggctcaagcagtcctcccaccttgtcctcccagtgtgctggggttatgacataagccactgtgcctggcctaaatcttatcaattgttaatgttaagacattaagggagcccagtaaatgtgatagagaggaagcttgtatagaatttgccccttacactatagtaatgcatgaatgagtctgcttttaaataccgataaatcctctccagtttttttgtttgtttctaaaggcagtgggaattgagagcaggagggagacaggataaaagcatcttgggataatattgttttatgaaaattaactagaaatttcaaatagatacttgataagtcttcgtttatttcaataatctaattgttttgtttcctagcctccttcagagtttctctttatgtttttttgtttgtttgttttaatttacttttttcttgagacagggtcttgctctgtcgcccaggctggagtacaatggcgtgatcctagctcactgtagcctcgacctcctgagctcgagtgatctacccacctcagtctctttgagtagctgggactacaggcatgcgctaccatgcccaactaattttttattttaatttctttcttcagttgagacaaggtctcactatgttgcccaagctggtctcaaactcttgggctcaagcga

SEQ ID NO: 106005 - DNA, 1025 bp, Homo sapiens
aaatgttcatatgttttcaaagagcaattgtaagctaaatggaattatttgtttttataatttaaagggtgtgtatataataagtccattccgtagccaaagaaatacttctaaatctctggtcatttattattttttgttaactgccagaaagtctgtaatcagttcagcttttgtttggttggttggttatttgctttttttttttttttttttgattgattttcagaaaattcacctaactagttttattcttatgccctccccaccccccaggaatactttaagttatgcccagaaaacttccgagatgaggatgtttttgtctgtgaatcacggtattctgccaaaaccaaatcttttaagaaaattaaactgtggaccatgcccatcagctcagtcaggtttgtccctcgggatgtgcctctgcctgtggttcgcgtggcctctgtatttgcaaatgcagataaaggtgatgatgagaagaatacagacaactcagaggacagtcgagctgaagacaattttaacttggaaaaggtatgcagataatagccacacagaaaaaattttacatctcaaaacacctattccagaaaataaatgaataaagtattcaaacttagaaaaagagcaacaacacaaaaccttagccaaacaggaagaaggaaactataacagaaagaaatttacactttcaaaactgtacattataatttaaaagtaaatcaggccaagtgcattggttcacgcctgtaatcccagcattttgggaggccaaggcgggcagatcacgagatcaggagttcgagaccagcctgaccaacatggtgaaacctcatctctactaaaaatacaaaaattagctgggtgtggtggcgcgtgcctgtaattccagctacccaggaggctgaggcaggagaatggcgtgaacctgggaggcggaggctgcagtgagctgagaccacgccactctactccagcctgggcaacagagtgagtctctgtctcaaaaaaacaaaaaa

SEQ ID NO: 106006 - DNA, 1014 bp, Homo sapiens
gaaaaaataagaaaatcagcagggtgtgattgcacttgctgtggtcccagcaacttgagaggctgaggcaggaggatcacttgagcccaagaggttgagggtgtatatatatatatatgaggggggaaaagtagcatgcattttttaggcctcattacactttattatttttgagtattatttctcctgtggataattatattaaactgtagctgtaaaaataagcacagtgctaggttcatgtcatggcagagtggattgatggtgtatttcctaattttgcaaagaatgtgtgatttctgagctggacacagtgacttatacttgtagtcccagctactcaggaggctgaggttggaggaccactttggcccaggaattcaagtccagcctgggcaacgtagtgagacccagtctctttaaaaaaaaaaaaaaaaaaaagtgatttctgttaacaatgattctctttctcttccccttcccccaccccccatttttgaggtgaaaaatggttgtatggctgttggttttaccgaccaaatgaaacattccacctggctacacgaaaatttctagaaaaagaagtttttaagagtgactattacaacaaagttccagttagtaaaattctaggcaagtgtgtggtcatgtttgtcaaggtaagaaactcattaaatcccaaagtctcactcattccctaggaataaaattttaaaacacagaaaataatcgatgtttacaaaattaggaactctgttttaagctattttttaagccgtgtctatatagctatatgaaaagatttgggaagaaattaacctgaacttcgttgtgaaagaccacttgctgcttacactatttggctataatgcagttaggttaagtttttaatattgccaggctaatttttaagtatgatgtttttttaaggataatcattacaaattttcagtttgttttttaggtaataatgtgtgcttttgtgtgtctgtctgatacacacacacaagccct

SEQ ID NO: 106007 - DNA, 1137 bp, Homo sapiens
ttctaagactccattaaatgtgtcatattcgtgtaataacttagtgaaatgaaacacattaagaagcattaaggtggggatgaagtatatcagagattatctctagaattacttgattcgaaacgacatacgtacttctttgtgcctttcgatattatccaaaatgtccatatgatcatatattagtaaggtgatgtttttattctctacatcctttgtgtagttatatattcatttaaattaatgatggttgtaattcaaagatagttttgagtagaggctattaggaatgtgaagatcatactattgctgattcctgccttcgcatgttgcaaatggaattaaatgtattaaatgtattattagtatgtgttgtttgaaccctacatctgacttcagcatccctttggtgagtacctttttcctttatttatttatttttttacctaagaagctgaaaagagtgaagattcctctggtgctgcaggcctctcaggcttacatcgcacatacagccaggactgtagctttaaaaacagcatgtaccatgttggagattacgtctatgtggaacctgcagaggccaacctacaaccacatatcgtctgtattgaaagactgtgggaggattcagctggtaagtttgttttaaatcaaaggacagtttagtgagatatgactgtttgacttctccttgctcctcagggaagaaaattttaactcagacatcttaagcctttccataataattgttcaatatgtcaataaatgtaagtaagcacccatcatatgaaaaacataggacctattgggcaagtgtcacagttgagtcaaaagaaatacagcttctaggtcgggcgcggtggctcacgcctgtaatcccagcactttgggaggctgaggcgggcagatcacaaggtcaggaaatcgagaccatcctggctaacacagtgaaaccctgtctctactaaaaagatacaaaaaatgagctgggcctggtggcgggcgcctgtagtcccagctactcgggaggctgaggcaggagaatggcgtgaacccaggaggcggagcttgcaagggagccgagatcacgccactgcactccagcctgggtgacagagtgagactgtctcaaaa

SEQ ID NO: 106008 - DNA, 1417 bp, Homo sapiens
ttgttgagacagcgtcttgctgtgttgcttaggctggtctcaaactcctggccttaagcagtcctcccgcctcggcctcccaaagcattgggattataggcatgagccaccatgcctggccgctttatttcataaatgaggaaggagactcagaaaagttctgggtatgacatacataatcttttttccatctttcactatgttgcctttgctggttccccagaattacacagttatttctgggaaactaaaatgaacattaactctgaggcctgtaaccattatagaatactttcatggctttgctttaggttccgatattcacagggtctcactagcctaggcaaccatgatgtaggaccaaaaggaagaaaatagagcctattatgtaacacatcggtctgctattaagagaaagtaaaaattcaaagaatagatacgagtaagtgttgaacatattgtggagccttggtacaattcttggttctggcagccaccttcccctgccagaatcgattgatgcgtgtgccatatatctccaagagaaaatacatgaggcctttcgtttttcatgagctgtacaagaagtgagccttgaagtaaaggaaaatggtgggcatggggcttaccatggtaaaatgacactttggattttgttctaacaaacttcggaaagatactcttcatagacctgtacagaaataccactatatcaattaaagaagcatttaatagaatttaacatataattgaggtgtttaaaagaaacagcttgtatgtcaatggatactcttgatgctgttataggacagattcagaaatatatgaagatgcagtagaacttcagcagttttttattaaaattcgtgatgaactctgcaaaaatggagagattcttctttcaccggcactcagctataccacaaaacatttgcataatgatgtggagaaagagagaaaggaaaaattgccaaaagaaatagaggaagataaactaaaacgagaagaagaaaaaagaggttggtttcttttcattttattgaatatgaaaaaatgcactgtcttctaggtgttctcataattagctgtggaaaagagtcctgtttgtatgaatgaaaactcagggtattgactatattagagtagacgcaatgagatggaaatatttttatagttatcaatttggtcatcagacctgggaaagattaaaagttacctgtgacacagctgttatcctagcattccaggaaaagagtcagttaattcacaagtgtgggggcttaatgcctctttatattattggtagatcaaaacctaagcaggccagctagaactagaaagcattctcaacagtgagtccatgaagtttttgccacatcatgcagtagcattgctttcctcatagatactttggacc

SEQ ID NO: 106009 - DNA, 1535 bp, Homo sapiens
tgatactttcaattgagattaaaggcctcaaggtaattattaatgtcctacgttttaacatccgttatctctttttatcccatgatgaaaatctcagttctccaggataccagaggtgatagaatgtcacatagctactcatttgctttattccttcttattcacagctttctcaaccttacagtagtctcccatcaaaaatataattactgaaaacagttaaaaaaaatttttagtacttttttgtctgcaggttatatttcactatagacatgctaattgctagattttacaaattacttggaatcgtcccttgtggttatgctaccatctgtatacaaatttaggttcatttattttattcatttaacattaaatatctctctttaggtaggaagagtggcatttctcctaaaaaatcaaaatacatgactccaatgcagcagaaactaaatgaggtctatgaagctgtaaagaactatactgataagaggggtcgccgcctcagtgccatatttctgaggcttccctctagatctgagttgcctgactactatctgactattaaaaagcccatggacatggaaaaaattcgaagtcacatgatggccaacaagtaccaagatattgactctatggttgaggactttgtcatgatgtttaataatgcctgtacatacaatgagccggagtctttgatctacaaagatgctcttgttctacacaaagtcctgcttgaaacacgcagagacctggagggagatgaggactctcatgtcccaaatgtgactttgctgattcaagagcttatccacaatctttttgtgtcagtcatgagtcatcaggatgatgagggaagatgctacagcgattctttagcagaaattcctgctgtggatcccaactttcctaacaaaccaccccttacatttgacataattaggaagaatgttgaaaataatcgctaccgtcggcttgatttatttcaagagcatatgtttgaagtattggaacgagcaagaaggatgaatcggtatgttttcaaagccatttttattttgaggatatgtgctatttaatacaaaacagatgaaagaatattgctttgatgtactatttccacttacatacatgatttgtagttggtagcatgctattctgaattctaatcagccagaacttcttaagagtgagtatattctgtgggggagagaaggcacaccactaagtcatctagtttaaggccagtgaggaggaagacaaaattgaaaatctcttgaaaagcataaacttaaaatacagcctttcatagaatgtgttttttaaaaagataaatgtttctaattggaaatagtaacagcgtttttcttttaaggtttggcttcagtgcacgaatgctttaaataaaatagctctaaggtgttgtcctgaggttagactgatagaaatttgatcaccattttaagtacctcagagggtttcttttttttttttaatctcaggtttctcaccttaagagcttgctgaagacatta

SEQ ID NO: 106010 - DNA, 1158 bp, Homo sapiens
tttttattttgttttgtttttgtacttggaagtgaggatattataaccgtagagaattgctagttttattgcactttggctgtactcatctttaaacaaaaaatatatctcagttgactatataatttcattttcttttggtatcagagaggatcttatttcaaacattgcatttcatgacatatctaaaaagtttttttggtgttcattaactgctcctgccagaattactgtgttttaactattttggaaattttcctaatatttgcttataacttccagcatggttactgtgtttgtggcatatgtaatcaataaattgtaatcattataaagcaccataaataatttgttttattttgtggtcatccgtatattaagaaaactgaacctattctaatttttccccttttctacctccccctcaacagtaaaaagaacataagaaagcagcgaatgaaaatcttattcaatgttgttcttgaagctcgagagccaggttcaggcagaagactttgtgacctatttatggttaaaccatccaaaaaggactatcctgattattataaaatcatcttggagccaatggacttgaaaataattgagcataacatccgcaatgacaaatatgctggtgaagagggaatgatagaagacatgaagctgatgttccggaatgccaggcactataatgaggagggctcccaggtaaggagggccagcggtcctgaagtaggcacattttgcgggagaggggtacttatagaataatgcattttgagagaccagctctagaggcttaacttagattattctttttggtgactaggttaattgatttttcttcattgtttacaatcagaggcagtacattataaagataaacgttcctactttgtaatctgacatcctagatttgaattttgctctgccagtccctgtgtaagtaatttatccttcctgagcctcaatttcttcatctataaattagggctaataatagtacttgcatcagggttgttgtaggatttaaaagagataatgtatactgagcatttagcagagtgcctggtactgaataagcactcaaaggaaagccaatagtattaaaatctttcatcatcatcattactacgatcctcaacgaccatacttctc

SEQ ID NO: 106011 - DNA, 2100 bp, Homo sapiens
agtactctgtacattccctaagcctgctgtgcttggactttcagctctgtttggcagaaggcctttaaaaatgcatgtgttgaaaagtagatctttcacttcttgcattaaactttattcttagccacactgccccttagaagtcaggagtaccaaaggccctctttgagttggttttacttaaataggacaaccagagcaggatgcttctacagcttgcctcagtgcttttaaccagttagcacccattatagtcataaatgctctgctggtattgactcctcaaccctgtagaaccattttttaacctactctttttgtcatgcaggcttttgttaaaattggttattgaaaatgtttaatgactctttcattttgtacatcctgcatgtgattgtatttttctgagtgaatctgatatgtctagctctttaacattcatatattcagaggagtgtttggcacatgagctcaactcctgagatctgctctgttttaggcaaagaagaaagagcttgccaggagagacgatatcgaggacggagacagcatgatctcttcagccacctctgatactggtagtgccaaaagaaaaaggtatatactcttcttatagctggggacatctcagttcctgttaattttgttttagataagtgaagaaaatatatattttttaagctatcaagttgtaagctttaaataaatggtaatgtgttctcttttaaaattcatttgcaattggatgattagctttttttttgtaaaagtgccatgttacttttagatgacccagatgaaaatgactactacatatgtagcttggcaaaacatgttattccgtttgccgtctgggtttttttttttcttttaatgtggcattttaagaatgccacttaaatctaacttgggtaatttctacatggtgaattacaaaaatgcaatttgaattaggaaaggtaaggagaaatttgatactaccactgcagtgaggtatgccattggtcctaccctttgtttgtccttgttcacctcatctttatttgccattttaagcatgtcagattataaaataacaaatcataacttcttatagctcataaaatgttgagctagatttttggggttttttttcctatataacctttctctcaacttccctaaccgtttctccttctcacgggttttgtggaaggggatcttactgtgagattccaaagctgggatcctataaggaattttgcaatattatctctcgccacacaaagtttctctcgcctgatcattgtggaacactgtattgtcctttaatcatgactgcctcaccatctttgcagcaacagtcaatccagggaagataccttcaataaggaataagctaatcactaatagcaaggcttggcagattcaaagttgaatgaagtctttagtaactgttgacacagtctatacatgcattaagagatccactaagaagaatttaaaaagtagtttagaaaagaggagctgtcctgctttccttcttatagatagcattttggagaattttttaagctttaccatggtaactaaattgatcagtataccctgagatgtgagtctcctccattactggcctatgaatttcatccttccaagttcttaattccttgttataccagggacaatggaggaaaagtgtgaaaccagatcaaagacatcaaatcaagaacaagaacaactttgagtgtaaatatgtaactctactgcagcatcacctgtgttttccagatcagtcacctatcaaagataaaaacttatcaggcaaaagaaggtaatggaggcaaaagtgatggtacaattagtgccaacactggatgaaaagaaagatcttaaattagttgagtattaagaaaacagttccaacgaagcattagcccaggccagatactcgaaaattacatacctgtgtggctagtagtctgtgggacactcaaataagctaaagtttttggccaggcacagtggcacatgcctgtaatcccagcattttgggaggccgagccaggtggatcacttgaggtcaggagtttcgagaccagcctggacaacgtggtgaaa

SEQ ID NO: 106012 - DNA, 1087 bp, Homo sapiens
tcataagaccactctttattgtttataaatactttgcactgtcagtactgtctctttaacccttatgaactagaatggccttttattttcagaaatgggtagatcaccatgattgttcattgaggtcacttaaaacctccctaattttcgtcccttcataaggttcacgtatgaactattaggatttttccattagggttttttccaagtagaatgtttgctttgtaattgtcttctttgctaggtctttactaggtcttattattatttcttatagtgttttagtttattcttttggattttcaagtaaactgtcatattaccttaatgtaatggtgcttttgcctccttactttgtatctcaaaagtcatttttaagttcctaatcagtattaccagtaaagataccatgtagtgcttgtcaagattttgcattggactttcaggaagaatgtttcataattttcatgacagaaaattctagcaatttctttgtctttcacagaacaaaactgaagaatcaagaatatgaaactttagatcatttggagtgtgatctgaatttaatgtttgaaaatgccaaacgctataatgtgcccaattcagccatctacaagcgagttctaaaattgcagcaagttatgcaggtgtgatttattgtttttgctgagtttgttgtatatatgattaaaataattttgcatgttttgagtgtgttctagtaagatgtgtgatcccccccaccctcagcagtaatattacatcatttggctgggtgcggtggctcacacctgtaatcccagcactttgggaggtcaaggtgagagaatcactagagctcaggagttcaagaccagcttgggcaacatagcgagacccccatctctacaaaaactgcaaaaattagccagtcctgatggcacacgcctgtagtcccagctactcaggaggctgcggtgggagggttgcttaagcctgggaagtggaggttgcagtgagccgagattgcaccactgcactccagcttgggcaaccaagtgagaccctgtctcaaacaaacaaacaatatatataatatatatataaa

SEQ ID NO: 106013 - DNA, 1549 bp, Homo sapiens
ggatcacttgaagataggggtttgagaccagcccggtctacatggtaagactctgtctccaccaaaaaaaaaaaagaaagaaagaaaaaaagatgaatctgctattcatgaaattgtaaagaaggaaaaaaaagaagtttctgctagttttattgttgcacctcagactgcaaaaagttacagccacagtgcatgaaaagtgcttcattaatatggaaaaggaattacatttgtggatggaagacatagacagaaatgtgttccaggtttggcaatgttcaaggtttcaggcatccactgggggtcttggaatgtatcctccacggacagtggggcattactgtattataccattagatctttgtctaaatattacttgactaatcatgaaagaactaggaggcattttaacttatatttaattagtgacaactttatgaagatagatattttggaagcttgtagaaatgttggaggatgcagctttgtgggtattgaatggaagtctgctccaagtagaaagagtgccatagaaggtgcccattgcatgagttgggggcattaagctgtccttttatctgttccttttttaaaccaagtaattttatcttgacaggatgcaaattcaattaaaaaaatattttatatgaaaaaggctgaaattgaacatcatgaaatggctaagtcaagtcttcgaatgaggtaggtttaagaaaatgtctaggctgggcgtggtggctcatgcctgtaatctcagcactttgggaggctgaggtgggcggatcacgaggtcaagagatcgagaccatcctggccaacatggtgaaaccccatctctactaaaaatacaaaaattagccgggcgtggtggcatatgcctgtagtcacagctacttgggaggctgaggcaggagaattgcttgaacccgggaggcagaggttacagtgagctgagaccgcaccactgcactccagcctggtaacagagcgagactcggtctcaaaaaaaaaagaaaatgtctaaaacccttaatgcctttatatttgctgagttttctaggtagtgaaatcaataaacattaacacggtttatgttgcatttcaaggtgatacttacagttgatattataattctgaagatagtagtaactcttagcacctttgctgctgaagggcttcatttaactagaaacattttttaaaactttacatcactatatactttgtacaaatattattgctttgtacaaatatgaatatacatatataatatatggtatatattaatattacacagaatagataatagtatggtatttatatataatattagtagtatgtattcatatttttggtaaggctatttagcaggtatcaggagatccagtctcatcctggcttttccttgtactaggactgtgattttttttttttgagacagagtctcactctgttgcccaaactggattgcagtggcacaatctcggcccactgcaacctccacctcccaggttcaagcaattcttttgccttagcctcccaagtagct

SEQ ID NO: 106014 - DNA, 1060 bp, Homo sapiens
gttttggattgagtgagccttaagatatgacagctctagcacacagtaggtactcagaaaatgttagcctctgtgctggactgatttcatattttaccccaagtggttcatgtaactagggggagttttgcttcacactattaaatccactttaaagaattagtattcatgaagcacttagaactgtgcttggcacatagtaagcactatgtgtttgtaaaataaaacttctaccttatttgactttttaaaaattgtaatttatttttatgagaataatgcagctctggttttgttacctatctcaaaaacttacttataaatgggtacagtaataatttataaaaaagaaaatgactttacatgttgttcatatgtgtactttccaataaagtcttggaatatggtgacaatttagaaatatgtggggttctttttttaaaggttgtactgatgaactctcattaaaaggaactgctatattttgttgtttattgtagaatggaagctacaaaagtattcatgcaatggccaaagatatagatctcctcgcaaaaaatgccaaaacttataatgagcctggctctcaagtattcaaggttagttttgttgttgttgttgttgttgttttccttggtaatagtagataatttaaggtcagtaatttttataaaacaactttattgagatataattcacataccatggactttacccattaaaagtgtttaatttaggctgggcgcagtggctcacgcctgtaatcccggcactttgtgaagcctaggtgggtggatcacgaggtcaggcgttccagaccagcctggccaacatagtgaaaccccatctttactaaaaatacaaaaattagctgggcgtggtggcaggcgcctgtaatcccagccaatcgggaggctgaggtaggagagtcggttgaatccgggaggcagaggttgcagtgagctgagattgcactccagcccgggcgacagtgcaagactctgtctcaaaaagaaaaaaaaaaaagtatttaatgtaatggtttttattatattcatgg

SEQ ID NO: 106015 - DNA, 1061 bp, Homo sapiens
aagcgatcctcttgcctcagcctcctgagtagctgggattacaggtgcctgccaccacgcccggctaatttttgtatttttagtagagatggggtttcaccatgttggccaggctggtcttgaactcctgacctcaggtgatccacctgcctcggcctcccaaagtgctgggattgcaggcgtgagctaccgcacccggccccagcctagaattttttaaaacattaaattttatgctagttgcataataacactcaaaataccaagttttaactcctaagtcatgctgttggatagatcatgaagcttcttaagattaaattctttatggttctgatataataaatgtgctgtacagccatgtctttagtcttgaatctcacaaagctgcttcactggttgtttgaacaacagattgtcaatgtacttccttctcttttcattagctgaatagtttaacttattgagcatgcctggttttttgtcttccagcaatatccagattattatgcaataattaaggagcctatagatctcaagaccattgcccagaggatacaggtatgaagatgaccataagtaaatgattgtggtttagagcagattggcctatgatctttcctagaagcttttagaaaacagagaagctagttgtctctgtaaggggttattagcaaatcatgtaaataaattaaaatagtgttactgattgtagctttggattgcatcttaggacaaaaattaaaacacattggttaccgacatttctgattataaaagatacatttgtgacaaaagatttatttcatttttaatttttaaattttttatttttgtgggtgcatagcaggtgtatgtatttatggggtacatgaaattttgatactggcatacagtgcataataatcacatcagggtagatggggtaacctgttgtttatttttatctgcttccaaatagctttaggatacgttagaataaaagctacccacaacggatgttagagtggaaggtcagtggaattagatactacttttttctctttggccctctctaccct

SEQ ID NO: 106016 - DNA, 1025 bp, Homo sapiens
ggcacctcattaggttcatataggttgttctagggatacaatgcctatgtccagcatcagaacattatggggtattcttgaaatttggagttaaaataagtactgcttagaagttgctttctttggccaggcacagtggctcatgcctgtaatcccagcactttgagaggccgaagtgggcagacatgaggtgaggagttcgagaccagcctggccaacatagtgaaaccccgtctctactaaaaaaataaaatttagctgggcctggtggcgcatgcctataatcccagctactcgggaggctgaggcaggagaattacttaaacccaggaggtggaggttgcagtgagctgaaattgtgccactgtactccagcctctccatctcaaaaaaaaaaaaaaaagttgctgttttgaattagctctacaattttagaagctatgtaatattcagcattttattatttctcttagaaagtacttttttctccacattaccagtcttctccagcttacttgaaggagatcctggagcagcttcttgaagccatagttgtagctacaaatccatcaggacgtctcattagcgaactttttcagaaactgccttctaaagtggtaagtgatgcagttaaaaacaggtacatgtcagtgttttgtttttagtacttcaagaattgtattaattactgataaataaagtaagttcaaaaggaagatgttgggccgggtgtggtggctcatgcctgtaatcccagcactttgggaggccgaggcaggtggatcatctgaggttgggagttcgagaccatcccgatcaacatggagaaaccccatctctactaaaaatacaaaaaattagctgggtgtggtggcgcatgcctataatcccagctactcgggagggtgaggtaggagaattgcttgaaccctggaggcagaggttgcagtgggtgagccaagattgcgccattgcactccagcctgggcaacaagagcgaaactccgtctcaaatttaaaaaaaa

SEQ ID NO: 106017 - DNA, 1115 bp, Homo sapiens
ttcaagtgattctcctgcctcagcctcccaagtagctgggaccacaggtgcgtaccaccacgcccagctaatttttgtatttttagtagagacggggtttcaccatgttggccaggatggtctcgatctcttgacctcatgatccacctgccttggcctcccaaagtgctgggattacaggcatgagccactgtgcccggtcataattacttttaatttagcaaatcatttgtcttctgcctcaagtctttctttaatgagataagacctaaataatttgatttcagaatgtctttaaaacatacacttaattttttggaagcgggatttggacccatatatgttttaatcatgaggatgttaaaatttgtaacaatttttggtctttgctgaaacaggtgctttaaaagtagcaactaatttccaatacattactaaagtgtttttttttttctctttgctaacatacagccagattctcctgaatataaagccgcttgcaaactctgggatttgtaccttcgaacaagaaatgagtttgttcagaaaggagaagcagatgacgaagatgatgatgaagatgggcaagacaatcagggcacagtgactgaaggagtaagtgtgtagctggaacttgtgatggatgggctcttggaaggcagagagggcccctgcttgtgattccctctgggctgttgtgggcaactagaattcctgtgcaattgtattggtaactgggaggataaaaggacattcagccagagagccccactccatttttaagggatcctaggatatcctggacaacgtgtgccatgtgtggtaattttcatgaattgtacttacattaatgcatatttcctgctcagttttaaagagaatcttgatattatcaaggattagtccagtattgctacattgagacatcatgtaaggaaaggcagtgttgtgattagaagttggaatgtaatcaccttagtgaggaatatttctgtaggttagaatagttactgttcctagaacctcccaggtgtgtttctgcctctggaattttgcagttgttcttctgcatagaaagtgcttcctttgacttttcccgtgactggctctttttt

SEQ ID NO: 106018 - DNA, 1362 bp, Homo sapiens
agtgtcctttctaggcacatgttctcattgaattctcaattgtctacagatagtccccttagcttgagacactgctggggtcctgcctcagcaaggagcactggactgtgggtcctgtaggcccagatggagaggaccatcttggatattaagttatcagagccctaatgtgtgctgtgagaaggttccttgataccactgacaacatcagtattctttctgctttttctctgatttctcaatattctgatttttttggttgaaaagagttcccatataagtggacctgcacagttcagtggtcaactgtactgtattaacattcacttcctggttttgatggttgagttgtggtccttatttgtgagaaacaaacactaaattatcaggcgtgatggggcatcatgtcagagcttattcaaatggttcagaaaaaaagtactatttttgcaacttttatgtcagaatacaaatttaaaaataatttaaatatattatacgtaataaaagaatggctataacctgtcagctaaggttccaagagagatttaagccttaatcgccatgatgttatttgtaataacttatctcttacacatctagaatggggctgaatacctacccctgtgggagaattgagaaaatagtcacatcgtttttcagtaggtttacttgtctcctggaacttcatttgaagaaagccagaaaaaatactaaacatccatgaaccctaaacccaagaagttattttgggaacttaagaaattgtcattaaaattacttaaggaattaaagaaggaaattacttaattattttaagaaattttgtcattataattacctacaaagtttcttgtgtgttcctcactacccctctcctgcaaggtataaccactaagccaaattttgtatttcttagtcccatggttttttttttccgaagagtttggttgtgtttagatgtatctgatgtccattcatctttgttaagctacgtaagccaagggctcatcttcctcccttgtaattttagtaattgctattgtagcagcatttatgataggcatttgatagtacttggcagaaaaaatttatgtggtcacttactgaagaaagaatctgttttgtaagtttataaagagtattgagacatatctctgttttcacacttttgagcactatgaaaggtaagtcatcttcatttataaaggataccattgacatgggtttagcgttggtgccctaaacattaaacagttagcatataaaagaccatcacaggtgttaatttaggtttttatatcattaacgtatgttttgaaaagggaatgagtgtgcatcttgcttttctttttctttttt

SEQ ID NO: 106019 - DNA, 2133 bp, Homo sapiens
gtgctgactccagaggtggataccttggggcctctgtaccccaggcctgcctgactgcctcatgggctgaaggcttaataccttcagcacactaatgtactgctacatataggttgggaaactctaggccaaatttggagccagaagttgagtcattcaagattgctgatatacaaatgaatatgcttttgttgaatttgtcccatcaaaattggaagtatagcattctggtaagtgaaagactaaaacaaggaagtccagggcttaaaaaaaaaaaaaaacttatagctagttaaactacaacacgttaaaatatcctcctaagtgagccaggagtttggtagcaggtgtccagctgaagacttggtgacagagtctatttaaatgtaagaacatggctgattatttcttatagaagaagttggattccatgggttccaagagaagaagagctacctccccttccagcagtgtcagcggggactttgatgatgggcaccattctgtgtcaacaccaggcccaagcaggaaaaggaggagactttccaatcttccaactgtagatcctgtgagtaacttggattacatggtttctgcctgctcttcccacaattcccctatcttccctttaatggtaaaattgttacgatgcaaggcatctccacttttttaagattctcttgattaatagtcttttcttttatgaacattatgtattcagctaagtcttagagtaatagtgtgatcttatgaataatttcagtatgttacatcatatattaattcagcaaataactgtgtgactatcatgtgacaagcactgttctcatggttgggatatagccatgtggaaacaagcccatttttcacatggaacttagattccaggcgggggaagtagaatgtaaacaagtaaacgaataaagaataatgtatccttagctagtaataagtgctaagaagaaaattttgggtgatttgggctgttttggcctgaattcgctggaagagagttccagacagaaccagtgcagaggggttgggtcagggatgagttttgtgtgtcttggttacagagcaggggatggtcaggaaggagaaggaaactggcaagctccacccattcagagtatgtagggcccacacaagcaatgtttggagtttagattttattctctgtgaagtgataaacccttctgtcagatggctttaagcaagagagtgataaactgatttagtttcaaagaagaaaacccttcaattggatgactttaagcaagaaagtgatgaactgatatagtttagaagacaaaatcaccaggagcataaatctgatgaaagataccaaaaagttagtcaactcagttgtttgaaaggagacatattgtcagcatatttcagactttagcatgtttggtaatattgagagtcatcatttttcttctctacttgccttttattgaagagtagaaaataattcttatgtctacactggctttctgttcacttttttagtgatttttttctcctttgctaatgtgtagattgccgtgtgccatgaactctataataccatccgagactataaggatgaacagggcagacttctctgtgagctcttcattagggcaccaaagcgaaggtgagttcgaagcacatcagtacagttgcgggggatttggtccagagtccatgtgtattaaagtgtttggaaattgagctttttgttggcaggaatggcttaaatgatactggggtccaattttagtctttagtctttagtaatcaagctgtagtgaagctttttttaaattaaaaatctgttgagccaggcacagtaacatgcacctataatcccagctacttgattttttgagccaggcacaggagcatgcacttgtaatcccagctacatgggagactaaggcaagagaattgcttgatccaaggagtatgacaccagcctgggcaacataatgagaccccgtctcttaaaaacaaaaacaaaaaaaatgacctatgcggaaagatctcttgaggccaagaatttgagaccagcctgggcaacatagtgagacccatctctacaaaaaattttttgaaaaattagccaggtgtggtggtgctcaccta

SEQ ID NO: 106020 - DNA, 2045 bp, Homo sapiens
agacaacatcaagctgataatcagaggtggaagacttaggactcctattctggtcttaggagcaaaggtcctgttgtttctcccaccttataacattgcccttcttgtcagactttcaaaatacattttaaaatgtgtcccatggataagaaaatacttgaaaattatccttaagttgaaactttttcttatcttaccaaagtaaattaatgattcaaggatattgggatattgtgtcatccgaacgacatacacatgctgataatgtatttttttgtcatttgattttcagtggattatttataaaagtaattttgaactcctgccaaaatggttggcccttttttttttttttttaaccttgtcaaatttttatatggtgtctccaatgcagataggacttttggaaataaatgttctttctctgaattttttttttgtgggggagggtgttttccagaccttttgctcacatgagccattcttggtttgttccagcttgccaacacttggtgtcacatgtgagcctcccacatgtattcactctccattccagctctgtgattgaactctgctcttattgactagggggcagttgggcaggcatgcctcattcctggaattgacagtcattcctaatgtgagtaaaggggaacctcaatgagacatctttaaacatatgaaagcatttggttttaaaatggaagaactgtcaggtactgttagtgcctgagcctttgcagcagtttgtttgataggtacaagagaactgatatgcctgttttctccagttctctttatctttctttagcagttctatttgaatgttttctatctattcgtactcatttttactccttctgacccttcttttctatttcccccttctctgccttgttcttctttttcagttttgaatatactaacactgaatcagcacttctaaagcccttccttctcccactggcttcacttggctttcagacataatgaggagactggcttttcgaggcgctggttgtgctctggtaaagctggtaaattactgattatctacaccctttcccttttctgtccttccttgactttttccttccacctttcttaaatttttgttatcctttccacaaagattccctccttatgttcatcaaattcacttgtgtctttgtcatagattgtttaaaagggattggtccttaatttatcttaatgaattgagtcctgttgatcagctttttataaaatgaacaaaaatcagcaaaacttggctaagttttggctaagccttttgacgattttaactacttttagccaacttcaaactaataatactgtataacaaaccgaagcctagagtaaggaacatcatcgtggtagattttgttttaaacaccatgtggactttagtttggaaaaagagatctgagacttctctttttccttaattgctcaccaggattttcaaatgtgattcttttgctccttctttctgtttcctggagatccccaacctttctttccatactgctggcaaccagtgttctcctgttctaatcattcagctgctggtgtcgtagtgtcctgaaattcagtgtttccatgtgccttacaattatgaggtactctagttctatgaggttcctcataattgtaaggcacatggaaaagcagatgaggtgctgactcaagaagtgaataccttggggcctctgaaccccaggcctgcctgactacctcaggggctgaaggatcaataccttcagtgttgatgagtgaaactgggatctttttttttcttttagctttagaaaaaggcctttgacgggcggatcacgaggtcaagagattgggaccatcctagccaacatggtgaaaccccgtctctactaaaaatacaaaaattagctgggtgtgatggcacacgccttagtcccagatactctggaggctgaggcaggagaatcgcttgaaactgggaggtggagggaggttgcagtgagcagagatcgtgccactgtactccagcctggtgacagagcgag

SEQ ID NO: 106021 - DNA, 1752 bp, Homo sapiens
gcagagggtggggaagactaggctagattttcgtaaggaagcagcgtctgagccaggtttgaggcccaatattttctttccgtggccacgtgcagactggcccaggtgagagctgagaatcgcctcccagactcagtgttcctctcctgccttatgattcgtgctgtttgacacgaagtggttgtcgttttgtgtctcatacgctgttgtgtatgatcccattctaatattgtgagggtaagtgcagggaattttgactccattctggatctactgaatttaattctctgggatttgaaagtagcacgtatgtttgcattaggcatttcgcattagacttaacgttaggtttggtagccaataacacaagaaaaggatataactccatagtgcgttaacccagaactaatcatttgggttaacagatttgtgatgtgtttctttgtagagttaaagaaagcaagtaaacgcatgacctgccataagcggtataaaatccaaaaaaaggtaagtgtagtgcttgagagagctgtaccaaacacattgctaaactgattttgccctgttcctttgcgggaaagtctgggttaatgtgatttggttttgggaaatggcattggatagactgaccatgggcacaagctcttaggcatcaggagtgcagctgtgagaaagtgcagtgatttggtgataagtctctaaatttgttcagcatgttaatctctgcatagagagccttctagttacaatttcttgctgttttatacttacatatgcattactttgtaagattccaattaaagctccattttcctaggacattttataggcataactaaattgcagccagattggtttctcacttgaattctgcttaagtataaagatatttttgtaagcagacaaaatctctttattttaataggttcgagaacatcatcgaaaattaagaaaggaggctaaaaagcggggtcacaagaagcctaggaaagacccaggagttccaaacagtgctccctttaaggaggctcttcttagggaagctgagctaaggaaacagagggtaagttatgttagccagaattttcattgagtggtgtagtgtgttatgtgtgatatttttcagagtaaggtaacaacactagtcactggttcacctatttcccttatggctctgacagcttgaagaactaaaacagcagcagaaacttgacaggcagaaggaactagaaaagaaaagaaaacttgaaactaatcctgatattaagccatcaaatgtggaacctatggaaaaggtatgattaggtctctttatgaatgagagatcaggggttttgattttggtttttttgcttgggcctgagtgcagtggcacaatcacaactcactgcaacctggaccacccaggctcaagcagtcttaccacctcagtctccaagtagctgggactacagaagcacaccatcacgcctggctaattttttttagcagacacgggctttcactatattgccaaggctggtctcaagtgatccacccaactcagcctcccgaagtttctggtattacaggtgtgggctgttgtgcctggctgagagatgagttctgatgcagaaataaaagcacatccacaggctgctgagcttcttgggaggaagacaactgagttcagactccatcttacctatttaacaactgcaagggctgctactcagctgtggaaaatggagttagaggttacagttgctctac

SEQ ID NO: 106022 - DNA, 2911 bp, Homo sapiens
tttcaccaacaaatcatttcgtgactcgactctagcttatgctgtttaatgcctttcctgctatgtttacctgacggaaatagtttctttggttctaaatatttgcacaaaactggttctgcctgtaagcatgatttacaacattaaaaaaaaacgttgacatagtgttgagattgagaaaggtacattggagtaagcagtgtcaggctaaaggtctctaaagtactctgttgaaacctaagtgaaggaggacaacttggtgtagttgctctccagcactcccatccccaacatccattttcccaagctcactcccccatggatagaacctgactgcccctcagcagcttttggcaaggccagaaggacctatcaaactatataattcactatgggaggattcagacagggatatttgcatttttgaaatccatcttgatcagagactgctgagcaagcctatgttttactttcctgtgtgagaaatgatgagggtcaacattcttcataccaaagtgaagacatgagatccaactctgagctcaccctgttgctaaatggataatgccagtactctcttgtggaaggtattaccagaacaagggatgtagttctgatcattttctccttgataatgtagttctggtcattttttccttgataggtgattgaagcctccgatgttgtcctagaggtgttggatgccagagatcctcttggttgcagatgtcctcaggtagaagaggccattgtccagagtggacagaaaaagctggtacttatattaaataaatcaggtgagtaaagagggtaccctttgtcttctgtgtacatgggtgaggtacgaggaaacagtctgatagtcactgaagactgattagatccaactctgatctcagcaaagccagagtacgtgcactttgccagagacagtgctaggcagtggggagccaggtgacttttacaactgactcaactggtttctactattcttttgccattcagtatttaccatcttttaaataaagagtgtaagctgctatacccagcttattgtgtagtatatttcatctaggaagtgatgacagtgtgacaaattccccacacctacacaatgtcgggtattagttcaagagtgaaataaattggaacgtatgtgacaaaatatttaaatgaaatgcataattatgcatctgagtttgagcagcaggaaaaagaaaacccagaacagagaattacaaagcagaaaatgggaatgagatctaaaattgttgttggggttaagaaacaattggctgcttgggaggctgaagtgggcacatcacttgaggccaggagttcgagaaaagcctggccaacacggcgaaaccccatctctactaaaatacaaatattagccgggcatgatgatgggcacttgtagtcccagctactcggaaggctgaggcaggagaattgcttgaacccgggaggcggaggttgcagtgagccgatactgtgccactgcactccagcctgggcaacaacacttcgtctcaaaaatgaagaaacaattggctgctagctaaaggtaaattctggaaacatagctctagggttagtagggttgtaatccagacgttgagtctgtcctgaagttttcaagtgagcaatacaaggggaattgaaatagagaagtgcagatgctgagctctgttaagatacgggcagtatggtaggggagcttaccctgccctgattttctagttaaatccttttgaaaggactgggaaaatgtaaaccagagtaaaatctatagttgccagattttgcaaatgcatctcaacaaaatagccacattggagcaaatgtctttttctttttttctttttgagatggaggcttgctgtgtcacccaggctggagtgcagtggcgccatctcagctcactgcaagctccacctcccgggttcacgccgttctcctgcctcagcctcccgagtagctgggactacaggtgcccaccaccacgcccagctaatttttttgtatttttagtagagacggggttttatcgtgttagccaggatggtcttgatctcctgaactcgtgatccgcctgtctcggcctcccaaagtgctgggattacaggcgtgagccaccgtgcctggccgcaaatgtcttatttctaattgctatcagatctggtaccaaaggagaatttggagagctggctaaattatttgaagaaagaattgccaacagtggtgttcagagcctcaacaaaaccaaaggataaagggaagataaccaaggtatcctttattagtggtaagaaatgtgattctttcagattttggttgaaatatgatgagtgtacaaaatcttgatttaagtgaatgaaaaattacaagatccaactctgatttcagccagagatcatctgaaaggcaatgtagttatcttaagagctgggctctggagcctgattgcttggggtttgttgaaatttatcaggtaagttgccagaataattcaactatttggaattttagcgtgtgaaggcaaagaagaatgctgctccattcagaagtgaagtctgctttgggaaagagggcctttggaaacttcttggaggttttcaggaaacttgcagcaaagccattcgggttggagtaattggtgagtttcagttcattactttttactttttaagtgttgaaatagttaagaagtttagccagctctccaagtgcccaagcagcagtgtatggagttgttgtcaagtaaaaggctcactcaaatactagcttcttgcttataccttactgaaagcacataaccacacacaatttaaagaaaaaaacttacacaactgctgccagattcaggttttttgttgggactgattactgtaggaagctggtttct

SEQ ID NO: 106023 - DNA, 2645 bp, Homo sapiens
tagaacagtcgggtatgctgttacagttttagataaatgtgaagcaaatgatgataaactggatctgactgactgtgctgagtctgttcaatccaaccctgagcttcatgttctgtctcttaacctccaaatagaccaatgcccccatcaattccatcgctcttctttcaggagcatgcaagttgtccccttggacaaacagatcacaatcatagatagtccgagcttcatcgtatctccacttaattcctcctctgcgcttgctctgcgaagtccagcaagtattgaagtagtaaaaccgatggaggctgccagtgccatcctttcccaggctgatgctcgacaggtaaaaggaccccttctcatgagctccttggagccatcttctttcatcataagcattttgagtagaaaaatcttggaagtgttttaaagtactggcatgtcagatgaaggacagctcctttgtttggttttttttttaaggtagtactgaaatatactgtcccaggctacaggaattctctggaattttttactgtgcttgctcagagaagaggtatgcaccaaaaaggtggaatcccaaatgttgaaggtgctgccaaactgctgtggtctgagtggacagggtaagctttcttttctgttggcattttggtgaccactagaataaaccttcttttgacacatcttatttttaatatcagtgcctcattagcttactattgccatccccctacatcttggactcctcctccatattttaatgagagtattgtggtagacatgaaaagcggcttcaatctggaagaactggaaaagaacaatgcacagagcataagaggtgagaattgtgtgtcgctgctgtcttcatcagctgacaggccagtggagctcttacctgtttacatgggcttgctttctttcccagccatcaagggccctcatttggccaatagcatccttttccagtcttccggtctgacaaatggaataatagaagaaaaggacatacatgaagaattgccaaaacggaaagaaaggaagcaggaggagagggaggatgacaaagacagtgaccaggaaactgttgatgaagaagttgatgtaagtgtgtcctccatgagttaaaactgaagtgagttttctagcattataatacataatggaaggaactgaagataggaaatatttgaggcttgtgatccattagccttaattttgcacatcccgttatatgtacctccaaagagttaatttttcaggtacataactacttggattaaatgagcagacaagggctactaatccagcactatttttctttgtcacacaggaaaacagctcaggcatgtttgctgcagaagagacaggggaggcactgtctgaggagactacagcaggtgaggcaggcaaaaggggttctaacgaagcagcatggtatagaatcacttttactttttgaaaatctctttattttcctgcaatataggtgaacagtctacaaggtcttttatcttggataaaatcattgaagaggatgatgcttatgacttcagtacagattatgtgtaacagaacaatggctttttatgattttttttttaacattttaagcagactgctaaactgttctctgtataagttatggtatgcatgagctgtgtaaattttgtgaatatgtattatattaaaaccaggcaacttggaatccctaaattctgtaaaaagacaattcatctcattgtgagtggaagtagttatctggaataaaaaaagaagatacctattgaaaaatgtaagttttatttacagatcaggccacaggttacaaaattaaaaccaacagcagttttgaattatctgtaccagctagctgaactagccatatcagttcttctttccagtcattcagcattgtagtaagaaaacacttggtaaggcagatggagacatatttatagtctatagtctgtctgggaagctgactgccagacagggcagtttgtcatctttacctagctgacacatctttttccatggcttgctaccgataggcattgaagcctagcaactgttacttcccacgcatgctatcttccaggacttcctgagaaatgcttgcttacagttcaaattctgtttcactttatgtttgagatctcggtatatcttcggattaggttgaatttgcctgttgggtctggaatataccatttttcccaaacatcagtatatgaagcagtccttccccatggcttcaaatgtccattccaatggagtaacttggcagcctttacaaactgaggtgaatatcgttttccagcactggaaccttacatttgagacaaaaatagccacatcgttgcgccatgtgaaattgtgcagaaaacttacttaagggaaacaaagaatataccccatccctgaggatagttctttagataccaattctttactagcttatgccactggttaattctacttaccaaggtggcggacattccacataggatcgatggtagagtgctgttgataaaatacgataagcagaggaggtgttgtgatgctaccagccagggttctgctatacagtccctctcttggtgggacagaaaacaaatgtttgttagtgaaaagtactg

SEQ ID NO: 106024 - DNA, 1033 bp, Homo sapiens
tattctttgtttcccttaagtaagttttctgcacaatttcacatggcgcaacgatgtggctatttttgtctcaaatgtaaggttccagtgctggaaaacgatattcacctcagtttgtaaaggctgccaagttactccattggaatggacatttgaagccatggggaaggactgcttcatatactgatgtttgggaaaaatggtatattccagacccaacaggcaaattcaacctaatccgaagatataccgagatctcaaacataaagtgaaacagaatttgaactgtaagcaagcatttctcaggaagtcctggaagatagcatgcgtgggaagtaacagttgctaggcttcaatgcctatcggtagcaagccatggaaaaagatgtgtcagctaggtaaagatgacaaactgccctgtctggcagtcagcttcccagacagactatagactataaatatgtctccatctgccttaccaagtgttttcttactacaatgctgaatgactggaaagaagaactgatatggctagttcagctagctggtacagataattcaaaactgctgttggttttaattttgtaacctgtggcctgatctgtaaataaaacttacatttttcaataggtatcttctttttttattccagataactacttccactcacaatgagatgaattgtctttttacagaatttagggattccaagttgcctggttttaatataatacatattcacaaaatttacacagctcatgcataccataacttatacagagaacagtttagcagtctgcttaaaatgttaaaaaaaaaatcataaaaagccattgttctgttacacataatctgtactgaagtcataagcatcatcctcttcaatgattttatccaagataaaagaccttgtagactgttcacctatattgcaggaaaataaagagattttcaaaaagtaaaagtgattctataccatgctgcttcgttagaaccccttttgcctgcctcacctgctgtagtctcctcagac

SEQ ID NO: 106025 - DNA, 1069 bp, Homo sapiens
ctccgcctcctgggttcaagggattgtcctgcctcagccttctgagtagctgggattacaggcatgcgccaccacgcccggctaatttttgtgattttagtggagacggggtttcactgtgttggccagactagtctcaaacgcctgacctcaagtgatccacccacctcggccttccaaagtgctgggattacaggcatgagccaccgcgcccggccagtgcggtcttttttttttgtatccacagttttgtatccttggattcaaccaaccacggactgaaattacagatacagagggctgactgtaatatgccattttacataagggacttgagcatccgtgaatttttgtatacatggggagtcctggagccaatccccgactgatactgaggaccaactgtgttgctaatcaaattgtacacaattatatactcttacgaaaatgtagttaactattacagatccagcgtctgtgtgcaatttcgttttgagaattccttctaaccagatcaggaaagctctcttaccaggaatagccccaggaaagacaatatggattagacgtactccatgataactggcgttttgcatgtaggtaactgtggaagttttaggagcaactggtttctgccttgccagtctacttaagtatgtcagatacttgatagaattgtgtttttcttgtttccagccaagtgtgcctcttgatcccgtaactgctaactggaagtcaagaaactaaaaacattatctcttgtaccattaattaagtgggatttatttgagtgcaagatcgttttctcagtggtggtggaagttgcctcatcgcaggcagatgttggggctttgtccgaacagctcccctctgccagcttctgtagataaggtcagcccataatgtgatagaggcatatgacttagggtatatactgatgtatatacttctctttttttttttttttttttgagacagagtcttactctgttgcccaggctggagtgcagtggcacggtctcagctcactgcaacctccgcctcccgggttcaagggattctcttgcct

SEQ ID NO: 106026 - DNA, 1168 bp, Homo sapiens
ctcggtcgccctcgcctcgcagcctgccacccgcgctcagctgcccgcctcctcagccagccatgctggagcatctgagctcgctgcccacgcagatggtgagggcgcaacccggggacctctgcacgccgttcttgtgcctggcagcttcgaagcccatgttggagcaccgacccggtgctgcgctgttccgggcccggatggttaccgtccaccctctttcccgaattgcctcctgggtccccttctcttctactccgcgagaatctcctgtccattctccgtgagggtgtttcagttcctcccgggaagcccagaatttaatatcttgcccaggcccttaggagagcgggagaccctgatgttggggttaccctgtgccagagttgtgaggtcagggcaggaattgtatgttctcggcggtggaaccaattctttttttcctctgcttcaccccaggattacaagggccagaagctagctgaacagatgtttcagggaattattcttttttctgcagtaagtattggttttacatttaatctccgcccccgcctccctcccaaccctcagtttgagtgtgtttaatatacttcatttgtctctagatagttggatttatctacgggtacgtggctgaacagttcgggtggactgtctatatagttatggccggatttgctttttcatgtttggtaagaaatttgtgggtattagtggcagcttgggttttgtgagtcgggttggtttggttagacctactcagtagtgagacccaaagccaacgtttccctcatccttccaaacagcgtttccctttgctatcattggaaaagtagaatgccaaaatagtgtcagatggtgcgaactatataaaaggacacagcttatttcctttggcggctactctggctaataatcttaaggtcaaagccagcaggagttttcatggtgctcacgttgtcccttcaccttttatttatttatttatttaaattttttgagacggagtttcactcttgttgcccaggctgcagtgcactggggcgatttcggctcactgcaccttctgcctcccgggtttaatagattttcctgcctcagcctcccgagtagctgtgactacaggagcccaccaccacacccagctaatttttgtatttttagt

SEQ ID NO: 106027 - DNA, 1051 bp, Homo sapiens
gcttgagcccaggaattagaggctatagtgagctatggtcacactgcactacatccctatgacagtgcaagaccctgtcacttaaaaaaaaaaaataggccgggtgcagtggctcatgcctgtaatcccagcactttgggaggctgaggtgggtgggtcacgaggtcaggagatcaagaccatcctggctaacacagtgaaaccctgtgtctactaaaaatacaaaaaattagctgggtgtggtggtgggcccctgtagtcccaaatagtcgggaggctgaggcaggagaatggcatgaacctagggggtggagcttgcagtgagctgagatcgtgccactgcactccagcctgggcgacagagcaagactccgtctcaaaaataaaataaataaataaaataaaatacaaaattttaaaaaattgcagtgttcttgctatagtggtaaaagtgtttatttttccctttgtctttgttgttgccttttagctattatgccaggttctgaaaagatcaggagactagttgaagtcttgagaactgatgtaattcgtggcctgggagttcagcttttagagcaggtgtatgatcttttggaggaggaggatgaatttgatagagaggtgagtgtctcattaactgtatcaagatgcttatgttatagaattttttaaacaaccttttgaaatataaatcacacataacaattcactcatctaaagtgtataattcagtggtttttaatgtgtttacaacattgtacagtcattaccacaatcgatattagaacattttcattacgccccaagaagccctgcacctgttagcagtcactccccatggtccgcactgccaaatctgaagtcatgaagatttatttttatattttcttctaagagtttttttggtttcagcccttttaggtcttggacacttttttttttttaaggaaaatttaaactttagcttgggcatggtggctcacgcctgtaatcacagcactttaggaggctgaggtgggtggatcacctgaggtcaggagtaccagac

SEQ ID NO: 106028 - DNA, 1008 bp, Homo sapiens
gggactttgttggcctggcacataggcggtcaacaaatatttgcagaatgaacgaacaatacttgtaacggccttaggacaaacaagtgcacaaaaagaggaagctttccctgactctgttgtggcggggatccggacggtggaacggacgcacagaaagtgcgcggagcctggcggagtcgctctggcctcctggagcctctgctctatggcgggtcctcccggggctgcggaacctctctggccgctcgtggcgtccgctctatggccgtcctttggggacgcaggagcatgcgcagaactgctcccggcccggatcgctatggcagcggcgtcgtcgcgggccgggccccagcaatcccgcccgggcccggctgcctcaacagccgcccccactgccccctctcgggcatgaaccgagcttcttgttgccgcccgctgccctacccgccgctgccgccgcatcccgactctgggccagcgctgggaacatgcccctggccgcctactgctacctgcgggtcgtgggcaaggggagctatggagaggtgacgcttgtgaagcaccggcgggacggcaagcaggtctgcaggggtggggcccggcaaggggcgggggcgggcagaagtgcgccgagggcgccgaccggtagattaggtcgggggtggtcgcaagaggctcatctcggatggcgtttcctcagggaaatggtcccagaccaagacgaggcctggcctccctgtaatatgcgcccagaactacttctacttctttgttgtgttaaatttttttccttttaattttcattttctttaattacaattctaagttttatgtaaaaattttcagtctctgcctatctacttctttgttgtactaattggcatgcgtgatctacacacctttctcccaaccccgatactctcatgagagccggtatcatgcattcccaggacttaatacagcgcctagcaagcattattccttgaatgaagggccccaaacgtc

SEQ ID NO: 106029 - DNA, 1071 bp, Homo sapiens
tcagggctgcagcccccaggcagcagtactgggagcccctctcatctccgagaataaactctgaagccagcgaccctgcggacctgaatcatcagggagcctgtcagaggaggggcagtgactctgcgggacaagcaagcaggctatataagtttcagaaggctgggctccactcagatcttttccagcagctgctgcctgccagagaggcgccttcagagacccagcgcttacacaatacccaccatgtcccaggtaggaggacccagcaagggctgtgttgatgccagagggagtggaggtggagtcctggacactttcggctctggcagctgtgtcttgatctgagccccaagcatgaactggaggctctgcagcccttgggagatgggggctcagggaggaccccctgaagaacccctcttctatgtggctttggtggtattccacggtttgttaggaggagtggagagaaatgttgggggtggggggggcctagatagatctttgcatgtgcctgtgtgtgtgtgtgtgtgtgtgcgcatctgtgtgtgtgctgccgatatagctcagtgtgtagagctttgtgcatttgtagctatgggcccggcagccatgcactctgtgtgtggccacacacataggtctgtctgtctctgtgtatggtatatgcatgaagctgtatgtgtgtgcacatgaggctggagggacacagctggatgcatcgctgtacaggggtatagtgtgttgctctgaggagcctggcccaggctgagcgaggaaatacctgcacctgcacccaagcacaggcaggtctcagactcacaggcgcctggggttgaggggtagggtaaacaccgagcctgggtgtcccccaccctggagggacagaccagcctgccaagagagaggactgtccttgctgcctgctctgtgggtgggtggccattttggactgtaattctgtgggcatctggcccttctaccccatttccagccccaaagacacaaagtaaatagtggcgcttttctggaagggggcaatccttgaggaaccgcttgccacccagt

SEQ ID NO: 106030 - DNA, 1049 bp, Homo sapiens
tgttcctgacaggacggtcattccctcatggcatcactgactcagttctaattcctcccctcctgtttcattttggtttgaacaacctgtgcctgcagctgtttcttccaccttcctggagctcacaattggagcttcatgttcagtcttgagctcctaatgtttccagacagggcaggggataggagagccataatctatgaaagctgtgaaacaaaccctgggttatatagatctcagatggtctcatctgaaggctttgcccacttcccagtgagcagagggtttggggaacaaagaggtagctgaagagtggtggtttttccctgtatcctgattttcagaaagggctttagtctctgagctgtggctagtagctggctggctgaccaggggacgggggtctaatagggtgtctgaccataggacacctctcgtgtttggccttccctttcttgtgtgtttgtgtgtgtgtgtgcacgtgcacgtgcacacacatgtacacacacaaatctgtatccccaggagtgcctcctgcagtcactgggggctcttccgtggtgcaccatcccatgagagcagatcagagggctgtggtcaggacttcctcccgagctgccctccctccctgggatgagtttcctctccacctgctccaaggtgccttacgaggtgcagctcttcacctggccacatggcatccatcaccgtgttgagaaatggtgggacgttggctggatattgtgtgctatgaatctgatttgtccaaatctggacctcagccaagccacctgtggtggaaccttgcaagtcaaggtcatgaacaaatttcttgtaactattggaaataaactaatgaggtagaactgtcatatccaaatggaagaggtggttggtactgttacttccttttgctgtcagagggttgttgacaatggcaaggggggatgttagtgagatccaggtggtggtggcttcttggtccactcagcttgcacacatgcaagaggagggtctgtggcccctcagccgtgctggtggcctccttc

SEQ ID NO: 106031 - DNA, 2108 bp, Homo sapiens
atcgcttgagcccaggagcttaagaccagccttggaaacaaagcaagatcccgtctctacaaaaaaaaaaattttttttaattagccaggcacatgacatgcattcttagtcccaggtacttgggaggctgaggcaggaggatcactcaagcctaggagtttgaggatacaataagccgtgttcatgcccctgcactctagtctgaatgacagagtgagaccccatctctaagaaaacaataacagcaatgacaaagcaggacatgcaacactgcctggcatgtctgtcctttaaagaggagactgtgggggacatctgaaagactcgcaagtgaaacaggaatcaggaaacacagcagccacgtgtgcttctcccaacggtggctgcgtgagatctgggttcccagaggaaatggtgtgccagacggggtcacaggtgctttttctcttttctcacgtttctgaactttcttattttagcatctaaagaggcagctgtagctaagttgtgtagcagaaacctagaacactggggcaatgtgaggcgtatgggaggaaaagcattttcctccttgtcagtcacttaaaactgaagagcagatggagtgagcacactgagcgagcggacatccttccatagtaaataagcggtgccgcgcgctccgctggctcccaaacactccagtcctcacagagagatttcctagtggcgctttctgtccaactgtcctcaaacctacttaattacttaatggtttctcacaaataagttcatctgttgttttgagaactgttctcgataaggttaggtgacttaccgaaaggaaaaggattgcaaaactcattaacaacctagcaaggagggattatgcttatgaaatgggttttttggctcaaatgtctcctatcccttaagtgaaagtagaaaggaagacctcagaagaggcgactgatgtgtttctgccacacttctcccagggttttccagaaaagggaatggcctggtgttttgtccattgcagctgcataaagtcattcccttgtgtacagctgacaggcttgggcagggcatgggcctccagcatgggtgcccaaacagggattgctgcagaaacaataaagccaagtgagaagctggagatatctctttggaccaaattatcttctcatagcctggattacggcctttaccccccagcctcccgcccccccgccacccccaaaatgctaccctgtaccccctcttctggccagctgtggtaaggcagctctggcagaacttccagggtgagccccaggcaaccttcccacatcccactctcccctgggtctcccactttggggaggcctatgtggctcccaggagccaccctagggttcttcatatcacaggatcattccctggaggggctggtcttctctccgttcaaaatgtcctggaggcattccaaggcctgcacatcctccagcttgtactactaggtccctcggtttctcaagcatggtgactgaaggggtcccagatggacctttgtcacagccctgggccccggcccatccctcccacctccttgccccaaggacttctctcttcacttccttgtccctggccaaggtgtttggggtgacccatgctggacaggtagagtccaaattcctccagagtcacgtttctgctctcaagaggctgaggtatcagggatggcccggggagttgggtaagggatgggaggtggggaggtgggagacaaacaaagcgactgggtcctgcttcatcatccacaaacatcagtccactcatggacagagaagggaggggcagccccgctgtcactggaaaaatcaacaacggataagaatagcagtcttgcttcatacagcttctgctgccagccggcagaaagaacagcttttctgagctccagcaatgagcacttcctaactttagtgctttttaatcctatcttagaatctcttaaaagaaaggccattttagtatcttcaaataaggaattctctgattttatttaaaatactgcatttgtctgttaaggatgaggtaatcctttggacttttgggggggctcattaagtacctttagagcttt

SEQ ID NO: 106032 - DNA, 2108 bp, Homo sapiens; identical to SEQ ID NO: 106031

SEQ ID NO: 106033 - DNA, 2108 bp, Homo sapiens; identical to SEQ ID NO: 106031

SEQ ID NO: 106034 - DNA, 2108 bp, Homo sapiens; identical to SEQ ID NO: 106031

SEQ ID NO: 106035 - DNA, 1024 bp, Homo sapiens
gggccacagaggacaagagggagggagagcggatggaattcgggatccccactctcctgtcctggtcatgcctcccaaagagctcatggctgtgggctcaagggccactcacttctagatggctgaagattcacaaggcactgacagtttaaaaggggagccaattcatggagctggctatgagtaccttggatatttccagaaatgttaagtaattgtttgtctccgttgaggggagatgagctcagggcagggcttttcttagccccgtacttgatgcctgatgagtcactgacttaagatagtgtccaacacacagcttgtgcctcctatggctccagggaaggcttctgagaagctgcgagtcattgagtcctcagctgcagaacagaaatggaccacagtcgggggaccagcacagcatcatcgtcatttatagaatgggcacccaaaggagttaagtgacgcgcaaagctcacccagccagtgcatggctatgggagcctgggcctgctgcaccaggatacctaaaccctcccaccacccccacaaacagtgctcacaactactttgcagttgagatcccttctagaaggtgtggctcccagctctactatagctgaccagtgctaaggtgaatccactggtcaccactagtctgtcaggtgccactcagtgacctgggagtgaagatcaggtctggttcggatacatcaagcattaacgctaccagctgttccctcacattttgtcttcatccccaagggtggatggaaaggaagaaggcagtgatattgtttcagcctctttctcaatctcttggcctgcctcagcccctgcccctgggtcatcccaccactgcctttgggagccagagtcttcaagccagaatgtctccaaataaagctgtggggaccatcctgagtcttccccaggctgaggaaggatagcttgtctgctcagttacctgttgttttctatttccatcaatttctgttgttttctattgctactgtaacagatt

SEQ ID NO: 106036 - DNA, 1024 bp, Homo sapiens; identical to SEQ ID NO: 106035

SEQ ID NO: 106037 - DNA, 1024 bp, Homo sapiens; identical to SEQ ID NO: 106035

SEQ ID NO: 106038 - DNA, 1024 bp, Homo sapiens; identical to SEQ ID NO: 106035

SEQ ID NO: 106039 - DNA, 1028 bp, Homo sapiens
tgtcaccacgctggagtgcagtggtgcaatctcagctcactgcaacctccacctcccgggttcaagtgattcccctgcctcagccccccgagtagctgggactacaggtgcgcgccaccacgcccagctaatttttttgtattttcagtagagacaggtttcaccgtgttagccagggtggtgtctatctcctgacctcgtgatccacccgcctcggcctcccaaagtgctgggattagaggcgtgagccaccgcgcgcagccagcactggcagttttaaagtgtctttgtccctcactcacctccctcaggtggtcgcactcctgatgagcttcagcacatggtagtgacagctacactggcacatgagggctcccagcccccagaatgggcccaaacaaatgctgggtccatccgcttccctcaggccaccctgcatcagccatgacctctggccccgtggcttctgccgtgaccatgcatgtgccctgtcctcacaggtacctcatcaacttcctcctggacgccactgtgggcatgctgctcatctacgtgggggtgcgcgccgtcagcgtcctggtagagtggcagcagtgggagtccctgcgcttcggcgaatatggtaatatgctgtggatgccggacagggcgtgagggaactgctggaggtctctgctccttgccccatgcggcccaccaggcaaacagatccagaaatggctggggagctgccattgtcttctctgtgtggtagagggggctgttctgggtttgagcacaccctcctgtgggtgtgggtgcctgctttaccaccaaggccctcaccttatggcagggaaggtggcaggaggcaggagacactagacacagagagagggctgaatgtctgctccttctaatggaagacaccagcagtcccacacacaggcccgcagggactcttcgttctgccaagcttcctgtagagctcacatcacctgcctaccaggttaaagagatggggcagctctcatttttcgaaggtgttc

SEQ ID NO: 106040 - DNA, 1027 bp, Homo sapiens
gtttaaatggcagcagctgaaatttctttagggatccagctgcagtactggatttgtgcacgtcttgttaatttcacacataatttagctcattgtgagtgaagttgaatgggagctctttaaaatagaggcaccttgggcttcatcacaaagcagcgattgagcattttattttgaagtaagaaaaaaatttaaaacgtattttaaatatcaatccttgaccttttagggttttcaaaggcagtgttattgaaggctttgaaaggtggctgagatgccaagcctgagttagtgctcaaggccccaggaagagataaccagtgattggaaggttggggtggctttcttcctgtttcagtcttctcgttttcctcaaattggatattgcgctcctgtcaggctaataaccagtgctggtttattttgtacaggtttttagacacttccaaacaagccataggaatgctgttcatccactttgcaaatgtatacctagcagatctcactgaagaggacccttgttcactgtaagtgttccctatttgagtgcaaacatcagctgcccctccattgaaaatataggctggccttgctttctgctgctggtcctgctccctctggcttggggagagggtgctccccttttcctctgtgctcctctgagagaccatcctgtacatgctgtcctggagctcacttacacagctatcagttggcttgtagggctttgcgtgttgacactttccccatgcactggctttctgttcatcaatccaagttctgtcctttgattttctagtgtccttatgtctcccagtttccaagccgcccctggcaaggaaggataatgccctacaggagtgtctctgctctggaaccaggacacaccagggcttctctgtggcgtcagccattcagggtcaaaactgttgttgaccctcattgacctcttccaccttatcattgcaatgtgccttccatgcagcccccagagcaatccatctgtgacctcaatccggccatgata

SEQ ID NO: 106041 - DNA, 1055 bp, Homo sapiens
tccgggaaattccatgaggtttaggtgctcgtatcaggaccaaggccagagaccaaatactagaacaaaaactcctcttagcacctgtgttactcaggagattacaagtgttttaggagctctgtgtcagaaaccaggacagagaccaaatacatatatttcttaaatagactttgatatatacatcaagcatatatttatttcacagattatgatcctgcagtcacaatttttccttcgtgaaatggtggtaaagcttcagaagtaggttctaaagacaaaactccaaaataatacatcacttggaaggatacagtcagctcttcaagacagcactgtgtccacaagaagctgcctgttttaggctgccttgggcttctacatttcctaacaaaatagccattttatccttcagaggaaacgtcagtaatcactgtgataaaattattaagcgtgtacttgttcttaaacgtgttgctggcgaatttgataattctttttattttccccccgttgatttttctcaaaccctgttaactttagaatgtgtgactcccacctcagggctggggcaggacctggtgggagacctagctttggggctctcttgagtcttacatacgttgtcctttggtaactcctcctttgcagtgagtctagggaatgattttccagccaccgtcgctgggttggtctggataatctctgcagtcctgagaccctgcccagctgggcggctgtgagagacagccatgaccaagaggtgcctcgaccacagaggagaatggctacctggtgctggtggtggaggacatactgaaggcacacgctgtctccaccatgctcctgtcacatgggtcggggttagctcctctcagagattaacacccttgttttttcttttttgaaatgcttaccatctagtccaggggctggcacactacagccctcaggcccggtgtgtatgattggaatagctgtgtctatgactgcatcattctctagcggcagggctgaggaattgagacagagatcatatggcgcacaaaacctca

SEQ ID NO: 106042 - DNA, 1055 bp, Homo sapiens; identical to SEQ ID NO: 106041

SEQ ID NO: 106043 - DNA, 1055 bp, Homo sapiens; identical to SEQ ID NO: 106041

SEQ ID NO: 106044 - DNA, 1055 bp, Homo sapiens; identical to SEQ ID NO: 106041

SEQ ID NO: 106045 - DNA, 1086 bp, Homo sapiens
cacccggccagtgattacctatcttaatgggttatgagaattaagtgagatacagtgcttggcactgccgggtgcagggtgggtgctgagtgttagctcactgaggcccaccatggctgactggccgccacgtcacacaaccctggggaggtaggacagttcacaccatgtcatcagttattagaattgggaaaatacagcttaatccaagacttcatgtacaggtcgaactggagggattgaatggctcaccggagactttccagcaggtcagaggctgagccaggactagaacccagaattcctctgtcctaggcctctgccctttcccctccaatgcctactcttactgctgtttctgtgccccctgccatggcacacatttacttatgctcattggtttgtccagggagtttgttctagactatggcatgagaaagggaactcttcccacctacgaactgaccttcctaacattgtgccacttggtcatgacagcccaagagcacaagcctggagccgcagccagtggcaggtggctgaggcatgtgaaggtggagggatgttgcacactcttggtaaacatgggctttcttccttccctctcccagcttcaggctggtctggcagaggcaggcactgggttgcccaaaagcgtgagctgtgttaaagagtgatggcagaagcagccacaggcagggtgtgtcagaggagacctgttatggactcagccagtgtggcctgtgccagtgaacttcaatggccattctcagttttaacctgcattaagacttgagttgactttttatcacaagccttgaaattttggactatgtatatattataaatgtagacactagccacctaccttcagtgtagaataacattcttgaattgtttttccacccacagttgatccttgaacagcgtgggggttagagcagtcaacactccacacagttgaaaacccgcatataacttctgactccccaaaaacttaactgctaatagcctagtgttgactagaagcctgacccaataacataaacagccaattaacacatattttatatatgtattatatat

SEQ ID NO: 106046 - DNA, 1086 bp, Homo sapiens; identical to SEQ ID NO: 106045

SEQ ID NO: 106047 - DNA, 1086 bp, Homo sapiens; identical to SEQ ID NO: 106045

SEQ ID NO: 106048 - DNA, 1086 bp, Homo sapiens; identical to SEQ ID NO: 106045

SEQ ID NO: 106049 - DNA, 1027 bp, Homo sapiens
gggaccccagacaccctgagccacttcctctgtgcctgccggctttttccacccctctttccacacaggttcactttctgattactccgtatctgtggctacttcacctcattttttttctatctgaacaattctgattttctttcttgataattatttttatttaattttatttaaagcattattgttttttgactgttgataacattaaaaatataaatttgaaatgactcatcaatcatttcatgcctacatgagtcacacgctaggtctgcttttctgggcctttgtgaagattttccttgcctgggcagagggtggtgattctaccccaaggctgaggtctagcatctgaggcgaaggcacccccgccctaccccagagcagcagaagcaggcagcacggagtccctttactcgctggtgaggaagggtctgcagggctctgggtggcttcaggttacctgctgagtttcacagagttcatttccctgttggttgccatatgactataaggaaggtcattaataatcttgaggtttacccagaagaattatccttttccttgtgtatgcatagaagcagttggtgagtctcttttagattactccactgctaggaaagctatccattgaatccagagtttttcagcctggcactgttggtactttggatgagataattctttcttgtgggaggctctcctgtgcattgcaaggcatttaacagcatccccagcctgcctctacccactaaatgccagtagaatctctcattgtgacaaccaaaaatgtctcccgacattgccaactgccccctggggggccaaatcgcccctatttaagaaccactgcatcggttcagtttgtgaatttctcagcaaactcatatttgctctagaagaacagattagaaggtcagtgtgttgtttccaaagtataagaacagtggactatcaggatctcttaagtactttggtgccaagcccgctattggatgtttccttgacgaagagctgagactggtcc

SEQ ID NO: 106050 - DNA, 1027 bp, Homo sapiens; identical to SEQ ID NO: 106049

SEQ ID NO: 106051 - DNA, 1027 bp, Homo sapiens; identical to SEQ ID NO: 106049

SEQ ID NO: 106052 - DNA, 1027 bp, Homo sapiens; identical to SEQ ID NO: 106049

SEQ ID NO: 106053 - DNA, 1075 bp, Homo sapiens
gacatcacgctgccccactattagtgttaataaggttgatgacttggtgatggtggatggaagacctctcagtctctccctcgtaaaggtacatcttcccctgggcaattaataagggatctctgcagtgataatactttgagatcatgtgaatactctgtttcccagtagcctttcacccagtgatcacctcctcctggtaaaataacagaatacagtgacagctgaattggagctggagctcacgagtgaaggcgcctgtctttgggtctggaacccagcacaaactcaatcagtgtcgctgtcctttcctccttctggagtgccagcatgggcaaaggaagaacgccccttttttcatgccaagctggtgttgtggccaatgttagcatactggctggctcagagctttcatttttagaaagttttcaggttttctaaatgtttatttatttggtagcatttatccataatggcaatctgctgcttgatttatcatgtaacttcattaatttcgaataaaatcaggacaacaggaagttgtctgaattaggggacaatctgagttgtagaataacttaccaaatgcattttttttaaacttttgaatacctctgttggccacatgttgccctgttggggcctctcatgcttctgctgctttaatatctgtttaaagtcttttgcagttagtatatttgcacaaacatgaagatttgttgaaggggttttacaagtggttaaaaataacaggatccctggctctggatccagcctgacccagcatccatgtctgcttcgctctgccatgtggtgcccctgagcaacttctgcatttctcaaagcttcagttttctccccagtaacatgtggtaataatctgtcttttctggggctatggagatgagaaagaatgtgtttgaggaagctgggttggtgtcaggcacatgttaggccctccttgggggtgtgtcttcatccttgttattacattgtattcatgagttgggctgaaaaatgtttcacaagtgcttaagtaacttattttctgaattaggttaaacattcccctttc

SEQ ID NO: 106054 - DNA, 1075 bp, Homo sapiens; identical to SEQ ID NO: 106053

SEQ ID NO: 106055 - DNA, 1075 bp, Homo sapiens; identical to SEQ ID NO: 106053

SEQ ID NO: 106056 - DNA, 1075 bp, Homo sapiens; identical to SEQ ID NO: 106053

SEQ ID NO: 106057 - DNA, 1008 bp, Homo sapiens
gcagcaggaaggtcagcggctctagagcaccaacaagaaggtatccagagagagcccagattgggctgggagaatgggtgagtgtcaactggacttacaccatgtgttcactgacattctgcagcaggaaggtcagcggctctagagcaccaacaagaaggtatccagagagagcccagattgggctgggagaatgggtgagagaatggggactcagggtcttgttaaaggcagagcacaggttctgagaagttggaaagggttagatgggagtgtgtgtgtgcagggggatgttggagcctggaaaataccaaccatttgtcttttacactctaaaggtagttgtgctccccaagtgaataaggtgggacatgtgcacgtcaggttttcagtgtgaaacctggtatatttccaaatgaaagtgattggattcaggtgaccatttaaattatgtctatgaaaaaagaaaatagacttggggccttgataagcctttagctagggaagtaggaaaaagactcaaatgtctgggttggagggaagactcctgtactcagtctcagattgttttccttattcacttgcttcagaataatccaggctgcaaactattgggacccaccccagaactactgaatcacgatctctgagggtggaattcaggaatgatgataatttctccaggatatagggattttccttagagggaaaaataatttgaccacaggccgtcccagctcctacctccggacctggagctcgtgattcccaggctctcattccggtctgcggtggccggctcacctggcctgtctacctgcgggcgtggcggggttggagaggggagcgggacccgcgaccccgccccgtggcccggccggagccccgcccctcgggggcgggtggggagagctgccgcggccgaggcccgccccaaccttggctgcgccaatcaggcactgcgatctcagacgtcgggttacgcgcggcgcggagtcggcggccggg

SEQ ID NO: 106058 - DNA, 1545 bp, Homo sapiens
ctatctgcctttgttcagcaatgcaggtggctcctagcatttatctatgttatagatatgtgaggtcagggaagggtacttactaacctctggaaaagatgagcttcttgataaatatttattgacttatggtagaagcaaacatagaaaactagttcagaacttagccttaatatgccttttctcctggaagtaaaatattctcactgtgagagagaagacattggaccttagcttccagaggacctggatacactttacttgctctctagtaccaattcagtcacgaatgtggtacctgaatacaatttaaaagctttaggaggccttaggtagggtgggactcagaatcatttccctctctcaagccaaaaagtgtttctgagggacacatagaatatcaggcaatctagatgggaacatttgggaaaactatcacaggcaattatatttacttggcacctatatcaccaaagattgttctatttgagacaccatttactggtttaattgatcaacagtggaacacaccctggatttgaactctgatcctgtatattgaggatgtgccgtgtgtgcacacaccagttcagaagtgttctgtgttatcagtaggaaatctgttggtcttatgaagttaaatgagtagaaggcatcactacaaaaaatgaagtacaaatcttggtggggaccagatgccccctttgcaagcttggatttccttgctcctgggtccactgtaagcaaccatatgtttgtcatggtgctgactcagaaatcgtaggacagagagcctcctgcaaaaccaaaaagaaatgttactttcctgcgattataattcttccttgactttgttcactttagatgttttactagtgagttttgatgactcccaccccttatgtgagaatgtgcatactttggaaacttgaatttatccaaacaagctacctatgacttagagtttgggcataagttttaaattcaatgctcagtcgaactggatctggttccaggcccactccaagggtggtttcaggggtgttttttcagtacttgtcccagaccacacaggtagccttgtttctgagggcagctttatggggaggtgtagaaggtggtgggcagcaaatgcactgcagagtcattttcttgggtatggtgtttaagaagcctgagattttcacaagaaccagcaaaaccaggagtggagagttggggagatagagaagtaggcctaaaactccctcttcttgagtcttttttgacttaatacaccattgggtctgtcctggtgctatggcctatcacaaaggactgttttaagagagaagcaagccacagccttgccagataagtctccaacaccagcagaaaagcacggaccctgatctgtgggaggcaagggtctcccattatttctggaggcaaatggtgccttctagtgaaatggtgccaccatttgctgatgggggtgcctgttctcaggatgtgtggaaactcaggcctgagggtttctacatggtttattcaatctaactgcat

SEQ ID NO: 106059 - DNA, 1018 bp, Homo sapiens
cccttttggttgttttcattctgttccctcccattgtagattgaactttgttctctgctttctttttcttggaaagagaggacttagctttaagtcagcactgatttgggactgttcctaaggcatatcagtgcttcattgtcattgtgtttttaaactttttaaaattaaaacagttcattttggggatgattatgtggctctagggttttgaatgtatagtcacactttgatcattttaaaatcgattcttaggagttcctttgtttactacctctgttgataattgagcttacagccatgtatgaggttttttgtatgatgccatttttaagctacataaacactaaaattatgacagaatttggagggggggaaactgtttgctttcttaaaaacattatatggggcacttacaccagttccttaactgacctgatctgagaactctactgttactgttctccatcttgacccagccgaggctgcctgtgttaagtaacatcaccaagactgttagtatttctgtttaattgccctcttcctattcattctcagagggacttcagtgacttttattttgtgtttacttttctctagagttgtttgtctacctctgtttcatttctaaggtctttactttgggtgaaaatcagtaagtgttccatggacccacagcgaagcccatttgtccttctttccaggtgtctccagtgtagaagcacagcacagaaaacatgttttggagggtaacgcagagcatggagtttctgttagcagtgtcctcagtggcaggataaatactgagatgtggttaaggattctggaaacctctttgcctagccacacttagacttttttcagctaatcctttaaattgaatataatctttagtccgaggattcccatttaaacaactcagtattcttttaagtgtgtcttttagcccagctcaagttaacatgaaactccaggtgaattttcacttactattccattgctagctattatagaataa

SEQ ID NO: 106060 - DNA, 1035 bp, Homo sapiens
gttttttgttgttgttgttgttgttgttgttgtttggtttttttgacacagagtcctgctttgttgcctaggctggagtgcagtggcacgatctcggctcactgcaagctctgcctcctgggttcacgccattctcctccctcagcctccttagtagctgggactacaggtgcctgccaccatgcccagctaattttttgtatttttagtagagacggggtttcacagtgttagccaggatggtctcaatctcctgaccttgtgacccgcccacgtcagcctcccaaagtgctgggattacgcgtgagccaccgcatccagccttgttcttttaaaaaaaaaaaaaaaaaaaaaaagtatcatcaagggagtaccttctgttacagattttgcgaacatgccacatttgctttcttcttagatttgaaggaaactaagcctcacactttactgatcttaagaattatctcactattttactgtgttttcttgacccagagtaccatcctcgaggactgtccacgagggcctgaggaatcaggagctgaactccacagagtcaggtataagcacatgtcatcttaaggaaaagaagacttagtttcttttaatggactatatctgaaaataacttaaaacagtacatttgatgtatagtatgtgtcttcatagaggggtctcttaattgtgactttagagttataactgtctaagatgtgtttagtttaataatcatctctaggctgatagttccgtccatttctaataattgtagctattctttactgatcaaccgttgtgtgccaacggctcagaaggccaatgttaccatccttgactttagctaaagaacctgaagttttccaggcagtgttctttcttaagctagatggttgagaggtagaagtttattctttttaaaacccttttttatgatatgcatactttgtatataaatttcacagtttatgtgaaaaaaataaagcaatggaaaaagaaattgtcccagaggcaattaatgcctgataaatgaga

SEQ ID NO: 106061 - DNA, 1038 bp, Homo sapiens
tgctcccagctttacacagattattattggcaagtgtcttagtgcattctagctgctgtaacaaaataccatacactgggaagtttataaataacagaaatttatctctcacagttctggagactgggaagcccaagatccaggcgttggcagattcaggttctggtgagggtgcatttcctggtccatagttggcaccttctcgttgtgtcctcacatggtagaagggactactagctctgtggatctcttttataagagtactaatctgcatcatgaaggttctgcccttgtgacatgatcaccttccaaaggccccatcttctcataccagcacattggtggataagtttcaatgtgaattttggagagtacaaacattcagaccatagcagcaagaatgcatcttcttgtgggctcttggactgagggcctgagctccttgctgggtgttggctggagccttcctttagttcgttgccatgtgggcctctccgtaaggcagctcacaacatgacaactggcttctgtcagagtgaggaagcaagagagcaagagaggttgaggaagatggaagccagagtctttctgcaacctaacctcgaaagtggcaacccagtttccccctttttaaacagctttctggtgttacaattgacgtaccagctatcaccatagtcagattgagaacattttcatcatttcagaaagaaaccctatactcattagcaatcaacccccactccagcatccacgaatctactttctgtctccataggtttgcctgttctagacatttcacataaatgggatcatggtcttgtgtgactggcttctttcatttagtgtactgctctcagagttcatccatgttgtagtgtgtgtccgttctttattcctttatatagctgaataatattccatgctataaatctgacacattttgtttatctatttaacagttgatggacatttgaattgtttccattttttgactattaagaataagttttatagttttctcctataaaactttct

SEQ ID NO: 106062 - DNA, 1315 bp, Homo sapiens
ccaatccatcatcatgtccctgttcagatgcatctgattccagtccaacaccacaggcttccctttgcttatttgtcacttctttttcccatggtgagaaacctggctcttattattcatagtatatttatttaatgttagtatacacataaagtattaatagttccagatttgctaacccagacctttgtgaccatataatgtttcatctaaattagaacacttttgagagggaaaggggggatgttattaattattatttaagagtaattggtggaaacatagacttttagggaaactgggaaatatggctccctgtatatggtacatattgtactaatttattatcattatggtttatttttgtcttctcacttttctagcatcataaatttcctgttggttgatgcagaaatcattcttgtaaacaatgtgttgaaagctattaaaatggtgactagtaatttatatacttaataggaagcattttctgtaatcataatagactgctttggtgaaaatattgagttccttcattgtcagatggaacagagcagcattgctattcgtttgttttatctggattgcttctgtaagttagaattggaatttctcaggctttccttgagatgttattgcatttagtgcttcggaattgtaagtcttaaaaaagaacattggtcaaagaaatactcatttaagatacttgtctggtgcttaataacatttccctgttaaggtggacacacgtttgcaaaatggatttgctcctgggatgaagctggaggtggctgtgagaacagatcctgagacctactgggttgccaccgttatcactacctgtgagcagttgctccttctccgctatgatggctatggggaggatcggagagcagatttctggtgtgacatcaggaaggctgatctctaccccattgggtggtgtgagcagaataagaagacccttgaagccccagaaggtaatgaaatacttcctatcaagacgtgacgtgattttactgtaagaaaatttggattgtccacagtcttgaggttttaagtctctcgagcatataggtttacccagcttttctaggttagcattttgagtgaaaatatttataaggaataatacacatttccctgtcttttaaaattattttctttgctacataaagcctcaggtttttatgatgctcatagggaacactagctgcatatcatcctttcagactgtgaggttctctgagtttgagatttgtagatctggttgtttttaagcccgttgggccagactgatgtgctgttgattttc

SEQ ID NO: 106063 - DNA, 1041 bp, Homo sapiens
tttgaagggtttttcgtgtctctatctccttcagttctattctgatcttgattatttctggtctcctgctagctttggggtttgtttgctcttggttctctagttgatttagtcgtgacgttaggagatctttctagcttttggatatattttgaagatagtacctacagaattcttctatggattggatataaggtatggagaaaaagggaggggggcaaggataatgacacttttttttttttattaaggtaaaatatttactaggagtatctttcactctgagagtactaagaaaggatcaagttgaaaatttaagtttgaaatgcttattaagtgtcttcaatgtttgacattagaatactaaatttcagtccaaagtgatagtaatggtttatactcctaccagttttatgtgatccatttgggtgaactctagatttgggtgcctcttcagcaagagatagcatgtcaaactgctgttctgtgaagattcgttgacaatcagtgcactaagggcacctatcatttaaaaaacaaaaacaaaacaaaacaaaaccccacttaattcttttgtgcaaaatcagttgtgaagtaaattctgtaaagttaggtttattaagtttatatttttataccttgagttttctttaattgggattcacctgtttttgttttatttttaattctagatgccggctctggtatggaagaggtagaattaagctgggaagattatctagaagaaacagggtccacagcagttccctatgggtcttttaaacatgtaagcaataactatatttgccttactggtgttatatccctttatttcgaatctctgtattatcattagagaatttaaagttattttaatttgtggtacttgaagtaatttaagagctttttctttcctcctgccacccttagtaagaacacttgccatattctttatttttttatttttttatttttttttgagatggagtctcgctttgtcgcccaggctggagtgcagtggcacgatcttggctcactgca

SEQ ID NO: 106064 - DNA, 1319 bp, Homo sapiens
tctgcaacctccgtcccccagactcaagccatcctcccacctcagcctcccaagtagctgaaactacaggcgtgcgccaccatacccagctagtttttgtatttttagtacaggtgaggttttgccatgttgcccaggctggtcccaaactcctgggctcaaaggaatcctctcacttcagcctcccagagtgttgggattacagtcatgagccaccgcttccagccctaaagctgttttttaaaaaaagaataagcaggttcaaagcttattttggaggaattctctttataattgtaggctaatacagttgatatttatggatctgcataatattctagatagatgagatggaaaattagataaagtaatactctatcctgaatcatattcgttgtgtaagacagcattgaaagctaactcccctgtctccctaggagaccattaggaactggagttttgtgtataggaatcatggtgctaagtatggtaatgtaaatttaaagggtaatgattcatatgcatcttactttgttgtgagttttagatttattatcaagatctcgatagtgtgcgttctctacacatacagacgcacatgagcgcacacatacacatacagactcttcaaaattagaaaaggtatcaattttttcctccagtcctatctattctgccagtatgtttttgtcttatgtcatctctcaaccagtcgagtgccctgtttgatgagtgagtgagcacacttgggcttcaggctgtttaatgtgttctttttcatttttcagcactttcatttggacccgtggatacccattgaacagatgcttgaaacctgcaagtaatcttcagatcctagcagaaccataggcctttcctttgttttgggaggatatagcctgcctatatgctgtggaaatgaacggggagcagcagcttgatgcaggtattggttttattctcagaatttattctctaggatgcacaattatattacttgcctgtgttatattgtctgtttctctaccactgaactggaagctctttgaagtcttaagttgtttttcattgccatcttctgtacctctcagagaacctggcactaggggctactaataatgtttgctgaaaaaataagaaactgttatgaacaaggccgggcgcggtggctcatacctgtaatcataacactttgggaggccgaggtgggcagatcacgaggtcaggagatcgagaccatcctggctaacacggtgaaaccccgtctctactaaacaaaatacaaacaattagctgggtgtggtgacgggtgcctgtag

SEQ ID NO: 106065 - DNA, 1181 bp, Homo sapiens
tcatgcctataatcctagcactttgggaggccaaggagggaggattagttgagacgaggagtttgagaccagcctgggcaacctagcgagaccccatctctacaaaaaattgaaaaattagccaggtgcggtggcacgattgtgtagtcttagctacttgggaggctgaacccaggaggtcgaggctgcagtaagccgtgattgcaccatcttactccagcctctccagggacagggcaaaaccctgtctctaaaggaagaaaaaaaatcccttctcaaacctttatctttagcgctgcctccttcttaagctattatttaattttgttgaggttcttgccagctcttcctttttgagagtgcggctaagaaccaaccacacagatctctgggctgttatatctaggactgtaggcagccccacagggacctacctgtaactgcagtgagcagctgtgggggcacagggagggagggtaaactctgttaacttgtggccatgaacatgcagcttggtaggaattccagctatccttaaagggcctcagcctttttactttgtattctctgttgagttcctctatttgctctttaattgctaaggaagacttactgtcctcactgagtggctacgtgtgagtcgtttgctgtcttgacttatggttttgtgtgtttttagaatctttcctttctagtacaataaaatatttttattattttaaaaattaaactgattttggtagaatgctaggaaagggaccaaaaatttagttcatgttaacttactggagaattttggtgggatagcaggttttgaagagatgaagtgcctttttattacagcttattactttactgttgatacttgtaagctgttacttgagacataagcattactgtggcagtttgtgttttcatgtagtgatgtttatggtgttaatattttttcagataattaattttgcttttaataatttaaaactacactttctgtaaagtgatcagttgcatttgggggtagaactttttctgaagcaatgtgcttacatcacttaacccatccatttgcacgcaatattagctcttcaaaacacagcccaacactgagagaaagcaaaatcagttttcaagtgctgacaataattgttataaagctcccgcaccaaagctgatgtatggtt

SEQ ID NO: 106066 - DNA, 1033 bp, Homo sapiens
taaactgatgtggggcagatagggttgttaagtgtcagtatctgtttatctgggaaacttgggttctgtctgagatggtatttggagaggatcttagatgagagttggaaggtggtttgttggcagttgaaagtgtgggacagtcacacatttggaatgacaacatgagctgggatgagaaatttagcaattactaaaatgcctcaggagtttttcttgctgatattcaatttaaagtgttagccaacaagtactcagatttgaattccaaattattattttttataccctgaagagtttttaaaaaagcatttgaggtggctactatggaatatttgctcagtagtaaggctgcccatgggctgccactggttcttcatttctgttcacattaatttgctccccagactagagtgctttcctgtctctcagttttttctagtgttctttcttaaggatcggttcttctaaaatatgctttttctgtgttaaaaatagtatatggtaattttgaattgtaactttaagataccttttggtctcattttgacttgcgtcataaaataaccctcttggagtggttagatggtgatcacaccaatgcacttagcatattgcctgtctagaacatagtgatatataatgaggatataaatttttattattaaaaatgtttatatgtaacaaacctgcgcatcctgcacatgtatcctggaacttaaatgaaatcaaataaaaaaaaagtataccaaaattagccaggtgtggtggcggacacctgtagtcccagctgcttgggaagctgaggcaggagaattgcttgaacccaggaggtgggggttgcagtgagctgagatgacatcactgcactccagcttgggcaacagagagagactctgtaaacgtatggttgtggtaagttatatacatatagcatgaattgtaccattttaaccacttttacacgtacaggtcagtggcattaagtacattgacattgttgtgtaaccattaccaccatccatctctagaa

SEQ ID NO: 106067 - DNA, 3626 bp, Homo sapiens
cgggcccgccgcgcgcccctccccgcgcgcgccccgcgctccgcccgccgagcccccgcggacccgccccccgggctcgctccgggcggggcgcgaacccgcagctggggccgggcgcgcggccggtcggaacttcggagggcccgggcggtcgctgcgcggtggcggagcgtctagtggccgccgcaaccggtggctccgggccgccgttgtgaagtgagcgggcctctcccgcgccgcggcccgccgggcaccgccgctggaccccgcgccgacccggcagcgccccgacctgccgctcgggaggtccgcgaccgtttcgatttctgttcctaaagtccgattttggacgctgaaaaggaggctgtggaggggcgagcggcgtcctgggaagcaaggcctgctctgtgcggagcagaaacgccttgtgcgaacagaaataaattcccgcggaaaggatgtacgttatgctaagtttttcacaagatgtcagctgttcccgtagggtctaaaactaagccggcaggcacaggtcacccccagagcttgtgctcaaggagtggtggacgcttgggtcaggtgggggtgttcccagcgggtcgcccgaagcagcactggttgatggtcccaagtggtgtttttgagtcctgttagcagtgatctgtgtttgagaaccaagtaaccatcaaagagattcgaaaggaagtaagatggattttgtcaatccctgcgtatgtcttctcttgaaccacattttctaagatgtcattcttaattttattgcatctgggtaaaatgcctgaacgtgtaatcattaatttgtcaactggcgagaggatgaaggaagatgtgtcttcatgtgtacactttgaggcctgttgactagcgttttgaggcatttgttgaattaggccgtaggtagattcggagttaagatttgtttgcgatgtcagaaaagttacggcctggtagaaacggccagagatcaggaaacagttctgttattaccgttgtcattgactaactgccttatcttgggcacatttcttacccattgtagctttgattttccttatttgcaacattaagataaacagatgatgtttgggggtgctttcagttcgaaaattcggtggctttcttaactgaaagattcttagaaatcacagtgtatattttgagaggtactacataaaagtgctcgcaatgtgtgtctttattaaaattcatttggaaaaaacatcttggtagctagatccagaatggttttatatgattatttgaatagatttttaacaatgtatttttatggaggtatgtataacctaccgaaagatcttaagggtacaattcaatgactttttatatatgtatatgccctgataaccacactcagatcaagatatggaacattttcaggccttgtatcctttccattcagtaaacacattccccctccccaaggcaaccacaattctgacttctgtcaccacagatgagttttgcctcaaaacaggacccttttgagggttaaaggggcaatactaacaaactgaggatagcttgtatgtaaacttggagttatggccgtgttggccatgaccctttgcttttataatgattcttagggtttttgtaatccagaataacttaaaattctgtcctgaggaacttcttagaaggtcacttttcagtgggggcaatactttgcaggttacgattggtagttcttgggagtccttatgttcacagacaatggtattaatctatgacttcccatttttagaatataggtactatatatttgtagacaacagatttgaagaatgaatcatgaattttcctaacaagttagagtttaaggtgtcagtagatgaatcagtttcttaatgcctagaatttgctgagaaaattgaatgaaaattggtttcttaaagttaagtgaattaagaatgtgtgcgtaaagctttaacaaccttttcaatgacagcagttgacttatatatacaggatagtcagctggtttatcaaatcatttaaagtgcaacaatgaaagcaaaaacaaaaggttaactaaaaattatgtcaggtgtgattaaaaaaatcagcatgactaagatacctttttttttttattaaccctctttctaggaaggtggacttttaaatattctccactgaagcaaatgctgcaacaatttgcatttccttcaccaatgtcgtcttgtgccttttcttgttcctactgtaaaggagatgggttagatgttgtaagtgaattcttattttgttagttcctaacaaaggcttgtgttttttactgcaaagatatctgtgtgataaaagttgggaatgttctaaggcctgtggtgtagggatccatggggaatagtccacaaagttaaaaggttttcttttgtgaaatgatttcgctgaataattctgtctttcccgtgttaagctagccagccaactgactgaccagcaactaagctggatttggtcactccacccaagattcacagcctcattagccaagagagtaattgatgacttagctattattgatacattgtttctttttgtggctctttttaaatttcttgacttttatgtgatcagattgtttaatttaaaatctattacatttttaagagaagcaactaaagagatacacgagaaacaaaatacacaatgaaagggaatttcctttttttgctgttttgttgtaaactcagatttttccttttaaaaatgattgctggctaggcacagtggctcacgcctataatcccagcactttgggaggctaggcaagaggatcgcttgagaccaggagttcgaggccagcctggatgaaagaaaagggagaccctgtgtctccaaaaaaataaaaaaattagccaggcgcggtggtgggcacctatagtcccagctcttcaggaggctgaggtgggaggatcctttgagcccaggagttcgaggctgcagtgagctatgattgcactgctgcactccagcctgggtaacagagtgacactgtctcaaaaaacaaaccaaccaacccagtatgatttgcctatccataatcttcctgcttctgtagtatacttttgctttcacagtgatacctagactgggtttagctgtggaatggtggtgtagcagcaggtatcatttaactctaaagtctgtagaaaagatgaactatacaaacttcattggctttttattttggcgtcatgttatgttcacattaagtaaatagatacagtccaaaaaccaaaaggccattatttaggcagacattttacatctttaatatttttaatgttacattttttctcttataattttccaaaattttgctttcttggattatttggcttataaccaatattttggaataacataaaataaaagaacttgtaatgagtaaatgatacaacttccttatggcagagtatttttcttttagtatatagcattcgttacctaactgggatattttgtatttgaaaataatatttctgtatatacatagttattaaatgggataaaagtgtgtggggattttggttacttgcgagattttaaaccattagagtttggggagtgggattttg

SEQ ID NO: 106068 - DNA, 1038 bp, Homo sapiens
tggctgcctaactgatatggtggtatgttctgtagcaattgaaaaagcattgaaaaagcaattttgaaacgttctatttcggagccagtaaattttgtcttcatctcatttctgaggggcctgaagagttaaagggccctgggtgctccacctgtgaggccgaatgaacactgggccctgggcgcttaggaaggagggaaggggatgccaggagcagggaggtggtgcctggaggctgcctcactgtgaggctggcaggggccaggctctggggcagctcccagccctctctgcttctcccggcttcaccgtggggtgattctcatttttcctggggcccagacagcaggccagccctcaggctggtgggcagtgagaggaggaggacccagacatggctactgctctcagggtagaggcctaggcacttccactgagggggcagtctctcaccttttacttcccgcccccagccccctccctcctccttgcttctgagtgcaaagcccctgcaggagaaatggaactggcacagattataagacagccactgtagatcacaggtcatacattagccagtagatgggccaccctggcctgagcagcatttgctaggtgtaggccagtcagagtggcacggttcatccctcatcgccccttccccagggagctgcatggggacccgtgacataacagctgacttgtgaaggaatcttctagaccatttccctgtcacatttcttctctccctccaataaatgtgtcccaatgttatgaccctattgactctactgtcacaatgttgacaaaggggtttggcagaggccacctgggttcacagtgctcagtgggaaagagacctgaaaaactggcaactcctggtccttccttcccagcggcctctcacctttaatctgctctgcagtgccccatcacaggttggggccttggaacaggctcgggagctgtcatcgcagtcagtgagcagtgactaattaagacacggctgcattagtcacattggaggtgacaactgag

SEQ ID NO: 106069 - DNA, 1351 bp, Homo sapiens
ctgttgatggtcagttttggctattatgaatcaaactgctacagatgcttttgtgtaagtgtttttgtgaacatgtgtgttcatttctgttggatatatacctaggggtgcaattgctgggtcgtaggttaggtgtttgtttattttattaggtgcttgattatggccctcttaaaaggggggaatcaatcccatttgtaagcctcctgttctctgcttagaagatttttccgaagcttgttagctatagaactgcattactttgttttagaagaaaatactattatgggcactggttctcactttggatttgtgtaattttctgctggtcctgggcccctggcttttgttaaaggtcttttcttcaggacctgctcaactgagattcccttaacatgcagggtcactactgactttgagtccaaaccagcaggcctattcatgctgatgaaaaaagggaacagacttgcttgctagccagataagcttttagttgtccagcaagagatctgtacatttattcataattgttcttttttgtgtgtgtgataaggtcttgttctgtcacccaggctggagtgcagtggcactatcatggctcactgcagctctgacctccccagactcaggtgatcctcccacctcaacctcccgagtagctgggactacaggcatgcccaccacacacagctaacttttgtatttttggtagacacggggtttcatcatgttgcccaggctggtctctaacctctgggctctagcagtctgctggccttgggcctcccaaagtgctaggattacaggtgtgagccaccgtgcccagcctgtcattttgttttttgctgattatttagtcaatgccatagaatgttgggaatccttctagattattaagaccctgggctctagcatgcagtctgcccattgctgataccagcagacctcatagtctggttctggttctctgggtactcagcagcactgagggtacatgtgggccttctgattgggctctggagtctcagtgagttgtttccttgtaggtcctgttttgctgcgttcctactgtctctatgttctcctgcttgccatcaatggagtgacagagtgtttcacatttgctgccatgagcaaagaggaggtcgacaggtgggtaacctagcaggtacacctttaatcatggccttcagccaaaatgaaataacttgtcaagctttttgcttttcgttctgaacatgcatttacagatggctgttttagaggcaacacttagtccaccagtgtggtgctcccctgggatctctgtggcaccagcatggttcagcaagtgctccccactgtagggctg

SEQ ID NO: 106070 - DNA, 1048 bp, Homo sapiens
caacatagtgagactcccttctctatttctatttaaaaaaaaaaaaaagaacaaatatcagaggggaaagtgagtgtttcctaagcaatatttgaaacaatttatcccaagtgaattgaaaactaaccctcccccttacgacctaaggagacacacactttttccttcatttgctaactgacgtgaaaacaaacacactacaaaaaaatagtgatatccatcacgctgttggaagagtgaactgtaaaacagtgaagggagaaggccagacgtgaaggatgaaggttttcttcagctcatgattcatccaacttccttccctcttccctggccccaggaggacgttgctgtggctgctgcagtcttggagtccctgctcaagctggccctgctggccggcctgaccatcactgtttttggctttgcctattctcagctggctctggatatctacggagggaccatgcttagctcaggatccggtacgcacaagagtttttctggattttttctgatttcccaacataaatagaagagtcacgaaattcaagaacttgtgcacacacagttgttatctgtgtcagtgtagggaaaactgtctggtggcaggggctgtgggactgttcccctcgttcaactccagacacacactcaaggtataggcaggggcgttggcgccaggacaatcagcttccccagcctcacttggagaagttattaggacttctccttgctgttggctttcctctcgggcctagaatgtgttttgccaagcgcttccctgtgctccctctggggtgagggaggaaggcagagggcagacggtaatgagtctccacttggtactaaacacatctgaagatagtaaatgccacataaatctcccagcctagtgcataaaagcctctgaaggataacccaaagccatttgcagagaataaaattgatctctgcaaataaaatggtatatttaatccagtgactctcagtttttgaagaagaaaagtattgaatgtgtctaattttgaaacaccaggccgctgaggat

SEQ ID NO: 106071 - DNA, 1080 bp, Homo sapiens
tatcttgactgtatcatcgttggtatcctggttgtgatattgtactatagttttacaaaatgttaccactgggtaaagggtatatatgggatccctctattacttcctatttttttgtcttttttatttattttttattttttgagacagggtctcattctattgcccaggctggagtgcagtggtaccatcacagctcactgcagcctcaacctcctgggcttgggtgatcctcccacctcagcctcccaaataactgggactacaaatgcacaccaccacgcctggctaaatttttccatttttgtagagacagggtttttccgtgtttcccaggctcatctcaaactccctggctcaagcagtccacccaccctggcctcccaaagtgctgggattataggcatgagccaccgtgcctggccactattacttcttataactctgtgtgaatctataattatctcaagataaacaaactttaatgaaaatattaaataattttaatagtgctataaaaattaaaatagaaaaaccaacatgattgttgtttcttcttttttgttttgtaggtgtgtatgatatagtgaataatcttggctcccttgtggccagattaattttccagccaatagaggaaagtttttatatattttttgctaaggtgctggagaggggaaaggatgccacacttcagaagcaggtaatgttggttcttatgtcatctctcaagtgaattctccctttaattgcaagacagacaggagtgtgaagcagtctgtttctcttctgtttgatcaggaattttcttatagatttcattcttctattacattcttcatgatagtgggacccagggctcacctcttctttcgtggccttcttgctttgctcttggctgtcccttccttctcacacctttgttattcgttgtgaccttactctttttgggggggggggcggggatagagtcttgctctgacgcccagcctggagtgcagtggcatgacctcggctcactgcaacctccacctcccaggttcaaacgattctcctgcctcagcctcctgagtagctggg

SEQ ID NO: 106072 - DNA, 1032 bp, Homo sapiens
cacccctgaggaacctttggataagcttgtgcatataatcatggactcttcacagataatttacgctcagattatctgacctccccttaagacttgggactatcatcttcattattaacatttaataatctccacatacttttttaaaaacttatttttagggctgggcgtggtggcttacgcctgtaatcccagcactttgggaggctgaggtgggcagatcacgaggtcaggagatcgagaccatcctggctaacacagtgaaaccccatctctactaaaaatacaaaaaaaattagccgggtgcggtggcgggcgcctgtagtcccagctgctcgggagactgaggcaggagaatggcatgaacccagaaggcagagcttgcagggagccgaaatcgtgccactgtactccagcctgggtgacagagcgagactccgtctcaaaaaaaaaaaaaaaaacctttttagacttgttttatttttatttttttttatttgtaatttaactggcttggagatttgctgtcaataaagtcctcagcactttccaaattgttactctgagattatttgaaatcaacattaggacaaggacatgtctttaactgattacctagtatttctcctttatttgtcagctggaaaagttgatagctggtgagagaaaggaaacaataaagtaatgtgcatttgacattgctaattattttgcttttttgtttataggcgagcgatatgtgatgacatttttgaatgtattgaactttggtgatcagggtaagatgaaattctgtagtgttttaattaaaggtgaacactattaatagatacttcctaatatttttctctgatatatttaatgaaagatgaacctgaagattaaagaaaatcctgaagattgtaaattgtaggtctttgtactgactatgccctccaacatgactttggtgtcaggtattctggtgagaccccggccctctattttgcctcctgagagctctggtgttcattttgggaggtgggaggtgcc

SEQ ID NO: 106073 - DNA, 1041 bp, Homo sapiens
gaggaatttgactcagcaagcatgtattaaacattattatatgttaggcactgtaccaggtgccctgagtgaggcccctaccctcagaacttgcatggtgatggagagataggatctgtactcaactatgctataggacagtgtgtgtctagcgttatcaaaatagaagcacagaggaaggactgctgaattccatctaggaacatcaaggaaggcttcacggaggaagcttcttttgtgctggactttgacacatgggtgggcagaggttaaatgtatatgtgtggtagagatgggcattcgtgaccacagaaggaaagaaaatttgctcagtgcttgttacctgcccatcattgtgttggaattgggaatgtagagatgactggggtacttaggttggctggaaaatgggggaagggagagaaaggaaaaggtggcgggaagttatgaagggaagtaaacctggctgccaggctagggtcaggtggcagtggcctcagtgctatggagcttgggtttaattcaggggcagtggagcctaatgaaaggtttttgaacagcaccatgatcaaactgtctgtattgaggagcttgccgtctcttacagagttatagtgtcttattttttttcattcagtcctcatactggctccatgagacaggacttcttatcccattttgcagatgagaaagccaaggcttagcaaaattaagtatcttgttcacggcgacatttacactaataattcaaggaactgcaggtcgagccccaatctccaagcttgactccaaagcctgaacctgcaatgagaaggataggctagagaaagagtaagaagcaaaaaaagctcattgggagcctgtggcaattgtccaggtgaggagtaaggacagggggaggatggatgaaagtgggaggatggataaagctggggcagcatcaatagccccagagtgactgggataggtggagcaagagggagaggaaggagtgctctgtagggtggaggaggtgacagagggcagtggacaggatggtag

SEQ ID NO: 106074 - DNA, 1520 bp, Homo sapiens
tgcagacaaaacccatctggctgctcctggccagaagccattcttttgtcctggatgggtggagggaggggtgggccctcttatcaccctaccctttcttcccctatctgtagtagctcttgccctggcgaagaggagagagccagcagctcaattgtgctttgtaatcattaatggcacaggtttccggggtttatagaaaacccacagtccttgatgacggcaagtccttggatattaacacagttaggatacatagatctttgcagggtgctgactaggtggaagagccgttcctttggccaaatacacaccttttgagaatgtatcagacatggctgtggtaattgagctagtgtacatctgttatggaaattacattctgcctgccgagaagaattatgttcttccagttaagtgaagtgttgggaacactttgcaggtagatgctgcagtggagttgggtctaagtgactagtgccatttcccagagggtaaggcattgctgaatagaaagtgcagttaatcaagagagttctattacttgactggcctttgagatcaaatttataggcatatcttaattatgcctttattaaaacagtttattttttttctcagcttttctataccacagttctggtgctctgctatgttatttatttcacaaagttactgggttccccagaatcaaccaagcttcaaactcttcctgtctccagaataacagatctgttacccaatattacaagaaatggagtaagtaatacatttttatctcttatcattttaatcataggtgctgcttatccttgagagaaagaaactgcaactggtttattgttataatcataaatagaattttatagctcatatttatggagtgcttgctctatgccaggccagggtttctaaatctttgcactgtggacattttgggctgctcaattctttgttgtaggggctgtcctgtgcattgtaggatgtttagcagcatctctgacctcaaaccactagatgccagtagcaaccacccctcagtggagcaccccaaaatgtctccagacgttgccaaatgtcccctgggggacaaaattgcccccagttgacaaccactgtgctagaccctatgctgaatgctttacctgccttatttaatgcttaacaacaaccctgaaaggctgacactgtctgtttctattttagggttgagaaactaaggcttagtgaataaatacctgtcctaggtgagggtcagagtgaggacagcagcctggaggggctcacatgccagcagagcacaggctccaccattgtgttccactctctctattctgctgtggttttggttttcttcctcagttgacttctagcacacagttgagagttctgagaaagtagggatgaacccaaaatggtctttttttttttttctccttgagacagtgtctcattctgtttcccatagtggcgtgatcatagctcactacagccttgacctcctgggctcaagtgatcct

SEQ ID NO: 106075 - DNA, 1038 bp, Homo sapiens
caccataaataaaaaacagatttgctaataatttattagttcaagtcagaatttagaaggaccgtaaaggtttttcagatttttctagtggttatatttagttgtatactaacattaacttttctctcttcatcttttataatagattacaaaagaatatatatttaatgtaaatcttaaagcataatatactgaaagatccatgaacccaccaccctacccaagaagtaaaacgttactgatacttatgtccagctgtgtgccctgcccccacagccagggtgaccactgccctagattttctgtctatcattccattacatcttgactttttgatgatgtttgtaaactgcaccttaaccacatgtttgcaggtgattgcagagagcctgtcggtaattcttaagagcgttctgacagcttttctcgtgctgtggttgcctcactggggattgtacattttctctttggcccaggtaagaatcatggcttttaactttttatatgatctttgtttctccaactggtttttcttcttgttcccaccgccgtgtggtctgcattcacagtacccatgcctgtgcaggaggtggaagcaccagaagggtggccttagcactgcttctctagctgccaggtccattgtgttccatacactgagaccgtaggtgtttctagggacctggtgagggccacacactggacttcattgtcaaacatcaaaaaccccttttagacattcagtgggcaagcctgtttcaaactgatctttggtcatctgatagtcttgtaaaggagaaaaaaatcagtggggggtggggtgggaatcaaattgtatatgtattattttccctggatttccatcttttttttgcagaataggtggaaactctgccaagcctgttttaaacttagtttgaaatctcacataattcagagggcatgaatcaagtcagagtaggtatgtgttcagttttagcaatttaggcttcatttccatctcattgtttcctagttctagttcatatttctggttct

SEQ ID NO: 106076 - DNA, 2538 bp, Homo sapiens
agtcaggaaggagaagagtgggagtaattcattaaaaactctctctcagatataatcctatgttcttgtcctgctgacagcaaaggaaacagaaattcagtagtttgtgaggatgcgcttcataatggcagggctggagcagccaccttccttccctcctcagtgattttataattgggatatggcaactgggattcgagcttgagtctttgtcatcagtttcttggaggctcttggaaagatgacttctttgtcttttagactcagcttgtttcttctactcgcctcctttctgttcaaggacacccacgcatattttgtcttcacaaatgacacaaagtatatgaaatgatgtgagtgctcagaatagctcagcttctcaggtgtgtcttcatgtcctgataaataagacaatatgttccagacagcatttcatgtctaatacttaccaaacatatactcttggctctggtctcagagcttagtggcaggactcaagctttgagcaaaggaatcatctgtggagttttgcactacatagtgctgaacaggggcccaggaatctgaatttttataagctccttaggtgattttgaaacagggaccattctttgagaaatatgttttcttttcctcttcttcaccttcttcttctttttctttttttgagacgacaggcttttgccctatcacccaggctggtgttcagtggcgccatcatggctcactgcagccttgacctcttgggctcaagcgatgctcccgtatgagcctcctgagcagctgggcctacaggtgtgcaccgccacacctgaataatttttttattttttgtagagatgaggtcttactgtgttgcccaggctggtctcgaactcctgggctcaagtgatcctcccatcttagtctcccaaagtgctgggattgtaggcatgagcctgagaaatataggcacttggccctaagaaatactgttttaaaagcaggaaggaagaggggcaaatcctcctaggggctcagatttttctccccaggcagccttcctgagattggcaggtcctgctttgacagcccttgtctggcctgccctgctcccctgcttaaggtttggttccatctccttatttgcagtgttccacagaggcactgggtagcaggataatccttggacaaccccagagaccttaaccctgggctgtccctactctggcttcacccagacggctgtctattgaggaggggagatctcagctactcctcgctaagatgcaggaaggctcacccaggtgctgcccacctgggaggtacccaggcacgccttgctgatctgggttgcagcagcctctgtaatggttgccagccttgttgcctgtcttgagattcttttggccagagcctccactcggtagaggctcagcttttctcacaggggccatcggtcactcgtgtcagtgtgaccaagaagggtggggttataatcttatcttcttctcctccttatggtcatggccacacctctgcctgtagccatgaaggctgaagccttttgaggccactgcagcagtttctatccttcacgtaactgtaggcacacaccctcaggtgtctttcatttggttcctaactcattagttctcatggatcagaccggtagggggtcctgtaagagcccactgccttccacatcaccaccagtggtttatgaccaagactttatctcctccctgttgctggaaaaatcccagaagttctctctatgaaaaaacttgagaccttattgatttctccctttcatttacagactaacgctgctttactcaaccaccctcttcctggccagagaggccttccgcagagcatgtctcagtgggggcacccagcgagactggagccagaccctcaacctgctgtggctaacgtgagttgtgctttggcaggagacacgtttcaggaaggcaggtgtagtgagcattggaaatgaaacagtaacacgtgcctaaagctgaattgcccccagattcagtttcgtcatgggtttctgggagcaggcatacaacaagacggggacagtgtttgtgtcaaaggaacttcttggctcattttctctctggatatccaggagccaggaagaggttctgggttggggtttctgggccaggtttctagccctggtttcatcctctttggaggtggtttcttgctgtttctgaccaccactgtgggctccacttggcctgtgccatcttttttattcctaatctttttgctctataatatcttttgagcttttaacagccacttagatttagtatttcttgaaagccttttatgggttttattacatttttcttcagttttgttatgtgacttcagttctgagtcttttaggatattcttgaagatcaaatacattagcttaaaattgcaatggcttttctccagctaggtccccacagggagggctggggtttgaggttatttcccagtgctgcccttgcataactccttattgcctcacagaaatgactgtcatgaggg

SEQ ID NO: 106077 - DNA, 1033 bp, Homo sapiens
gcctcccaaagtgctgggattacaggcatgagccaccatgcccagccatatctgcatgtttctaaggagcagctacagagctgtcatcagactcaaaagaccacctttgactccataacggttaagatggtgatttcttggctttggagaccttgctgctctgtgatactttaggtacagtgttacacaatgtccctttttggtcatagctgtccccagagattttcagaccacagtagtccattgatatgcttagatcaaatcttccaaattgcaactcttcacagataactctgagggtgcttgacacagaagtgattttcatttgctgctgggatgcagaagggagtcattcagtgaatgaggtttgcactcttcccagcatccccatttagcaaccctgtttaattacagtcttcttgttctctgtgtctcatgggagaagttctttgcttagatggttttcttgaattgacagattggaaagtctcaggaaatgtccctttcaagcggcaataattggacactctctcccttccccccatgttacattacgttatcttatttttgcagcatcatttaaaaggtatttcaacttctccctggaaagagacaagtattcaataaagaaatacattttctatgttctaattgagaaaactgaagttcagaacgatataaatgtcattattgaaattcctagatattatgaggcagaggagaaaagagaaattagtccccatgatttctggtgagtctgctatacccttaaggctcccacttgctaagcgtatgctatttctaaacaggctggggtgggggagtgtggccagggcccggcaaggtgaaccactaactagaattctctttctgcttcctcaagggcttgactttgtagaaactcagtgagtctattggggcctcttggttgttattaataaattagggagccttccaagtgccttcctgggttctttgactactgcacgggagtgctgagagatcccatggaatgaaatttcaggagaaatgc

SEQ ID NO: 106078 - DNA, 1159 bp, Homo sapiens
gcagaatttctggtatttgtgagtccttcacacagcaggctccctaagtacacaccagcctctctaagtaggaggccccagtgggagagatgggctttgactctggggtcaaatgtagataattggactatggacagtggctggctggtcaccaacaatggtgtttgaaacaaacatttagaggccatatttgggcttataaaaatagttctgggccgtgcatggtggctcacacctgcaatcccagcactttgggaggctgaggacagcggatttcttgagctcaggagttgggagaccagcctgggcaacatggtgatacctgtctgtctctttaaaataaaaaaaatcaatgagttatgtgatgggctcatggctacaggtggagaaaggcagtgcatatgcagcctcctccatccttgactaaggctgacagagggctgggcccaccactgctcaccctgaggcctcgtcttctgactcccctcctttcatttctaggtggcattggtgaggctgtgtccagtgcagtagtgggcgagcctggcatcactgtcacccacctggcagttaaccgggtaccaagaagtgggaagccggctgagctgctgaagatgtttggtatcgacagggatgccattgcacaagctgtgaggggcctcatcaccaaggcctagggcgggtatgaagtgtggggcgggggtctatacattcctgagattctgggaaaggtgctcaaagatgtactgagaggaggggtaaatatatgttttgagaaaaatgaattggccctgaaatgttttcttttttgatgtgtttgcagccagtgcaggttctggggaagaagcgtggagggtgcgctagggaggctggtgtccttggtcctgggccaggacctgggtgtcccaagtccccttggaatcacctgcaactgccctcaacctccagaactatcgctgcctcccattcatcaccaggtgacatttgactgcaacctgccttctagctgagaggctgagacctacatccctcattgtgacctcagtccacctggccctgagcgggctggggaactgcctcagtctggaagctgaccaggcactctcagggccgccccacctcccccaagtccccacagccttgcagtcaggtctcctgg

SEQ ID NO: 106079 - DNA, 2335 bp, Homo sapiens
ggcccctagggacagggagcttcctctctctggagggcactcagatctccagagttcttccaactggacctgaaattctctctgtggtttccagagactgctctgcagggcgtggggctggggaggtcccaggtactagggaaagaggccttgtgttggctggcagattttggagccttgaagggcagctggtttggaactgatgactgtactcagtgctgcttctggatgagtgatttggggcctggagcctcagcaggcatgaggctgctgccctcggaccccagggaggggttgggaggaccggtctctgcagaagaaggtggtgggggacatattcagaagcccagaaaggatggacaatctatatacaaattgtggctttctccacaaaaggggtcctaggctccccgaccaccctctgcctgcccctttgggctgaccctgtcccacctgcccccaggtgagcatcgcggtgggctgtgccacccgcaacaggacggtgcccttctgcagcacttttgcagccttcttcacgcgggcctttgaccagattcgcatggccgccatctccgagagcaacatcaacctctgcggctcccactgcggcgtttccatcggtgagtttagccagggtgtttacacctggagctcccttgacttttgcaccaggaggtatgggagggggatgggccaggattccagcccatggatgggggggtaggggtcttatttctgcatatcctttcccccacaccccaggggaagacgggccctcccagatggccctagaagatctggctatgtttcggtcagtccccacatcaactgtcttttacccaagtgatggcgttgctacagagaaggcagtggaactagccgccaatacaaaggtaggttgcatggctgttctttctcctgctggcagccatcacttcccaagggaaacagaagaggaggccagagctggtcacttgctgccccagggggtgtttcctgaccttgcccctggtgttcgtgtagcttgtggaagttagacaagaaaaaacgaaatacacaccccacttactgccacgtggcagacattgtcaactgattgccagtctgtctctgctgagaatcctggcagccctggccggtccagcggttgacacctctccaccctcctgagttgggttctccaagacaggcaaggatgagctgagccctgtggtccaggcccggagctgcatgccacagacccagtgcgcgtggttcctgcccctctgcctggtgcagtctgtgggagtagcccacctgcagccagtctacctggtggaaagttgccttcggtctgaggctgcaaggtggtgggcagttctcagagtgttcaagtggggtgcgggcggcagagggcaagcaaggcccttttccctgctggagtagccaggatgcagtaactaacgctcccatgggaagggatggcctctctagaaagacctcgtctctgaggttgggtgtgccacatcctgtatcctcagtttatctgtttcggtctcagggtatctgcttcatccggaccagccgcccagaaaatgccatcatctataacaacaatgaggacttccaggtcggacaagccaaggtcagtgcctcgcatgccccaggagcccacagagctgcctggaccctccctgctgtgactcccagcagtcagggcacaccctgccccagggccctgagccttactcaccctctgtgtcacccccaggtggtcctgaagagcaaggatgaccaggtgaccgttatcggggctggggtgaccctgcacgaggccttggccgctgccgaactgctgaagaaaggtgaggagaaggggcctccaaagtcatcaactgagcggccactgcatgctaggtcttggggttctttctttcgttctttctgttctttcttgaagagctcacagctagagagaaagcatttcatttcattaaataatgatagcaattatagccatcctttgagcacttgttctgtctggcatgttgctaagtcctggggctgcagtgcccacagtccctaccctatgactctaaagtcgagacccccccagcatggtggccagatcagtggcctggagcctgccagctgggctggaatcactcagccaggcactagttaaggaagtaagttattcactgtcaccatgcctgttttcctatctgtaaaatggagatactagccccttgccctcagagctctcctgagggttacatgcatgtgacttggtattctattattattactgcgagctcacagtgttggctagtggtttgtaggggagacaggcatt

SEQ ID NO: 106080 - DNA, 1277 bp, Homo sapiens
tgaagtcctggctccaccgctaacttgctttgtggcgtgggtcacgttacttactccaccttcggtgtctcagttgatttgtctgtacaatggggccagctcagcacccaagcatggcgtggtgaggcttcagtgggctaatatgggtagtggttggcatggcactcagtttgagaagtgctatttttattcttatgtcaaaaagagtccccaaaaggatagcttttcaagagaaagggtgctctgccccagctccttcctgtatatttgactccatggttcatttcaaaaacatttccagcaccacatccagcatctgtggagtgatcaaatgtgttccccaaataagaattgggccaaaaaattcatcaagaatctaatagcagacagattccaaacccagtgcgctgaccccagaacagctttcagtaggaaatgagcagatcaggaatgaaagagacaataaaggaactgagctctggattacttaagaggaggaggaaaacctgttcagaggcaaacaaaaggaagtaaaataatgtgaaaaagaaaaggatttaaaaaacccaaactggaaacaggaatgttgcaagctttctactactccagctgaggccgcagttgtggggtggagcctgggcagaccccagctgccaaggcagacctttccctggaaggctcctcggtgttgtggcccctgggaattgccccttactctctgccccctgtccccagttggcatgccatcatcgtggatggacacagcgtggaggagctgtgcaaggcctttggccaggccaagcaccagccaacagccatcattgccaagaccttcaagggccgagggatcacgggtcagtatgcacaagccgccctccccaccttcacccctcgcccagacactgtggctacgtagctctgacccgcacatccagggaaacagcccttgctgctcactgagctcaccaggctccagggaaggggagcgggagatgctgtgactcagtgacccctgtggctgagccaggatttaaactcagatccgtctggcctctgccggtgggggcatgtacaggcaggaggagaggagggacttggagggtctgtgggtgagaggaaggtcgtggagtgaggcagcccccgtgccccaccctggctggtgcctttcagagctgcagctgtgtgtgctctgccagctccggccacctgctccagctgaagggccgacacagagccaggcagggcccggagagaactgttccctccaggaggtgagt

SEQ ID NO: 106081 - DNA, 1063 bp, Homo sapiens
tacagacgcgcaccaccacactcagctaatttttatatatttagtagagacggggtttcatgacgttggccaggatggtcagtctcaaactcctgacctcaggtcatctccctacttcagcctcccagagtgctgggattacaggcgtgagccactgcacacatcctgagagctggttttaatgatcacataatattctgttttatggagatgctataatccatctagccagtcctttgttgttggacacgtaaggtagtttccaaatcgttctacaacaaatgtcgaccttctgtttagggttccctctcttcaaattagttcatgaatggatgtttgcagccccccacccctaactctaacagctcaggcaataccaagcctcagggttagcccaggctcctgtaggccccttccctgttcacaaccccttccttggcatctcctcgggacctcagcacgccctctgacctgagcctgatggccctgtagggcttagccttgtccctagtctcgaagccaaagctgtgctgggcctccagtgctagcctcggttcgacttccctggaagtgggtgtgggcttggggtggcagccagttgccttccctggaatccctttctgggaagtcgagttggcttctctggctcagccccatcatgtggcccctttctggagctgctgtgccagaccagagtccctgcagggtctctgggccccctcaaaacctacaggggaaagaggaggcaaggctgggacaggatagggcctctgaagtgtgggcctgaggctttgtccttctggccatggtaccccacaggggcaccacctcctgtggtggaggccacagaagagcagtatgaggcaggagaggctgcagggagtgctcctggcctgctggcatgtggaagtgctgagtcatgctgacagctccgtggctagctgtcccagcctcttcctgctgcccctgccttggccctgcggcagggaggcctggaggcttggactgctgagcatgcagccgggttgagggccttttcctgcaggagcaggagggcagccat

SEQ ID NO: 106082 - DNA, 1091 bp, Homo sapiens
gccccctcggggtggtggtgtgctgtagcagggttttggatggggaccccctgaccccccccttctgggtggaatcacagccacagatccctgaaatccacctgtgctcaggcctgcctccgtggcgtttggtctctcgggcaggctttagagcttagaagtctgtccaagttgttcccatgccacaaaccagggattagggcagccggctgcctgctggggttttggcttcgtccagcctcacagctgtgccccctgcacctgtcttagtgcctgcctggccttggcagtgggaactttgggctgaaaaccaagaggctgaagagggctgaaaggggagaagtggccttcacttgcttcctcccctgaaatggatgctgcagttggccggctcggccgggccccaggggtcagtgtgaagtaggcacagcccgaagtagaaccgctccccacctgacctcaccccaccatccatctcccggcagggccatgcagctcccatcctctacgcggtctgggctgaagctggtttcctggccgaggcggagctgctgaacctgaggaagatcagctccgacttggacgggcacccggtcccggtaagtgctcctgccagagcctcccatgcctctgcctccacttcctatttcccagacatgtgggacgggggtagggggtgcccactgagaagccaaaggtgttgaaaggcggaggagggcattgagttgaggaaggaaagaagcaggtgttttggggacacgtattcaacccaagctggtgccaaaggggaaggccttctgaggcctcagccagggtgctctgggatgacttcagggagggcctctccccaagctacccttctgcactgggcctccttggctaggtagctacagcttgggaagagaggggactcgataagggagtggctgcaggatgctggcgaaaccctggggaagggacccagtttgttccttggggtgccatctggcatccctgcaaacgttaagacttcatggattaccacaaaaactgtcacatggtctgggtccccacgaggggcaaatgttctgtcaattttttcatgattctct

SEQ ID NO: 106083 - DNA, 1294 bp, Homo sapiens
ggaggtgtaggcgagtggatcacctgaaggtcaggagatcgagaccagcttggccaacatggtgaaaccctgtccctactaaaaatacaaaaaattagctggacgtggtggcgggcgcctgtaatcccagctactcaggaggctgaggcaggagaatcacttgaacccgggaggcagaagttgcggtgagctgagattgcaccattgcactctggcctgggcaacaaaattgaaacttcttctcaaaaaaaaaaaagaatgcctcttgggcaagcagtctgtgccaggctggagaatggtgaaaaaggtgaaagggaaggccaggtacagccgcggtggatattagtcagtctgaaaggcacttggagagaaataagatttacaaatgtagggtgctccaaaagagtggaatgtcaagtgtgtctcctagttctttgttaggcaaagtctgatttcctcaccgccgttacccctccggaaacatactgtggtgtccgagagttacaccatgtttacattgtaatgtcttggagagggaagctcactgaactcaaaaaatatccatttgcaaaagaaaaaaaggatatgtaaaatacagtgactgtgtgtgtgtatgtatatgtttaaaatatgcaaaaaaggagggaaaacttatttttcagaaggaaataacgttgctatgcaacccatattttgaaagttgtgagccaagagtatgtgtgtgtttgcacccaaaagctaatcaaggaagacttgagacacaggtagtcttctgtttcttgtccccagatgtttatcttgaggcccactgttccctctctgcaatgaggcatagagtgaaggctcagtccggaagccctggcccaatctgggctgtagtcacagctaaagtgacagtttgtcagaatgtccccttttctgggggagctcacaggactttgatccagttctttttcttttgagatggagtttcactcttgttgcccaggctggagtgcaatggtgcgatcttggctcaccacaaactccgcctcccaggttcaagcaattctcctgcctcagcctcccaagtagctgggattacaggcatgcaccaccacgcccggctaattttgtatttttaccccgtagagacggggtttctccatgttgaggttggtcttgaactcctgacctcaggtgatccgcccgcctcggcctcccaaagtgctgggattataggcgtgagccaccgctcctggccccttttccttttttctttttttttaagacagggtcttgctgtgtcacccac

SEQ ID NO: 106084 - DNA, 2884 bp, Homo sapiens
ccattgcactccagcctgggcaacaacagcgaaactcagtctcaaaattaagtcctgcagtctcttgggcctggggttggtcggctggggccaagcctggcacccaccagccttgtgaccttgattgcccttgccaagcctcagtttgtccatctctaaaatgggattcgccgtgacaagtccacggaggactgtgtggaggagggagactgagaggctttcgagtcaggagcccagactcgaatcctgagttgttcgttatgttattattattggtgtgtgtggttaactgctaacctcgcagtccgcagcggcccagcgcctaggggaggggagcgggcaggaggcggccccaggcggggcggggctgaaggcctggggtgatccgagccccgcctcctccccctgccccgcctctcccatccccgccccgccccgcccggcgacttaacgcgcccccgccccgcgcccggcctcggcagccgcctgtcgccgcgggagcagccgctatctctgtgtgtccgcgtgtgcgcccggtccccgcctgccgcaccatggagagctaccacaagcctgaccagcagaagctgcaggccttgaaggacacggccaaccgcctacgtatcagctccatccaggccaccactgcggcgggctctgggtgagtgcgcggcgccggccggggacgcggctcgggcggggcggggggcgtctgcggcggccagagtcgccgcgggctctgggtcgcgctgcgagatgcctagacgaggaaggtggcccgggcgccgtcggagggcggagacgcgcgcctcgcagggccccgggctgcaggcggcttccgctgcgccgcacactcgccctacgcccgggctcggccgcgtgggcctctggtcctccgtgcgcctcaggccggctcttccccacgcggatcgccggccgcgcagctgcatggtggcgcgggggatgggctcgcgactcgccaagtaccctctagggtgatgccgggaaggccaccattactgctgttctacagaacgcggccctcttaaccctctccaccacctggctgtgtgggcgccgccgggagtgttcccccttccagatggggaaacggaggctccgagttagtcagctacccaaagttacacacagggagatctgatttgagccccagcagtccgactctagagaccctgtttttaattcctcttgcaggagactcgggggcccggccttctccccacctcagactacgctcccctacccctgtctcctgccacccctgggttgggtccgagtttggagcagggggctgctgagacgccaggcagcggcggggctgattgggggaagaggggaggagggcggtggcacgtgggtgcagaaccctgggatccattgtgaaaaggaggtctaagatttgacctggggcgggaggaggcggagggcaaggagactgagaaggctgagcgccggaaggacggagttccagggccctagcgccgggagtgacgtcctggggcagggccagccaccaggtgctgtatctcccaggcaggagctggcgtgcctaggccccaagatccttccctggccagcccttttggcccagaaggtggacacccaaggagcctcctctgtagcggagacagggataattaatgagggccaccgtgcatgcagctggaggtgtccagtggggtgggtgagggggtcagtcagtgaattacttcagagcctgcttcccgctctgtaaagcggggacagtaatggcacttaaccacgctgggtggtttcaaggactccagtgctctacttggaggctgctttgaggccacagtgccagcagtgctccgggctcatgacagggttgtgagggctgcgtgatggatgatttctcgggaccttcccaaacaagctctgtttcagacagacaagattctggcttctggccaatttcattcaggatatattattaagaagtaaatctgttcacctttctgggtggatacgcattcaccctttgtgcctctaagacaccctgttctcagaagggattagatgtctttcaaagcccttcccccacccactgccttgcacactttggacctgttagctctcctgggtttgtgtcagtcttaccacttatgtggggtatcccctgcctgggcagggacctggcttactctcagctcccctttcaccagcctggcacacggtagctctgcaggccttgtattgcttatttggtactgttggacctgctacctttggccgtttcagggggtctgaggtctagctggagagaggcagcaattacccaactaagtagtattgcacatctgagcatctttcagggctagataaaacatgcagatgtttacagggttcctgagctgccaagtaggtatctggtatgacacagcatcatcgtttgttgcatcctgagaataaccctgtgagatagattgtgttgtattcacattttatagacgggaacactgaggctagtgtgttaagttacttgcccaggctgggaattggtggccattccgtactgtctggttggggctcatgctgtcaggaatgcttcttggcagggcatggtggttcatgcctgtaatcacagcactttgggaggccaaggtgggaggattgcttgagcccaggagttccagaccaacctgggcaacacagtgagaccccatagcttaaaaaaaaaattttttttttgagatggagtcttgctctatcgcccaggctagagtgcagcagcacaatcttggctcactgcaacctctgcctcccaggttcaactgattctcctgccctagcctcctgagtagctgggactacaggcatccgccaccgcaccggctaattt

SEQ ID NO: 106085 - DNA, 1866 bp, Homo sapiens
ccaatgtattcctaggctgtgagtactttcccggcccaaagtgtgaaaatatgtaaagaagctttgttatgctgctattgatctgccatgatttctatttattcttttatggcatgtaatggtgtttagtaatattttaatgtagattttgatttatttcagcaatagtaattttaagatattctttgaatgaaagtgtcttcgtttctatgatacaggtcattttgtagtatttaaccaattaagatgcactgcttacttttctgagcactatttaatgatggggtaaaaacccaattggctcaaccagctagcataaggattagctgtgaataatgctgacagatatgatggttccttaggaacaatcatttaagctttaatggtaactcaatcataagtccatagattatttttttctagctaaaattttagaaaattacttgtgaattacatacttgttttagtttggtcttagtttttagcataaagaatgattggcttttgttgatctaaacatgcttcctggacagggtttctgcttctcattttagtgtcttctattgctgtctacctaattatgtgtgaattgtgcagaattcagggaagcttataagttttcatgctcaattgtgaatagtttgttttcacagatagtatgtaaattaagcaaccaaaaatgaattccttatgcatcatctgggaacgagaaagctatagtgggatacagagtgttgctgacaccgggagatggtgtccagggagccacgtgacttccataaagtggacgcaccagtaggtgtgattgcacctcaagtgtagtctcagtgggcttcggtgaacagacgaatcaagggattcttgaatcgaaattatgcttttgagtatgtaatattatgagagagttaagagagaatatcctaaagagagtctgtgatcatactaattttcacctttaatgctaggaatggatatgatagacagtaaagagcatctatgataaggcttccttagtgtgaaagtaaacttaagtgcccaagtcatggagacttgaaaagggtaaacctgtttcacctcccaaatttatatattcaaagtatttacttaaaattcagaagccagaagttcatgtcatgattaccaggaagttcaggccagaatgaatccctagagaagccaggccaagcctggataattgcagctggatgaccctggcccgaaagtcacagttcagttgccttattcctagttcaggcttactatctagaacctcatgctagcttaggttgcatgtttacattgctgcagtgtctttactggaagcttagttggatcgaaatggacaccgagatggagatgcttctggctagatttcgcagaaccccaggagacctgcatttagaccactctgtccatttgtgtgcccacccccacccccagggtctaagtgtagactccaagaggagcagcccagagcttggaggagaggtgtgtctggggcaccactggtgggtggtgctgctcttctttttgttgtagttaatgcggtgtcttttaatggactctcaggcctcccagacagccttgttcctttaaggcagaagctcttcttcattgtgtacctcctgggattcatgaggtgtgagatttggcctgcttgactttgaattcaagtttttcaagtgactctcagtgtcagaagaagcatttcatgctgtccacatgtggtatgtccacagctcaccttcaaaggcttagatgtagccatcacagagagtggtattttattaagaacccaagtcccagcctgaccaacatggtgaaaccccatctctactaaaaatacaaaaattagccgggcgtggt

SEQ ID NO: 106086 - DNA, 1288 bp, Homo sapiens
gaaaaacaaataaataagattaaaagaatatgtgataaagtaataccattatctttttcttaaaaaggtgataaaaataacagttgtggccaacactgttgtctaaaattaggtgctcaatgttctagaaattttattgcatgttatttacattggagtacagagcaaacattttgaggttggtttttcttcttctttttaaaaaataacatttttgataacctcagatgctgttttgtgagccaaataatagcaaatttttttcacaagatatatttttttcttttaactttttaaagaatcagatgggtgactcaaatatctccagccctgggttacagccaagcactcagctctccaatctgggaagcaccgagactctagaagaaatgccctccgggtcacaggataaggtttgtacagctaaagctctagctttgtcctaagtaacaaagagtaacattcagtaaggattctaatgagtgcaagtttgatttgtcagttgtgtcaaggttcaaatgtgcagcaacataatgacatcctcctaggtcatgatccgagtaactgtttaatctggattttgcagtagcctgctacctggtttcccatcttttgctccctggttgcttcttacctattcttaacccaacagccagagtaatccttgcaaaacataagtcagatcatggcactcctctgcttaaaaccctccagcagtgtccgagctcactcaaatcatagccaggatcatgacagtggcccacgaggccctaccttatctggcccctctaccccaggcctcatctgtcactctgcattgctcacctggctccagtcccattggctctcttgtctttccccaaatgtgccagatatgttcctgcctcgagacaggcctttgcacttgttcccttggcctgtaatactttcctcccagatagggcttgctccctttactccctcaagcctcatatgtcctccataagtcaggccttctctgactaccctatttaaaataacccttggctaggcacagtggctcacacctataacgccagcactttggaaggttgaggcaggcagatcgcttgagcccaggagtttgaaaccagcctggccaattgacgaaaccctgtctctactaaaaatacaaaaattagctgggtgtggtggcacgtgcctgtaatgccagctactcaggaggctgcagcaccagaatggcttgaaccctggaggcagaggttgcagtgagccgagattgcaccagtgcactccagtctgagcaaca

SEQ ID NO: 106087 - DNA, 1033 bp, Homo sapiens
gtgacactgttagttcaaatgttttaaaaatacatatattgctttctggctcattgtaggcgctgcttagtattctggtagagcctttaccaagtgccttcttggtaactttgtaaatccatgaacatttcagaatttccaaagcagattcttttcattatgattcactaattactggctttttcctcctcaggtagtgttgtcagataaaagcactttttatctttttttttttattgtggtgttatctaaattgtaaagatttgtaaagttaaccatgcctgtatcatttatcttttagataattatgttaaatattcaatacttcaaatgttttttcttttgagaactcacaaaggaaatcattgtttgtacttaagtgacagaaatatgttaacatgtaatatgtaggttttcaccttctgtttacacaatgaagttatctgtgtaggtaaaaattgaaacagagtaaccgctagtctaagcgaagctcctctggagtgtgcagaataaacctccagactgggcccttcaggttcagtgtgctggaggatccaggcaggtctgagtcacttacaaagtcactgcttccaggcatgctcagcttctgctttttcttttcttttttttttttcctgagacggagttttgctcttgtcacccaggctggagtacagtggcgcaatctcggctcactgcaacctccaccacccaggttcaagtgattcttctgcctcagcctcctgagctgggattacaggcacacgccaccatgcccggctaatttttgtattgttagtagaaatgggatttcaccatgttggccaggctggtcttgaactcctgacttcaggtgatccacctgcctcggcctcccaaagtgctgggattacagacgtgagccaccacgcccggcctttgtttttgttgttgttgtttttttgttgttgttttgttttgtttttttgaggtggaatcttgctctgttgcccagactggagtgcactggcacaatctcagctcaccgcaacct

SEQ ID NO: 106088 - DNA, 1511 bp, Homo sapiens
agagaaaattcttacactgactaagggcttaggcttggtgattctcttaaatctttgtggggtagtggtggtggtggtggtggttgttttcaaaagacaaggtctcactgtgttgcccaggctggtcttgaactcctgggctcaagcaattctcccgcctcagcctcccgaagtgctagcatgggccaccatgtccagcctcttgaatcttttgggaacagtgtatttttattctgtgcaagggccttttggcagtcacaagaccccagtgggattgcaatgaattatggggaggttataaattctggagttattgagtagcagtggtatttctagcaccttatttctgatcctcaacttacaggttgagaaaacaagaggctcagagctgtttaggaatctgctcgagattcgcaaaggtaataagtgacagatggagaatttgggagtaggtctttcgggcttcaaggccaatgttctttccactctactgtaacaataaaattacttcatcaatccatattctagagtagtgctatccactaaaactttgcaattagggaaaatgatagttccgtgtcagcactgtcccatatagtagcctgcaatgtggctagggcaaatgaagaacacttctttttagtttatttaatttaatatattagaatttacatggctgtatgtgctggcagctgccatactggacagtggaagtctcagcatgagctcatgtgctaacatgctctttgttgtgccatacctgaatcaaacaactacttgggaagctttggcttagatttttatgcgtcctatttagtcattcctttttgaaacttacaaatgatttctagatacaaaagctgcagaatatatccctgagggtggctttgccatggtaacattcttttggcatggaatttagtttgcagataagaattctattctgggctttgccttactgactataaccttggctaaatcatttaaaccactgatttgacctatttatcttaaaaggccatcatgaaagtaaggtattttgttaggcatttacaaatacaaaatatcatagactgtgtctccattctagactcaacaaatgatctcattagtgaaagaatcctagggacatcagtgttatccacacctggcctatccagattctcttataacacaggcctgtgatatgcttcttcctatcccttctgatagtaccatgcatgagctgcaggctctttgtgtctctttacaagtattattttcaaatgttgtaggggccattactagaaagcctgaggtatacattggaaaaatatatatattaaaaatgagaagtcttggccaggtatggtggctcacgcctgtatcccagcactttgggaggccaaggcgggtggatcacctgcggtcaggagttcaagaccagcctggccaacacggcgaaaccccatctctactaaaaatacaaaaaaattagccggacatggtggtgcacgcctgtagtcccagct

SEQ ID NO: 106089 - DNA, 1080 bp, Homo sapiens
gcatggggcttacatcctagtggggggaggacaataaatactaaaaataagtggtatggataaaagaggaaggttagagatattgagcttgggagcattaaaaaggatagttcaagtaggcctcatgaaaaaggtgacatctgaacaaaggcttggaggagatgagatagctgtgcagcttctggggcagtaatccaggaagaggtttttaggtagaagcacacacgcagagagagtggcaaggagcccggtgtggctggagagtaggagctggagaagagccataggaaatgaagtcagagtggggagtatatcaggtggggccttggtggcctcagtaaggactttggcctttactctgagagactgtctttggagacttctcgtcagaggaggagtatgatctgacttaaattttttgtttacagatgtaagtgctgataatattgtataatgttctaatgcattcttttttgaaatgaaaataaagtacatagtagataacatttctacagattaaatggtaactacatatttttttttcttctattaaatctaaggtcagcttccccttaccatggttttaccattgtgaatcgactaaatatgcacaatctagttgaaccagtgaataaagatttggaatttcagctccatgaaccatttcttctgtatagaaatgcaagctgtgagtatatctgttttattatagttattacatttaaaattgagtgactttagtttctatcaatccattatttaggaagtttcaaattacaaaacaaaatatggtctctacttaatgattataaatgagtctgttggaaagatcaaaccttttaaactgggctctgaggccagaggtggtggctcatgcctgtaatcccagcactttgggaggccgaggagggcagatcacttgaggtcaggagttcgagaccagccaggccaacatggtgaaaccccgtatctactaaaaatacagaaaaaaattagccgggcttggtggcaggcgcctgtaatcacttgaacctgggaggtggaggttgcagtgagctgagatcgcgccactgtactcca

SEQ ID NO: 106090 - DNA, 1036 bp, Homo sapiens
ttaccagcctagcaaagcaatttcaaaataataatgattgagtctaaaatggatgcctgcgtctctcttcctacccccatattagaaagaaaaagaaagatatatatttggggaaaagacaatacatagactggctctgtaaaataatgttattgagaggtcgatccctctgttctttcattactacatgagtggttgtcttttatgactggttctgtcctctttcccaacccacagaagttctggattatgtacagtgtcttatttgagagttctttagaaagcttggattattcatgatggcgtattttttatttttgacttattcaaaaattcattatctttaagattggtttgcaaattgcaacttttttgttaggcagcttttggggcctaaagacaactgacagtatatgatagtcatggggtacttgttttcctggattcctctaaggtcttaactcttacaagggcaggttccttcccttgttttctaaagcttagggagtcagcaggagttattactgatatctggtcttttcccttttttttttgtattgagttgcttcataaggattgcctttctccattgatgccaatttaaaagaatttgtcaaatactcttctaaattttgatacaaagctttgagatctcgtctaaatgcactcatttttttcttcttttaagtgtaattctttgatatttgtacaccaagctcttttttcttagacactttctttgttccctgctattcatctttctgcttttaaaaaggaagggatcggccgggtgcagtggctcacgcctgtaatcccagcactttgggaggccgaggtgggcggatcacgaggtcaggagatcaagaccatcctggctaacacggtgaaaccctgtctctactaaaaatacaaaaaattagctgggcatggtggcaggcacctgtagtcccagctacttgagaggctgaggcaggagaatatcgtgaacccaggaggcggagcttgcagtgagccgaggtcgtgccactgcactcca

SEQ ID NO: 106091 - DNA, 1039 bp, Homo sapiens
gaaatgatatagaatgtaatcttctgtgtgcatcacaagtttgtcctttttatggctgtatagtagtccattgtatggatataccacaatttgtttatccctgtacctgctgttggacattagagtctaaacattggaaacattgttttggctatgaaaaataaccaggttttggctattacaaataaagtggctatgaacattttatataggtgtttgtgtacacacatatatgcttttattacccttgggaaaaatagcaaagactgcagttgctgggccatattgtatgtaggtggggttttggccctcattatttttgatgctccctggtgatacacctgtgaacgtattatgttacagggcaaaagggactgactgtgcagatggaattaagcttgctgatcaactgactttaagataggaaaattaccctggaagtgggcaagcccagggttatcacatggacccttaaaatcagaaagggagggcataagccaatcagagagacatggtagaaggagaggtcagacttaaagagtgagaactcaacctgctgactttgaagacagggaaaggaggccatgagccaggcattgctgatgtcttctagaaggtgagaaggacccccagctgtgacagcaagagtggggacctgtcttatgtaactaaattctgccagcaacccgaattagtctgaaagtggattctcccccagagaataagagtccagacttatagttttagcttttgcatgtagctctatgattcattttgagataattttatataaggtatctgtgaagtaagagttgaagttcactccttaacctgaatatccagttgttctagcatcatttgttgaaaaactatgcttgttgaataactttggctcctttgtgaaataaattatgtatgtgtgtttatttcggaactttctattctttcctattggactgtatgtctcttcatacaccaatcccactatgtcttgattaatgtagctttatggtgtatctggaaatcaggtagtataagt

SEQ ID NO: 106092 - DNA, 1045 bp, Homo sapiens
agagtcctgaaggtgattaggagctaaccagagggaggagggaatctcagggaagaagaacagtgtggaagacacttgtgccaacagaggatgtgaagtgttggaggcccagccagtagattaggatgtctggagttaaggaaggggactgaagatcttagcaggggccatatcatgagggtcgtgtaagccacagagtctgacctcttgtgaaggcagtggatcacgttgaaaggctttactatagtaagagccaacattcctcgaatgcttcctgtggcccagctctgagttacatgtataactcatttaattctcacagtaactgtgagttaggagcttcattcagagcaaggaagtggcagtctgaatttgcagacagatccgtgaattcagagcctgggcccggattctatagcaacatttcttcagtcacataaatgctcaataactgtatgttaatttgtagtggacaatttttgtttcatttatttaaacaaatatttgttgagctatgtactataactcaggtcaagggaacataataaacaatgagtttgtgtttaggtagagagcggtaattggatacttctcaaagaactttattgaattattttgatacctttgagtcagcttcttagtttagcttgttatgtgtatgttgtttaactttgttacctgcatattatttacaaagtcacacatctatgttttatatctgcagcaaatccagagcaacttcatcattgtcatacatccaggttcaacaactttaaggattggtcgagccacagacactcttcctgccagcattcctcacgtcattgcccgaagacacaaacaacaagggcagcccctatacaaggacagttggctcctaagggagggactaaatgtaagtcaaaaacgacctggagagaaagcctaaggttgtttccctgggagggcttagacacaagtacaccagaatcttaaagaaacatcttcatagctttgctgtgttttaaaacattaataatgtcactaatttttcatcagagctagt

SEQ ID NO: 106093 - DNA, 1033 bp, Homo sapiens
attcagtaaatgtggaccacataccatggatatttactctgctacagccagtgggctgcctctgttccttgaacgtggccatttcattcccttctcaaggcctctgcacttagctattctttcagcgtggagacctaatggctgcttcctttgacttcccgcccccagttctcaagccatgtgtcatctctttggaaagattcctaatcaccttccagaaaatgaaaattacatgctgaaaatctattttgagtttaacaactttggttaagattttatgttctaatacttagaactgacaaagatctaattttatgttgattttggagagagcattttccccagaaaagttcataataggacaagacaacatccttcacctcatttgggatttgtgcagcacaatcataaaggatcatttctgcaaaaatattagggcagggccgttaattttcccaagggcctttcttaatctagaccatgccaccatcatctctcacctgctctacgctagtttccttctaaatgaaatctcaggttcagtcttttaccatccttaggcagttttacaaactgtagcaagatcgatcttaaaacggagatcatctcgttcccttgcctaaaaccttttggacactaaaatttagtgacttcctattgctcttaaaatccagttccttgtcatggcctgcaggcccaaggtgacttgtcctcttgattgctcctctcactgtacttccagccacatctccccacccagattatgctctggcaacattgttgttttagtttatgaacacccccacccagattatgctctggcaacattgttgttttagtttgtgaacaccccgggttttactgatacctccaggactctgcccatacttgtccctctacctggaaccctcttcctcggactccttgcacatccagctcattttatcctttagccctctgcttagttgtcaccacttctgggtgcccttccctggccactcatctccgtgtttattttcttcatagtaattca

SEQ ID NO: 106094 - DNA, 1104 bp, Homo sapiens
attggggaagagccctgactgtggagttaaacaggcttggttaggagatgcattagttctgtgtatcggttatctattgtgaacatgatgctgtggaataaaactcaccagcacctccatggcatacacagcatttgttattcacacttcaggggtgtctaggcagctctgttgatcttgagtgagcttcctcacatatctgggggtgatggggtgtctggactctgggctacatagctcatcctccagcaggctagcctgagcatgctctcaagtgaatataggcccagccacataaatactttttaagcctgtttgcagcacatttgctaacatctcagtgaccaaagcaagtcacatggccaaacccagagttgaagtggatgtacacattacatgagaaagagcttggaaacatggaggagtgaagaattggggtcatttttgtaatctattatactgtgtgggcttgggaaagttaactgaactctttgagccccacttttcccttctcttggaaaaggtctcctgatctctagccatcaagtgtgtgtgaggatcaaataagagaatttgattagacgggtatgattcatggttgtttaagcttacaaaattgctgtgaaactgatattaaccacgtttccaggctaagggaagtaaatggatacccctttggttggtttcttcatttgaagattagatactgtattagtcacggttctccagggaaacagaatcaacagggtgtatatctatatgagaaatttattttaagaaattggctcatgtgattggtgggtccaaaatcccatggggcaggccagcaggcgactatggaagagttgcaattcaagttcaaaggcagaattcctggcggaattcctttttgctcagtagaggtcaatcttcattattaatagacctttaactgattggatgaggcccactcatattatggagggcaatctgctttactcaaaattgacctatttaaatgttaatttcatccaacaccctcacacaaacatccagaataatgtttgatcaaatatctgggcaccgtggcccagccaagttgatgcacaaaattaatcaacacaa

SEQ ID NO: 106095 - DNA, 1034 bp, Homo sapiens
ttggggaaggctctgttctactggctttgaagctatgatgaagaatgcagctgctgggcaccaccacatgaagagagcctgcctaagggtggccgcagaagagaacagacaagagacagaaagtgagattggaataatctgctggcattgtgtaagcccctaggttcaatcacactggaagccagatctaccccggatatttcagtcaccagagcaaataaattctctcttatttttgattaagtcattttgggttgtttttttttccttttgtcacttgttgccaaaagggtattaacttacataggcagtaaagatgaggaaggtttgaataaaaacaaaacgaaagtagctgcaggttcaatggcatgctcagtatcatgagctccttttggagtcaattttctattttttataagtcatcaatttttatccaccaaatttcagaatgagtgaatgaataaaggccatgaaggccagtgccatgaggagagtgagctatgcttcagccaaaatacaagagtagctggtgaaaggtctttggggtacaacatcacctgatctacagttacatgttattttctatataatatttgaaaacatgatgtattagaacaaattattacaactctaacttacataatgagtatgtatcacagtatgggatgtacaaataaatgcaatactcataaagtacttgatggatttctttgacaatcagcagtggtctagcttgaattcttcctgaatgctgaggctcaattatcattgcaggaatcattgtgctattatagttaggctcagtttggaagctttagtaattgttaagagaagaaaaacaaccttcataaaacagaaaatagtatgtgcatttcaatattgagttttccttagttcatacaaattggcatccttctttactcagccaaattcagaatgaatgattgaatgaataaatgaatgaataacaaagttacataatttacaaccaaaaacccaattctagttggttgaacaataagagagtaatagcc

SEQ ID NO: 106096 - DNA, 1716 bp, Homo sapiens
ggactataggaattcgattcatttaaaaaacttctgctgtttttaacagaatttaaagatattcagagattagttgtgtgtttgttttaactactcgctgtggtttagagagaggtctcagggtgtcaagcttcactttaaatatctctttataggatctcccaaagactttgagattttagattggctcctaccctagaagactggcattaaaaagatagaccaagatctaagtgttggctgggacagagcaaactgtctgtttaagctcccaaatgcagttgttttagcagtctaataaattaagggtaacagtaataataggaattaacaatggctaattaaaatgcggtaagttgccaattatgtaatggggtctaaaccccggagtaaatggagatatttgcagatgcgaagttgcgctgtgcacggtggtaggggaccagggtgttttgataatgaaagtaccctggatgtgtgtgtgtggaattctggagcctggttgccaaactgcaagctctttactgctagcttgaaaaatggggagctctagacactgtaaagaattgcagtttttttcttttagggaagtgtccctctcagccatttaatatcactaagatgtctaagaaagaagaaggattccaggtggtttctgaatgacaggcttgttatatgcagcagagcctagccctgcatggcatatccccacatcctgggggctctgcgatctacgtttctctgggtagggtctgccctgtgcctgtctttagcactggtcatcctcagcacccagtgcagggcgcagcatccagagactgcatgaagtcgacaagtgagatagaccaacaggcaacttttcaatagggagacccctgtctgctttcaattatggaagagtgtccacttttatctttttcagtattgcttcgtcattgcctctcttctctccgggatggctgttggagcttttcattttagccttcacgtctcttaatatcgctttcatattttctctttatctttctgcactgcattttgaggggtttcatcagtttgtctttttttcacctactttctcttcaggtgggcctaatctcactgtttttacttgcttatatattttttaaaacctgtattatatttttcacttctagaatttctattatggttgttattgttgttgttatttaaataggtcttttttcctggttctctgttcgggatggggcagccctcttccctgctatcctcattcctgcagccttgacttctgcccttgacctggtgttaaaccctagccctaagccctgtatgcagtactgctactcctgggactttcttgaaggcgctggtccctgggtgtaactgttatgaatttgttggctaacttccttccagtctgtgacctccactacactcgaggtgaccttggcctctagttcccgagcacagggactgatgctgagagtggcttggtacatccacggatagtggggacaaaggcaggccttttgggaacaatgctgctctctttcccactgccgggagagcaggaggcttagctgcagctgataagctaggtctgcccagctctgcccacacaagttcactggcaggggagcaatgtttgtgtccagtctctcactcttcctctgtagggtttggtgcatgttaccattccatgggctgacacaggaatgtggggaagggggg

SEQ ID NO: 106097 - DNA, 1019 bp, Homo sapiens
ctctaccagttaatttggttgggttttactttgctgtggctgagtgctctgcacttgctgtggttggtggttgggaaagtgggccctgggcgatcacttcctctctgtgggtttccactgggatggcagaaactgcttatcatgccacaggctggaaaataaatcctggaagcaccatatagctcaagagacaatttgaaaataacaatcagagtcatgaatagaagccgatgcacaaattcagttaacaagcagaggaactaatctatcagacattgggtggaaagcctatttctgagtttatttcacagcacattatgacatttctttaaatcacaacttgtccccatgtaaaagatataatctacatattcctgtgggaaataatcagagacaaagctttactgtatttgtcgtttctgaagttgacctcattccccccccaaaatatttttcatgttgtgaaatgtaatttgcttgaccccaacaaaattggaataaaaaccatcacaattaccggtggttaagaaagtggaattgagtttgggagaattgaggcataaagaaaattttttttttttttttttctattcagaaaatatattgaaagaaatgcagagagacttcaaaattccatagtagtttgcacctaattctggttgatagggttttagtgtttggagtggtaagcagctgtggggtttgtggtggcctgccctcttgcaggctgagagggaactggggcctgtgaagaagaggtgacctgtttagtgtcacatagctgattggtggcagggttagatctgcatcctggcccatatacttgggtgctttttgccaacgcgcctttttcctttctaaaacttttactttcaggaagcccatagattaaaaaaaaaatctgtgtattgtgttctctcaatttctaggttcacatttgcctgagtttaataagagcctggctgggtacggtagctcacgcttgtaatcccagcactttgggaggctgaggcgggtgg

SEQ ID NO: 106098 - DNA, 1054 bp, Homo sapiens
tgagctaaagtaacccctgcttgagggaaatgagggctgaaatttattgaagcaattcttggacttcgtggttataaatcccaatcttttcatttctacttggccagggtattgaccagcaagcttttatgtaagaacttagttcctagcgggacccagtgtggggagtcatatttgcttggatagtcatagctgaaaggattaagaagaggcttcccatgagaccagctcactgatactgtgtgtggcatctctgactgtgaaagggcttgggtgttccatccattaattaaggtgcataactctcctccatggtagatagtcttaccttaagaccatttagggacagggccaaagtcgagcacaaaggcagaaagtggtcctgtggctctccagacaagtttattccttgctatcccatccttccatgtcctttgagatctagagcccaggaggtaggacggcagggtcatcaccatgtggtgctagttgaatatgctgtgtgaggtggaacagactggcaagctgggcttctcgggacgtaggattggcaaattgctgggatgaggggtgcttcttgcctagcttcaggaggaagttgtctggagttctgacagtttggagaggtctgctgggagttccttcccactggattgggcaccattcaccagaggcctgatctcagcagtcagatcccacacacaggcctatcttccccatcagctacaattcaaacgtgttgtgccttcaccttagattgtttacaaaaggagttgttttcttatgtcattaaagttaatgagtacacataattttctactttttaaactttaagcatcaccacccattctcataaatgctgtttgcccagttgtcttagtctatttgggctgctgtaacaaaatgccacagactgagtagcttataaacaacagaaatttatttgtcccagttctgaaagtccgagatcaagggagggcctgtttcctagttcattgatggagctttctagttgtgtcctcactgtggaaggaatgagctagctcttcagggc

SEQ ID NO: 106099 - DNA, 1058 bp, Homo sapiens
tcaaaggttttacctccaaataccagcaacatatgaacttgtaaattacatttccaacacatgagcttcgggggacacatttaaatcataacagtctccttcccctcacgtctcctactattctccgtagtgctcaacaaggctgtggccatgctggtattcttttttttttccttaaacatgccaagccctttcagctcaggagtttgactctcacaatccctctgccttgagtgctctttccccacttctttgcacacctggctcatcactctagtttcagctcagatatcatctccattagaggagcttgccataaccaggcaatctaaagtcttttgcccagtaactctgtatcatgtgactccgtctcatttcctccagttcagcttgtctgaactctgaattcatttcctgtttgttccctctttctcttcactagaatgtaaacatcatgagaatgagggaatagtctgttttattccctgctatatctttgacacctatgtcctggcgcatagtagatgctcagttttatttctattaagaataaatgtctagatagcctactcattcctctgagccatggcaccatttaagtaagttaaacaatttattttagcatctctcttcagcttctctattatacagggcaagtggaatggaatattcacatggatgctttgattcttatttaatccttacaaaacctttaggaaccgagaatactcaagcccgtcttctctccacatctggtgtccagttttattttttggcacccagattccttcttggcgcttgttaccatggggaggaactaaatttgtcattatgtgtttactatcttcttcctctaccagacccttagtcttggtcctaggactgcttttattaattgctgaatgctcccagcctggcagagtgcttggcatgcagtggttgctcaaggtgttggggataatcctgaggcctaaaccccttattctgcctggtctggacatgggattttgcagccacagaatctccctatctgaacaaatatatgcttccccatgggt

SEQ ID NO: 106100 - DNA, 1039 bp, Homo sapiens
ggtcaggagttcgtgaccagcctggccaacatggtgaaaccctgtctctactaaaaatataaaaattagccgggtgtgttggtgggtgcctgtaatcccagctacttgggaggctgaggcaggagaattgcttgaacccaggaggcagaggttgcagtgagccaagatcgcgccactgcactccagcctgggtgacagcgtgagactccggctcaaaaaaaaaaaaaagtttttaagagatgtgttgcccaggctgttctcaaactcctgggctctagtgatcctcccacctcagtctcctgagtagctggggctacaggtatgtaccaccacacctcgctcacttgcaagttttgacataaataatgctgcagtgaatcttcttatatatttataatggatcaaccaaccaagcacctactacaggcaaactgttcctttaaggaccgtatatgtactcacttgtattatccttgtaacacctccgtggtggatgttagtattatccccattttacaagagaggagactgagaggaggaagttgagtagcttctctgaggtcacatgaggagtgagagagagccccagtcataatgaccccagagtccgcattctttactgccgccttgctttcagtgtcctggagtgtgtttccttaatgtgaattccagaacacagaagacagttcagaggctcagaagcaatcttcaaggttctttatgcatatgaaagcatttctgtccagataaggttgtgccaattcacagctgctccagcgacagtggtgtgcaagtgcttattttctgaaatccttgcaaaaaaaaaaaaaaaaaaaactagtaacagcattgtcaatttgagagggggacatattattttagcatgcatttctttgtgaatcacagaattttagaggagaaaaggacataaatatctttaggttctgcttctacaattgacaaagtagccctggtgcctggaattaggggagcattgggagtggaaggaggagggggccatgcagcatgctgccttgac

SEQ ID NO: 106101 - DNA, 1128 bp, Homo sapiens
agagccactgaagaatactagttcccactcacactgaagaagagggagagggaggaggtgttcagggcctggtttggagaaaatccagagaagaacagcacatgggccaagactggatggataaggtgagagcccttgggcctggggccctagagagcaagctccagtgagcatatcagccccatgaaggcgggaaccccagcaggatacccagcacatggtagatgctcaataaatacttattgcaaggtaagggaatgaatatagattacaatcaaaacactgttttcactttgttcttgcacagaggaagaaaaaacataggaagtaacccaatctcaattcctcttcttcccccagtaacggaggacatccgggagaggtaggctgaagtggcagaggtgaaggggaggtgtgaattgcaggacacaggctagaccacgctttcatcctctagacttccccagcagggcacccagtcgggctgggaaaactgggctgcaaagctacattgtgctcagggtccagcccctgaaaatgaaaagagctccaggaaagggaagacctgtaaccaccactgcagagcatgagaaatcagtctgtctgttacagtccaataggttcttctaaaaagcccaagaaaagggcagaagtctgatgagatggcattgggtcccctgcttaggagcagagtatgcaggctgctggagggatgggcagggttgctgaatttggatttgtcagatgtctcaacctatttttcaaatgttgagcttgataaaacacaaaatgcattttgccaggcacttttccccttaattacatgtgtatattttaaggaaaatttaatccatatgtttctgattcgtttacacggaaatcattaaaatattgttttccaagagctatttgatgtgcaagaaggctcacaaaccttataaaaagctgtttaaaattttttcctttccctttgtttcttttcccttcacgtgtgtgtgtgtttgtgtgtgtgtgtgtgtgtgtttgagagagagggagagagagcacacgcacataagtgaacaagagtgactgaccccaggatgtcagaaacaaattccaacttgaaatggattttcttctcaggat

SEQ ID NO: 106102 - DNA, 1145 bp, Homo sapiens
caggtgtcattcaaaggtttttaccatgaagaacccacccaaactttggcgttcacactggcaccatcttgccagcaaatcttctgcccagctcaatgactgggggctcctactgcttctgaggggacccaaggagaggcagagcagcatcttaaaacaatcagcatgccctaagatttgtctctacgatccattttgattccgtgatcattttgggggtcctaagcagtgtggccaattagacacatcatgaatgggtttcaccatctgagtgctgatggcatgcctggggcgttgttgggtgttagggcgtggtaagagaaagaaagccactccttagcaaggaaatcatgggtggatattttccatgagctcattcttcctgttcctctccctcctggtgactccccctgccagtttccccagcggacaaaagtggggatgcctttggggagaaaataatccatttcaatagaaaaagcaaggggagtctcacgataactgcgcaggcgcggaccagagagctcttttctgaggatccggcaagatggcagaagtagagcagaagaagcagaccttccgcaggttcacctaccgtggcgtggacctggaccagctgctggacatgtcctacaagcggctgatgccgctgtacagtgcgcgccagcagcggcggctgaaccggggcctgcggcggaagcagcactccctgctgaagtgcctgcgcaaggccaagaaggaggcgctgcccatggagaagccggaagtggtgaagacgcacctgcgtgacgtgatcatcctgcccgagatggtgggcagcatggtgggcgtctacaacggcaagaccttcaaccaggtggagatcaagcccgagatgatcgaccactacctgggcgagttctccatcacctacaagcccataaagcacggcgggcccggcatcggggccagccactcctcccgcttcatccctctcaagcagtggctcagctaataaaggcgcacatggttccagtcaaaaaaaaaaaaaaaaaaaaaaaaagaaagaaaaagaaaggggttcggaatgcagtgactggaaagcaaagcgaggccgtggtgccaccatgggtgtgggcttttgggtcactcatacatgcatgtgt

SEQ ID NO: 106103 - DNA, 1087 bp, Homo sapiens
atataccataggaagttcaatgaatggagtccatcatagagtgaaagtcaagctactccatccagagccagaatactcagtggctaagacatttccccccaagctaagagaccactctgcctccttgctgggtgcaacaatttcatttgagatataaggaagaagaaatttggaatttgagagaagtgtagttttggatttgaaacttagcagcaaaagacttttgactcgccctgctttcagttgctattgaatgtgcctgtgcagacagagtatttacatccatctcagggcagcctgcagttcagagtctgaaatcaaatgattatttctgaaagtattttattttaaaagcctttgagtgacaaatgatttagcaagttttcaacacgatgtttcatgtggttttggttgccaaagagtgacttacggccaagcctgggcactctaacccaagtgagcctacatggatctaggccatcacattttttttatgatgtttaataaagtttagcactttttttttttctgagtggtttatgatagtcctgatggtagcatctcagcaggctgggaaggagtaccatgctgatatattagagggaaatgcagaggtggaacgtggattcactgacccctctagacaagtgcacggcaaagggcagaaaggggacactctgcctgtggcctggacctctctcctctcttcccagcaggcttccagtacccgtcagccactatgttcttaacttagaggtgggttaaagcttttctgaatacagctatctggttattattatgaaatacctattttattcaatatccatttgtttctaatatttatgttggatattttatatacatcacttattctttccttaaacaactattttaattagaattaagtttggcttcgcatgacagaaaatgctaaaataattgtgaaacttctttttttcttatatgatataaatctggtgggaggcagtccatgtctgggtgatgggtgttacaatgtcatcagggtcccaggttcctttaacctgctgctctcccatcctagagaaaggggtcagcaaactatggc

SEQ ID NO: 106104 - DNA, 1050 bp, Homo sapiens
actgagtcagtgccccgagccaaggctgctgagtggcagagctgagcctcagacccatgccgtcagactccagaccctgagcattaacacctcatgtctagtcactggccaaggccagcctgttcttcccacagggcacctctcccatccaccacttcctctctgtcctctcagcaccagtctggggtggtttccctgactcagaactttcccatcccatccaccctgcatgccccagccatgttcaccttcctgaaacaccacgttctctgtgtccctcccgtggcgacacattgtcagttcctctttatttccaaccatattaggttcaactacctcagactcgtcctcacattcctcccgcatgggcccccctgcgcagttttatgaattttccaccattcccagataatgaggtatcatttttcctcttctaaaaatagtgttcattccttttttcacatctctgtgcttattgcttgccattatctaaaatgcccaatatctgcctacatcctacctgttggattcagcccagatatgctcctttaggaaacctcctctgaaattctgaatatgccataaacccctctctcttgagctgttggagtcctaacccaattttctttggaattcccttctcttgatcaccgttggcagattctcctttggcaatcatacatgaagcaagactggaaattccctatagactgttagaaatgcaaaatgcttgttacccagtgctgcaaagaaatagcacttgaacataaatttaattctctcagcaagtcaatttttactttctgcagaaagggtgccccttgcagatggaacaatggcgagagcacacctggacaggggaggggaagtagttcttattcctgatgcaggaccctactgctgtgtcgttcctctattggctagggttggactgctcagtctaagctaattctgattggctattttaaacagagcaggggtatgaaccagagtggcagggtgaatagtttggtgggaaggacagttaggaatagataactaaaggggact

SEQ ID NO: 106105 - DNA, 1079 bp, Homo sapiens
taggatttcaacacatgaattctgagggggcacaactcaatccataacaagattctatgaatcatttaaaggtttcttccagccctgaaattccttgcggaatggctgagatctgagtagcttggggcaaccaaataatggaaccctgagaacagtggaaagagcgctgcttgaagagtcaggaaatgtgctacttgaggaaagtgtcttgatttttttgacttttaaaatcagtttacttgattatgtgtcttctctgtcctgtggggctgatgacggctaccttctacaccttcaccgcgcaccctcttcccaaaattattctgcagactgcagaagaatgtggctgtaaagacaccttgaagctttcaaggctctgtctcagtgtgttattattatccccattatttataaggaataaggcgaaatgttgactcccgtgtggggattcagtgtctgttaacaaggcctcatttctccatcactgcttgcctctctccatcaaatgcagacctactgctaaagttttcaaaagctccctgcgttgcgagatttgagcaaacttgatcttccaggttaaacttaaatattgtttccattttgaagcctgtcatgtgggtgtaccacaaagagcgtttggtttccccacaacctcgcctgaagctctgggccgcggtatgtaggcagtaacagaatactaggaagaaagagagagcctgaaatggatccttggctctcagcctgtgcagagacaaagcaggatgtaagtaaaaccattacttctacctcctgatcaaaggcgagatggtaacccagcccctcctccccaccacccagcaagcaattaacaccgcctggcgtctcctctgcagcgatggcggttcgtgagctcgggctcaggagtggttgaaagtgggggtgccctctgtgcccaggttgaaaaatgtgcgcatttgcgaacagaatgtatgacgaaatggggaaaacacagaaaccaagcttgttgacagcttactcttttcatctacatttgatgcagagtgagatcagaatttgccagtggaacttagaaggtttgt

SEQ ID NO: 106106 - DNA, 2019 bp, Homo sapiens
tcctcatctggaaaatggggaaagcgatttcttacattttcctccctcatggagttcttgtgaagatcaaacgtaatagtggtgtaaaatgcgagctcagtgctagtacatagtaaggcactccataaatactagccttgttgtttttattttcttccctaccactacctactctacattgatcacctctcacaggcttgccacgtcaatatctctgtaattatttatcaagtatctactatgtgttataaagctttaaaagtttacttgctccatgtctcctgaatcaggttgagcattgagtgctgggctttgcattggcacacacggccaagggaacaaatggaaccattctccctggagacttcatgctatgcaccaaaaaccacctggctgggatgggttggatatagctctcgaagagtcaagcaaactgtccagccaataaaaaatatatgcctgcaagttcaaaagccctccatccacagtgccaataaactagcccagttaatagcccattggaattaggtacatgaagaagcttaaaacttttcagccattacaagaaatacaatcatgttttgaagtaggggaaacttcaacagaggccacaaccaagtgaaattacaaagaaaatgtgaaagttgtcttttccctagatctttgtactctcttatcttggccgagccagaatagttacttaaaatattggaaacagcttgttgagaaagcaatgttgcatcttccttgcctggagaaaagcatgtacacacttgcaggctttggtgtattcttagagaggcttcaaggaattgtgcaagcagggtatgttctagcagattatgggttctttgtgtttcatgtttcatggctgccagcagctggcatctttcagaaatcacatgaaaagtgggcagagctccttgtgcaaacttccgagccaaaggttaaggagactttgtgtgtaactcttaatcttgttgggaaattttagggtgaaaaatataattatacctgaaatgccaacaaccaaggccaaaggaatgtctcctctttggagggttctttgttgataagatgaaaaactaagctcttgtgctcctgcctacaaattattcagattatttgaaaagaaatgaaagaagacactgggagggataaccgttgcatactatgctatgtagcacttaactaatacttacctgtttagcagttagttcaataaatatttattgagtacctgctatgtgcacctcaacagaagctaaatattcaagttcctgctctccttgagtagttttactcaagttaagtatattcttactcatctctcaatgtgaggttctggtcataagaagaattcaaggactctggaggttagcacagggtaactttatattgcataatctataattgccatcaattctgtatagatatagattagcatgggcgattcaacaggctggcattgagagctgtgtggtgtggcctgaacaccagtcccagaggtcaagaggggcaacacacaaaggcactaaaaagaagataggaaagtgatactaccacattggaatgaggtgttgtcatcagccggcagaccccaatggagtcctgtgagacttgtagccatggaatccaagtcatgacgatgagcataacttgtcctggagtggagcacaaccgttaaggaaggcttcctttgtccatgtgtaactctacttagtctttctctgccccaccatgtgggtcttaggttgccccattttacagaggagaggctaaattacatcttggtcacacaactcagaggtagaagaacccagactgtaacccagttgtcattccccatcacattccgtgttctttgttcagtattatgtggccaccgctagctatctgatatagcaaggggttattcagacccagctccttaaaccacatgccaaagtctctccccagatgagtttatgagccagctaactcatggttgggaaatcaaatagtgagatacatatatat

SEQ ID NO: 106107 - DNA, 1021 bp, Homo sapiens
aggtttctatacaaagtggtggtttctatgcaaagtgcaggttttctttcacaccgcctgtacaggggtagctactgctgcttttaatgcaatttagattttgtataactgaggatctgatatatctctttcttgtgccattggctactaagactttcatttattcattcattcatttattattcactcatttgtccattctttcaccaaacggttaagttctcagttagatgctaggaaaccagtgacgaataagattgccatggttgctcccctgtggatcttgccatctagtcaagggacagaatataaataattagacatctcaatagaaaccttgcacgttttggtcatggctttgatggaaaccagaaagatactgagattaacttgaggaacctacttaaggaaggatgttcagcaagcatctctccaaggaagtaagttttaagccaagtcttaaaaggggagagtcaggaggtatccatgccaaggcgtgcatttgggaggtggtcccgggaggcatgcaaaagctggaggtgggaaggagtttataagctgaagaggcttgaagaccataactctgggtagagcacaaaacagtgagatgaggatggagaagaaggaagggaccagaaaacgtagggccttttatggcgaggtagagagtttagattttaagcctaagaaaactgagcagacatcagaggagtttaagcagggacatgacatgatttgatttatgttgtagaacaaccctggctgctgtgtagaggatgaattgtcgtggcaggaagagcagaagtagaggctgttccatgatctgtgagagaattgatggcactgacccagggcagcagtagtggagatgcagacaagtggataaattggagataagactaggaaggtgaagccaggaggacttggatggggaggtaagacaaaggacaaaattgagaatgcctccagatttctaccttgggtgtcaaagctggagcaggccattattggtggtggtggg

SEQ ID NO: 106108 - DNA, 1041 bp, Homo sapiens
aacatttacagatgtaacataatagctttaaggatgtgacagagcttttttcaccaaagttaatgtcatggtgctttctttattaagtttcaacttgactaacagtgaaaattcctgaattaggaacaaagggatccctataggtactgtaattatgccctgaatctctttgactgatcttctggctcctgatggaatcttccttggtttttgttctgcacagacccagaacagaatgaagttgatggcagacaactatgatgatgaccatcaccattaccaccaccaccaccatcaccaccaccatcgatctcctgggaggtcgcaacattccaatcacaggccctctccggaccaggtcagtttcatcgctgcttacctccaagaccccttttaccctttagatattttaagataaaataaataatcctcaagaaataataaacatcataaagtgatacgttctttgaactgaaactaatagctttggtatttatttccatcagtcaaggaatctaaatgtttttctttctccttcctctttaaggttttgtcttttcttgtttatgttatgcattttctttcctcccctcctttcttctttcatagatatgtagtctattgctggctcggtatctcatggcgggttactttggaatgtctctttcagagttttaagagaaagcactttgtttccatgagcttggcaaccagagaagccttgagttcgctgagcactttcctagaaaattctttagtgatgcaaattaatggtgaggtaaaacaacaaggagagaaatccgttttgcctgcgttttagccagtgaagtcaaggagtctggtttatttgatttggaccctatctcctcccttgactaagtaacgcatgtgaaaagatggattgacaaaaacaaaaaccgcctgtggttttacagcaatatttacattcacccaccaaatgcaaaaactatttacaatgtttagtattaaaactcttgaaggtgaattttatggaaattaggaaattaaatgcaaactagc

SEQ ID NO: 106109 - DNA, 1065 bp, Homo sapiens
atgtgtgcagagaccttgcttttcatcattgtttttctattcacattttagaatgtgaggaaccaacagtttttgagctcttattgtatacttggcattgggctagggattttaaatatattatctcatttaatcctcatgacaaccctaaaaaccagatgttaataattctgttttacagatgaggaaacttgggttcaggaactatgcagagatgccacagctggtaaggggtggaaccagagcccaaatgggactcacattgaagcttttccatgctcttcccaggagctatccctgaattggtgcaatacttcagttaggtcttagcccctgtaaacttgaggctaaaaagcagaataaagaaggctttattctgtgaccctgagcaaccactccccacccctcctgacccttctcgcctggcccctgctggctcccgccatgacctgaggccaccatgtgcaggctgggaagggcgacttatctcttcctgcatcaccagacatcaccggttgccactaggggagaaggctgcaggctcaatcaagtgtgctgtcattttggttttcttgcaagaaatgttggcacttacctcctgcagcctttgtgtttcattctcaaggtatctgttggaaagcctttttctctttagttttacattttctttttcatcatttaacatataaaaccaggtttttcctggtccctttctctctctccctccgttccttcctctcatcatataattaaaagtcctttcagcctgtcttcaccttatcatttcaaatacattgaaaaaagatcccacttcctgcccttgtgtcctcctgatgctggatttcaaaatgaaagaaaagccccttttcacttcctttttgcttcatactgccccttgaaaagctgtgttaaagtgatattgattttgtcattgatcaccattgtggtgcacaccaggtctgtcctttcctggcttcagaacttcttctttttcagctttttcaaataatagtatcaggatttttttcctgaaaattaaggaaaaggatttttcaccctctcctc

SEQ ID NO: 106110 - DNA, 1054 bp, Homo sapiens
tttttctgtctctcatgtctttatcatcatcaagcaagcaaggaaaaaggaaacagaaaattgaagacaaagaaggcctttcccctgaagttgggtagttggaaagctgattaaggagattaaaggcaggaggacatgtgtggggacatttgatgctagctgggctcctgcttctgctgtggaaagactcccacaaggctgttgtctctcctaaaatgtccattgaattaaaatttgttctttagttagacctgggagtgagaatcagtgttgttgtaagcagtgaactgtaacaatttaaagtttaatgaggcaagaaccaaattgggcttgtgttttatgtctctaatacttgtaaaacgtgccattctcttaaccatgttaaaataaatattagtaattaggtaatattaatggtttgttattttgatgaaggactttctttttaaatggaaaataaaggaaattgactggaaaggcatattatgttccccctggctggccaaggctaaggaaagcctgcctgggtcacccaaaagggccaggccatcctgtttacctggtgggtaatctggtgggttctcccaggctgacagccaaggctctgaaggagatccgagcctctgaaggcctggctctgcaaagccaaacctgcagaatgaatacaaatgcctccttttgtaaaccaggtctttgggaaaccactggaacacctagagagcaggacccagagaacaagaccagggaaacaggagagccaaggaaagggggaagattgcagcatcataacattgatgggagaccacgaagtcggggggtccctgagtgctttgtatcctgctccaggcaacagctcagggaagttcatttccccagtgtctaaatgcacacacagacttgagcttgggctgcagaatccatcttagcttgttagttgaaccgatgttgacataatgcctcactgcctgagatcccatgagctttcttcccaaccctgttaggtggtccttggaccactaagaactatgtggttatggcccattgtctcctcttt

SEQ ID NO: 106111 - DNA, 1625 bp, Homo sapiens
aggacttggctcatttttaatcagatttgcaaaggaaaagataattgttctactgtatgctggcatattgcaagctatgtgtgacatactatgtagagtttaattcaaatgacgaattgaaaaaaaatcccacatctaaaacagatgtacaggcatgatccataagtggtagtcaattcacaaattaagaaaataagtgaaaggataaatgcacatttcaagatctaagtctttgttcaatatgttaaacacatggccaatttcaaagtccctgtaaccaccgagttggaacacaacccactcagaagtagctggcatcttacaggaaaggattagaattccttatgaccttgatgtgttaaagaagttatcagtaacaattatttgaactcagcggggcaggagaaaagacaaactgtgagctgaagatggtgcagagctggctttgtatagatctagtcaagagaatcgaccccaagtagaggcattgctgaaaagtcaaaggcacttccgggcagcatgaatgagaagatgtggacagcacaagcctcaagaggcagcccttgctggcttttcattggcatgagcagagcaccctgcattgccatgtgaggtcctcagtgtgggggagagttgaggttgaggaatgcagggcattggagagttggacaaagagggaagatagtggcatagtaaggaccatgataaccacctattgcccatggatgcagaaagaagaaacaggctcaaaattacagcaagggatggaggttagctaaaagaaggaactgagagaagtgatggcagaaaccttgaaaccttatgagttcaacagcatctgttttctgaaataatttgaaatgggacttagtgagaaatcaaaggatggtgctggttaatttgtcaaacccatatttgccgtctcaacactcaaaggctaagcaggaagattaagacaaagacttctgatctggacctatttttaggttttccttgtgtaccctgaattatcttgccttcgggtaattctttcagtcattccctttgggtcaaatgtccttcaaggcctatatctaatgatgtcttttgcaagaagtctttcctgaagctggaagtatcctttgccctttccgagccctccacagtattgaaccatgatgtccttccttccttcgtgaggctttctatcatgcatcttcggttatgcctttaaatgtctttcttatctcctctgctctccttaaggccagaattaccacacatattagggggtaagtaatataatggatgcataaatgagcaaccgtttgttttgttggcatttgtggaaactctagctttggcagcaacttccatccagcacatgcaaagaactaactcctgacaaactccaagagacaaaggcatgtctcccagttggcttcatgtagatggtaattgaagcacaatttgaaaattaagatttcagctacattatagtgatttgtgcagacttattaagaagaatacacaaaacctagaaaaatggggtgggtgtgggattagtagatgacaaaacataaaggaagaagaaagatctctaaactgttcacgttaagagacgtactcaaaacactggccaaacc

SEQ ID NO: 106112 - DNA, 1035 bp, Homo sapiens
gtaattagaatgttcacctggcttttttgatcagcaaataaccatcaacctcaacacattcaaaaggggatgttaatgactggttaaatctatttgcttagaaggctaaaccaggagttctcacctttttgtgtttatagcattctttcaatttgtattattaaaaatatttgcagagtaccttgaacgaattaaattgcatctacatcaggaagctaaggcaggagaatcccttaaacctgggaggcggagtttgcagtgagcagagattgcgctgcactccagcctagatgacagaggaagaccctgtctcaaaataaaataaaataaaataagtaaataaattgcatccacagttatcttagcacaaatattgctatttggaccaatctatatactccccagggctcagggttatagcatcaccaggcatggttcacccgttgtcaggaaacacaataatttctgctggtgctgacttgacatttgtcttccctctctcatttcttagttgctaaaaatgacactgtactctacacccagaatccaccagctctctattccctggaagacatggtggtccttaatggaatagagcctcatttgtggctattgaagtgctgccaaggacttggtttcaacttcttagctttgggaaattcatgcacattcatttgttctacattttgggaaataataaatggaaaagttgtccgggatccagattgcattgaggtgcttaattttattcacctttccattactattgttggtcattgcatattcaccttcacatttcattgctacattccatagacaacaaatggaaatcaaaaggaagttctttaaacaaatgtttattgaaggcctattgtgaactgagcacaggggctggtgattaggtgtaagaagggaagtgatctgctctcttaattttagcagaaaaataaacatttgtcaacaataaaattatatattaataagataatggcttttaaatgcctagctttgagagctaggcacacagtgactttt

SEQ ID NO: 106113 - DNA, 1158 bp, Homo sapiens
ctaattctgactgttctgtagtggcttcctggagcactgcattcacagtcattttgaggccaagtacactagagctgtcctggattgattgttctttcctgctatggcacaagaggacagaatgaagacaagtgtgctggtgtttgccatccacccaactttgtaatttgccagtattgcttcagttaaagtagcttttattgctgttcacaaccacctttatactcatgagataccaaggactctgtgaagctctgcggtttttgtagcaatatgtcctccctccctcccttcctcccttccttcctctcttcctccttccttccctccctccctccttccctccctctgtctttccttccttcctttctccttccttcttttgttttgttttgtttttaattttttttaacttcaacttccccagaaagaaaaatgttcagaatccaacatgtaaaagaggtgtagagataggaataatgatgttataaataataataattaaaacaaaaacaacaaacacaataatgatactaatactagcaaatatagtagtttttcagttttcataactttatattaactttagtgtaatatcaccacagatgaaatattaatttctcagcagagggtaaaatacttttgagagatggctgaaattatcacaggacttaaaggatgattatacattaataatggttctaatgttagaaaaaattcagaagtaactatgtccattgaaaaaaacagccatgatattatctcaaataaaaattattagtgacttttagatggatatttgtgtactgaagaatagtgatattttaaatagttatgcagacatccagatatacaaacatatgcacacacaaactctttgtggcaagtctggaaaatttggacattgtgttgtacccttggaggttcagatcataatcattagataaagaaatctgttaaactgtatattgtatttttcaattactttgaccatataaccgttttatttgttagtaattaaaaccctaaggagttactgtcacatgttggaaaatgccagcccaagactcaggtataaaatggaggaggagtatttttcagggtaattgactgctcttcctcagcctggatctgaaattgttaacactgagaactaag

SEQ ID NO: 106114 - DNA, 1037 bp, Homo sapiens
ccatgttctgtgcaaagggcccaagaccctgggctctctctgttgtcatatcttctccttattaggctgagctcccatggccaacaatggtgtgacacccatgtgatccaaaggattctttttttttttttctcatgcagttttgttgtggtcaactctaatgagagtagatgggatttttggattttttaaaagttaggtgggcaggaaaagcaaaaaatatgtatttataataaaaactattttttaaaactctagatgagagaggtgaggaacaagtatctaaaaccaaagctctggagtccagttattaacatgcctcacataatgataatgggaaccaaactaaataaagccctggtgatcttcaagtttgtgggttgggcacgcaagccagaaaaaattttgttatttccttggaatgcgttgtgtgtcattctccagtgcattccctctagttgtgtgtgtgtgtacatgtttaaataaagacaatgacaaaataattgattgtaaagagttgtagcaaacaccattatctgaagtgtagtttaagtggagagaggctggaccatagagaatgctgagaataaagcctggactctggggaggccacgtaggagcctgctccaggccagtacccactgttgtcctgttaccatgtgcattctcatcctgccaccaactcccagcatgggcttaaaaaaatcattatctagtattttttcttagagatggaagtaagttttcttcccaaggtcagagcttttccaagaatgtgccagcagtctctgcagtctctgaatttcaaacaacatctgatggggtctggattttgagcatggacttctgtctggctctccaggctatttgatgggatccagtcttgctctgtcaatcagacttggaaggcaaatacaagtcccaggggaagtcaggctagaaggcaggacaggaacttgacaggaagagaccaaatgttgccctttggttctctcgtgtgtgtgtgtgtgtgtgtgtgtgtgtgtgtgtgtgtgtgt

SEQ ID NO: 106115 - DNA, 1039 bp, Homo sapiens
agataaatttgcccaaggcacacagctaatgtgggggagggctgagatgccaaccttggccttctaccaacaaggcctggggcttttataacctctaagctctcctaactagaaggctttgggtacatagtcgatttgcctagtaatttgctaatccagttcaaagttttgaacaaaagaccttagaatgaatagcaaaaaggataaaagagagagagagaaatgaaaaaaaaattaggataactttagagtaattaaaacaggtccctatatcatgggctgttaaaggcttaaatgatgctaagttctggactttctccatcttagaatatttttcacaggttctctgttttggaggatttgccatgtttccacatgttatgtttgctttggggttgtctaggggcattctaaggagcatttctgctacttggcaccaggagctcttcaggaggagtgacaatgagctatgtgcatatcttggggtgcaaccagctgcgctggcttccatgagatccgtagtaaggaaggcaaggtagatctgaatctcatccgaggagtggaggttcctcaagaatgatggatctgcctttgatgtctagcagtttccaaatagcacagaaatgatacagatacatgccaaaagggggaaaagcaacttttgatctagttagaactaattaaactttcaaaatgcatgaaagaaacttgagtgctggccagttgtttgctatggatgggttttgtcaacgagcacagttgaaaatagcgtagctacagcaaacccctacctttctatttgggggaaattagttttttggtttttgcttctaaaatgtcagggatttcccccgttgcagactgaaataacccgtgtagtctcttttacccccgtttatccagggatattaagagtgatatttttctttaatgtcttctcagaaggctctctcttcagtcccttccttgctgtcatactgtgtttagtctcatgtatgctttttgttagtgtgtggactaaaaaaggtaatctaattaa

SEQ ID NO: 106116 - DNA, 1048 bp, Homo sapiens
ttaattaaatagtagaaagcagtgggcagataggtgcttcttcccttttttggggcaggaggacagcaggatggggagatggtgggaggaagggggcctgaggagaactagttggagaaggcctttgaagttggcttccttatcttaaaacaaaataagggacacactgtcttccggccaaaaacatgcactgtatgtatagttttaatagagaaaaatgtcagtcaaaagggacttcagcctggtggtttttaatggaaatacaaacattttctgagctagagaagtatagtctttcagcctaaataatcataatcagcagttaaataatctaaatgcttgtgaatcatagagtttaaataattccaagcaccatacttcatgttatctctatcttcacagcagccgcatgggggctagggaaggtcacccattaagaaaagggaaaagaaatattcaggccttccaacctcctaaaacatggtaagtcagaggaggcagtcttggccctttcttccaatccaagagcagcaacatattgaaagaattctgaccagtacctgatctaatactgtagggggcgttgccagatttaaccccttgatgcaagggacagggcagccacatcacacaaagaaacactaaggagccgagagtacagaggaatcacacatcaaatcctgaaggaagaattatttatgtaatctcagcactttgggaggctgaggccagtggatcacttgggctcaggagttcgagaccagcatgggcaatatggcaaaaccctgtctctacaaaaaatacaaaaagttagccaggcatggtgttgtgtacctgtggtcccagctactcgggaggctgagatgggaggatctcttgagcctgggaggttgaggctgcagtgaactgtgattgcatcactgcactcctgcctgagtgacagagtgagaccctgtctcaaaaaaaaaaaaaagaaaaaataaaaattaaaaaaagagaaaagaaagaaaagaaaaagaattatcggtgcagtgaggagaaccctgag

SEQ ID NO: 106117 - DNA, 1045 bp, Homo sapiens
tgtctccttttttgttcatatttggaaacgggagctgcttttgttagactagagaagttgcatctggggagaaaatgctcttcccatgctcacctttggcttttaaaaggtcagctctgttgccaaacactgtaagttaaaccttagcaggaatgaccgtgaaaacgggctgagtcacacattgaaatggcaatgtggattattaactgtcatgcttttctttctgtctaaattgaaggagaagatgccacgaggccagctggctctgtccacacctcggtggtctagggtgttgaggagttcacatggccatcttgttcagaaatgtgtttccccccagacgctttctttcttcactgaagagtagagtgagttatactttattagactcatccagatgagaacatgttcatgatggtttctgcagcattaggaattcctgctttttttggttgggtctgctagagttgtaaaaggaagctttctggacattaagtttgtagcaaaaaggggtagaatgaggttggcaagggaagaaacaattttgatgtaataaaaataggattgttcaaagctgagatgagggctcttcttactatttggtattcagatgaaatttagtttggaagtcacatcagcgaatattatatttcttcagaacctctgctgtattttcgatcagggggcatcttgattttgctttacttgtgcagcaatcagaaaagccatagatggtttcaacttgtgtgtgtgtgtttattctatttttacctatggtactctggccattaaaatatgatctgtatccattttggaactttaaagaaatgattttggatgagggcaaaaatgttgtgccacctattccacacagttcctttcttgtcagtgctcacttgcactggcacttaatttgttgctgtacatgagaacatttctccatcacctctgaaaatgtctcataggcaaggcttttagaacctgaatttttaaacacgaaacaggattatggattaatctcaggcaagaaagtccccgagggcta

SEQ ID NO: 106118 - DNA, 1025 bp, Homo sapiens
tgtgttccttaaacatttatctcctttattcgttaacttatttgctttcatcaaatagtgatggtatgtctgctctgtatcaggcactgggatgtaactggcactacacccagaagcagcatcgtgagagacagaagcagatccgtagtatttataatatgatatctgtgcaagtggtataatgtaattcacactgttctacaccttggcttttttttcttggcaaactattttggagatcttcccatatctatacctaaaggctttctactctttttcacctctgcatactatttaattgagtctgtctccttttgaaggacttttaggttgtttctagtcttttcctctcatgcagtctgctataattaataactttgaatagacttgatttcaagtgtatgtgaatatatctgtaggataaattcctaaatgtggaattgctagggtactatgcttataatttttctagattttaccactcgtcctctacagaggctaaaccatttacagacccatcaacaatgtgtaagaatgcctctttttccataaactctgccagtgcaatgcgcttttcaaactttatctttgttaatatggtaggtggaaaatgacccttaagtgcagttttgatttgcttttattttattacaagtgacaatagacatgtttaaatgtgtttatactttgtcatattcttttattggtctttttcttatatatttgtaagagctttttatatattaggaaaatgatacgtttgtctttgatctgacatttgtcacttttcttttatttggctaatggtggtttttgttatgcaggttttctttacaaaattattttacatagtcaaatgtattcagtcatctcttttatgtcttctgaattttgtatcatacttagaagccccttccacactacaagactataagaacaattgtcctgtggtttcttttagtaattttatgatttgtgtcttagtctgttcaggctgctataacaaaatataaactggggagctt

SEQ ID NO: 106119 - DNA, 1049 bp, Homo sapiens
cttcttttatatttgacttgctcttgggagcggatgcattaaagtcagtattttctttcgtatttgtctcaatgtctgcatagtctgacagcaataaatgtaaacggaaggttcagggtgtctgttttgctatgacatgtaaagaccaccttgggacttacatcattagcatgactttgagacgtgaaacatgcatttactgaccacaccatttggtcacatttgattctacggcaattagatcctactcgttctgtaagctggccaactttaatttcctgaccagagctgactattgttaccttagtaagattatatttaccctttctgtctactgcacactttattgctatgtatagaatcaatgtgttcaaattgaaggcattgctagtagaaatttcagtgttttactcactcacattctttctctttcagtctagtttaattgacctcaaagaacatgcatcttcattagcctctgcggggctgaaaagggattccaaattaaaatctctagaaatagccattgaacaaaagaaagaggaatgtagcaaattggaagcacagttaaaaaaggtaagtgaagtctaagaaaaagaatcatgcttatttaaaaatgaatttataaaatggaacaggaagagacgtttttaaaaagaaacaaaccccttatctgttgctgtctgctgataaaagaattaattaaatactcttaactttattgctaagaagtctatcaaatctgtctgtaaacctgaaaaattatctcagatttcctgtttaagaaaaacttgaaaaatagatcaaaatagtagcagaagttaaaaatattataaaaaccagccattactctctgggcaaatctcaactatcagcaaagaaaaatagaaatgttttcaacaaatcacagaatccggaagccacattagatattaataaacttttgctactttcagatgtaggtcatttttttgtaccagaactttgcaaaaagcttttctgacattgttaactttctagaagttcaccaaaattgtcaagtcccatct

SEQ ID NO: 106120 - DNA, 1029 bp, Homo sapiens
taagtacacactttccagtgcatggaaaataaaccccccaaacagaagacctcagctggcacaggctccctcctgccatgttgaatttgggtgtttgagtaacgtgctgatcacaaccatcctcgctctccattttgtttctggagaaatattctcatggctagggttgttttttatctcttctgggcttgggaagatgcgacagggcactgatagatcacacatggcgagaaggtgctataaatgttaagccttaaagtctagattacattccaacatcaggtagagacataaaagttaaaatgtttgggtatatggaatatttttctctgcctcttcactcaacaccaaataattttaagagcccttgactctctctctcatgattacagagtgtctttttctaaactctctccagcaccactcactacctcccatattgtaatttatttatatcacagtttggatattaggcatttcctttagtccagatatagaccatccagctttgataggtaggatgcagggcaaatgggacctcagtcatgtgtttcttctcagaatcacactgagtcctagtaagcccatgtgcaaatatctacaattgattgtaacccctttataaccactgctataatccagagtgttcagcatgttctgccaatattccagtaatccaccaaatacctatatttgtgcataaactcaaaaatcatattttttcaccagatataatgaaaacctacagagaagagtggttttatgccaggctggtagatgaaggtaactttaaacaaaaatgggccacatgagaatctgtggcccatctgtagggcatcatctttagtgcacctgtcatgaattttcatttaggaagaggaagatccccaggacgtgagtatccctccacctttccaggccctgtatctttctggctattatgtgagaaggggcacagctatcagctatttgaagaatctgccgttctcctccccagtcacagaatgtccactctctcttgtaatgcag

SEQ ID NO: 106121 - DNA, 1011 bp, Homo sapiens
gcattcatttttcttcactgtattattcaaaaagcaactgcttgtacccatattttgtcaataataccaggattaccgataaagttagtgtaattgtgttgctgtgtgttgttgggtaggagagaatttgagaagcaaggcagtctgcttacccaaaccagcagtcaggtttcttgatggtttctctccagagaaaatgaatgaggagccaggtcagaaaggcttttcttctcactatcttatactgatggaggctatattccttgtcctctttcctttctcattcccctccctgtattttacctctctcaaattaatgtagtccaaattagacctatacatatttcatgaaaaagacagtggtgacattatgtggatagcttccgtcccatgttcaataattaaaatgaccaaataaagagttggtgctttgaagtagaaaaaaattattctccgtgtgcagagaaagtgagatgattttctaagtcttctgctttgaagttgggagtatgagattactgattttatcagctggaaacggctgaggaattttcttttgccttttttttccttttaagatctctttgtacatggaaacagaggagaaacttatctaattacgtctgtctcttagggggagcaatttaggttgaaattgctctaattgttggattgtgggcagaggatttttggcagcagtgtagaatactttaaagtgatttccccactctttgggatagcagaggtaaataagagtctttctacctgctgtgtggtgtgttagtgggtgagtattcagaagatgagatatgttgtgtttcattatgccctacaatgaaaaatctgaatttaaattcatatgaaataatctgtacaccaaacctgtgaaacacaatttacctatacaacaaacccacacatgtatccgtgaacctaaaataaaaggttaaaaaaaaaaaagatatggtgctcatcctcaaaggaggttacatgtgatagctccttgcaatt

SEQ ID NO: 106122 - DNA, 1025 bp, Homo sapiens
ttatttttacatatgcataattattaaatttacgaatagcccaaataggtcttttgagactgtgagatgcttttatctgttcctctgtttaaatcattttgcttctgaaaataataagtacaccaattaaaaaaatttgttttcttttttctttttctaccacttgctcttaaatatgcctgttctcttgttctaggttttaattttgtttgttgctttatgaaatgcagcagagttagagtaatgcagacctctgtgagaaagcagtgggagaggagagaaaaatgtgtaaatgatttttatcagttgtgaaatatgtgcatactccttgctgagtttgcaaattatagggaggaaattatatttatccagtgtttacttcatcacaacgtgtgtgcgtgtgtgtgtgtgtatgcaagcatgtatacacaaggaaaaaacacaaaactattcatacttctgtcaactttccatctctaactagatgttgagattgtgctgaaaacgtggatcaaggagtggagatatgaggggactgtccagtggatttgaatgtaaccagggactgcctcaaagtttagaataagtttccctgcgcagtccttcctctggtttctttcttgcagtccctccctctcagagagttaagccgaggttcggcaagcacagtactagggtgacctgcagacagtgcccaaatcattctgaaaatgaagaccagaggcacagatatgagtgaactcaagaagtttgggggaaattattgttttggcttaaacttttccctcgactctgttattccacaatgggagattgttcaagccacttctacagctgaaaatgtcatgaaatttgtaaactctgcccctcatcatggactctgtccaggtgaataaaacatttatatgatcttcagcaagtcatgacctttattagcccacgtttgtctgagagaccatcaatccttgagttagatttaacttttaatggctagttacttttaatggttccagaagtggtcaggt

SEQ ID NO: 106123 - DNA, 1035 bp, Homo sapiens
atgagtctttagggttttccaggtatacagttatgtatcagcaagcagcgacagtttgacttcttctttaccaatttggatgccctttatttctttctcttgtatgattgctctggctgaaaaattatattaaatttaagttctacctaatgagataaattttatggaatagggtttagctttggaagtctagcaactattgtaatatctatagtgttttcatcccctaagaaccaacttttgcccccttggtggtgatatcactcctattcagaaagtatagtttaagcttttagtttcttgtttcaacttctgtaaaatggagctaggaacttctaatttgtagggttgctgtgaagattaaaagtgtcagtatatgtaactttcttgtcatatggtagatattcaaatgtagatacaggttgtcttctattaaatgttaattgaatatcagggatgactaaagttggtcaaataattttatgtttatattacagtttttaaaacatgcagatctgaaagatgagacataaacaaaataacacttactgaaaaggcccagcagtttatccaagatttctgcatttaatggagatttttggctttgacagtttacttagcttaattcaattttgagtcttcagttgtggaatttcctaaggaatgcctgatagtgtaacttaagcacaaagtaaaagcccacacctacagtgtggatgcattattcattttatagcataaaatgtagtatttagtacaaagcacacctatatggattccctcaagaatatgccatcaggcaataattaaattatgtaaaaatagtttatccctattatatatgcattctccaggcttaaaagcagattttgagtcataaatattaaactctgccatttttggcctgttcccttcttttcaattagatgggctcaacaaattgtttttcccgtggataataatttttattaaaggaaacacaaatgcacatctccatagcaactgactagaatcccttgccaagttctcttcttt

SEQ ID NO: 106124 - DNA, 1433 bp, Homo sapiens
cccgcttagttgaaattaatgtttgctgtgtgatgcactgtaagtcttcttaatgtcatgttgtagctgggtgttttgtcctactaatgggatttgaaattttggaaagcagaatctcatctcttactttttaaagtgtccacaccagtttttagttctctgcaccctgcaggtactctatgaatgcatacccaaggcagtgactgcttgggcaaaataaaactttagttgaggaaaatgcagagttccattcatcctgtaggcaccagatggctggtcatactcatatggattgtttatgatccacatccatgggatccatccatgccgagccacaccagttgttagatagttgaatttgacttctgcgaagatgcgagaattcctgctatacaaatgataaatcctcaaatgtgtgctgggttttctggatggcttcaggacactaagtagggaagacaaagagaaagcctgtacctgttctactggtgttgactttgaacaatttcagaaaagccaaatggtctagtagttaagagctaagggtctgacatcagtggaatcgggttcaagacatcattctgccacttagcagcagcgtggccttagacaagacacttatcttgtctgagtatttcttcatctttaaaatgggggtcattgtgaggattgagttaatctggaaacatgattggaatagtggatggctaactgtaaacctcaatatgtgttatcttttattattattataataaaatgaaactaaaaagtttagaacagtggttgtcaacaggggaagattgtgccccccacaggagatgtggcaatgactggagacagttttgattgtcacaaggtggatgtgtgtgtgggaaggggcactgctggcagcttgtgggtggaggccagggatgctgctaaacatcctacaatgcacagggcaggcccctcgacaacacggttatctggtctctaatgtcaatgatgtcgaggttgggaaatccttatttagagcctaataaacacagtcaagtcaagataaattagccaagaaaagctgaaatattaaatcaccctggcatattatgggatgacaattcatgaagatgagttttttttttttttttttttttaaagaatctgaggaaaaactgatgattagggaagaaatatcactaaggaaggataaaagaagtcgcttttaggaaataggccactttaggacataaaagctggtggactaatcttgaaaaagccatgaaaaatcccctttatttggggattaagctgctaaaaggtatgtatctactgccatgtctggagctatctcataaaggagcattcaggtagggaaggaaattttgttgcttttaaaatacaactaagggccgggagtggtggctcacacctgtaatcccagcactttaggaggc

SEQ ID NO: 106125 - DNA, 1086 bp, Homo sapiens
agggaaggtgtttgccagggcaatggagggctggttgtgctccagggctaaagggctcaagtagccagcttaacctaggttattatacattctgccaggcctgccttggcccttttctcacgtttgttttctttgctttccttcttgccactttttccaggagatgtgagcaaatgaaatcctatttattttacaaatgtaaaaagatattttgtttaatatggcatttgaaacatccgtctgcctctctctgcctgtttactctgataaatcctagtaacataggcataggtgggtgaggagccaggggtcgtgcagtatattctctgggggaaaagaatgttaaatttcaacagaaaggattattcaaataagtaatcctttctttgttgttattgaattctttagtctagcgttatattgtggcttctgaaaacaacagaatttgtgaaggtaacaagggcaagactttgtgaagaaaggaaatttatgatttaaaaaactgaactttacaataaggaatggtaatttaatttagacaagtctgctttgtgtcctgtcctttgctgtttgttcagtgaacattctggtgcacttactagaagccagacacgtttggtcctctatgagcttacagtcttttaggggagcaagtcatattaactaaaaattaaaatttgataattggataattatttattttagagatgaagtctcactttttgccgaggctggaatgcagtaaggtgatcatagctcactgcagccttaaactcttgggctcaagagatcctcctgcttcagccttctgagtagctggaattacagatctatggcaccacacctggctaattttttttttttaattttgaagcaatcctcctacttttgcctccgaaagcatagagattacaggcataacccattgtgcctagcctaaaatttgataattatcgattaagtgcttattttggtgtaggcattggggacacaatggtaagcaggacttgtggagtttcattctaatggggaaatgttgggtgtggagcttcttacacagcctggtgtgtgtgtgtgtgtttgtgt

SEQ ID NO: 106126 - DNA, 1029 bp, Homo sapiens
tgcatttcatatccttcttttactccctcttgttgagtatgtgcagtgggtagagtgtgcagtgtagagtcagactgctcgagttgaaatccaagcatcaccacctgcttgaagtgtgaccttagggaaattaactttctatgcctcagtttcatcataagtaaatggggattacagttgtaccttctcttagggttgctgtgagcattaaatggagtgagctatgtaaagcccttggctcagtgcctggcacagagaaggtgttcagtatatattatttcaccagtgaatagaagctacaccaggttattttggttttttttcatctctatatggttggctttgacttaaattcatgagagatgagctatcttcataagtaataacacaagaaggtctctcctgagtagtcagataggataagtgcatttaccctgaactgtccagtatggtatacttaatagccaatatggtatactcaatactcagtagccacctgtagctattgagtatttgaactgtgggctatctgaattgaccgctttaagtatgacatacacatgggatttaaaagatttaatacaacaaaaaagaatgtaaagtatcagtgatttttaatattcattacatgttgcgaaaacactgtttttggtatattgggttaaataaaatacgttattgaaatggatttcacctatttgtttttatatttttaaaatgtggctactagaaaatataaaattgcacatgtggcttgcattacacttccattggactgtgcagggctaacttaagaggccagggttctcgaatggaggtacatctgccaaatcacagtgcctctgttgcagtggaggtgtcccttaactgtttctggcacactgctggtatagtcatgacaaggcaggaatgggagcctgtctctgaactcaattcatctggcttatttggtgacattctaaacttgggacatatgaatgattttgggctcttttgggaacttggaattatatggaaaaaatgttttct

SEQ ID NO: 106127 - DNA, 1194 bp, Homo sapiens
tatgtgaggattactttgtaaagtgctgagagaagagcccagcacggaggaaggcaactccacacgtttgtctttactattatgaagtgctgggaagctgctggggttacagtgctgagttgagggctatcctctgactgaaggtatcccgagtctcacaagggctggtggggtgaggtggacattatttcttcactgacacaaaaatacatcattataaaatgtgtgacgctttgaaggatgttcaaggtgctataagccatatacatgcagggacctcctttggctttgtgctagggacactggttgagaaggcttccctgtggaggtgacatttgagctgcagcatgaagacagagtaggacttagcaaggccaagggagtagctggtggtgggggaatagtgtgtgcatctgaagtgacgggcagtatgatgggagtacagggaaacaggtttagggtgtatctacctgctgtcgtgttccaggggggtccctgggcccatcatcagagattctgattcaattgctaggacctgttctgggcatcaggatttttacaagctccccatgtgactctaatgtgcagtcagggtggaaattactgctcttggcttgttagaaatgcagactctcacccctccacctagacttagtgaatcagacctgcattttcacaacatccccaggtgatgtgtgtgtgtacaataagtgtgagaagttctggtttgtggatagactcacccaaagttggtcaaaagaataggtttctgattcttgtcccagaaatgctgatgcagaaggtccagtgtggggtctagaaatcagcattcataagaaataccctctgtggttctgaagtggttgattgagaccagacttaagagcatgttctcaagaatgtcagaatggaaattagagaggacgtgagaaggaagtggacttggacttaaacctcagaatgcttctgacctgatgaagtctggggcctccctcctgtgaatccatctgcagaattctaatactttttgatcttctaagctttaaataaaacttggaaaaaggacagtgttcacaataggaatactaatagtctattaaatttgggggtgggtgaaagttgttgggagtagcgagattagcggtttgggttcctctggaatagtctttaccagctcttgagacgagttgtttt

SEQ ID NO: 106128 - DNA, 1081 bp, Homo sapiens
cagaggttttttttttttttttttctgtctagctttagtttggtataattggtatgcaaacaaacaatgcaatggtttttttcccagttaaagcataaattttaattttagcattttaaagtcattgtttccccacacagtcatgattttcctaaaattgaaatagtctaatacaggaacgctaaccttgggactctatatattcccaggaggatgactgacttggctggcaattagtttgattatatttttttaaatataaaacaaacaaacaaaaacaaaaccctgcacataattaatgcatacaatttggtgagcctggacacatgcatacacgcatacactctgagcagagtgttgatacaatgcgaagccctaggttgccgggaggatgggctactttgaggtcacgtgccgcctctggcccagtgagcgagcaggcatggtgcctcacgggagccgcaggcctccaggaacacaggagcgtgtgtgagatgactggtaggtgttttggtcactggattgatgacaacatgggtagaagagatcctggatatggagatgtgatttgatccttgcccgtcacacctgctttgtcttgaccactcccaactcctggccacgccagcctcgtgcgttcctcaggcgcgcgtgcagagctgtgccttagggcctttgcaactgccctgcctgcgttgctgctgctcctgggggacagcgggcttactgccctctcaggctttagccagatggcacccactcggggagcccttctctcctgacgctgtctgaaggagcctgccagcccttaccttaccacctcgtttagttctttcgccacacttattgcaatgtctttgcttattcgtctgttgtctgtctaataatagataagtaaatatctattactcatatatttctagaatgtccctcttataccagggactgttcagtacatttattttgaatggatgagtgatggctctccaggcattgtgaccattacgaagcgtaattgtgtgtgtcagggaagggggatgtgagcgtatatggggtgtgtgtgtgtgtgtttgggggaggg

SEQ ID NO: 106129 - DNA, 1078 bp, Homo sapiens
tcatgcctgcagtgagctgtgttcattctactgcactccagcctgagtgacagagtaatactctgtctccaaaaaaaaaaaaaaaaaaaaaaaagtataaccacttaagttctaaaaacgattggctcgtgagtacatattatctgagaaggaatggaaagaaattaaaactcaccgattcatcccttggaaaatctttctaaaatatccatgtgaaataatataaaagtttccaaggaatcctaagaccaatagaaatcaataagcctatgagatggagagttggacagtgcacatgatggccagatttagaacttgcttaaatttagaaatgtaccaaataataaataaaattgccttctcaaaaattttaaatttctcttcggggtttttacctttgggaagccatgtacactttgagagctgatgaaaatgtcataattttccctagaaaggtgtgcataatctggattgtgcacaaatttcacttcctcatccctactgcaaactcgaagggcatctcaggatatttagatcaagatcctctgtctagatattaccacttcataaaatattgcacatgtgttgggagtaaatagttcccagtgattagtgaaatgaatgagcttttggtaatatgagacatgtcttcatttcactgctattcagtttgtgctgagaaatagggggcatgtgccaggattttggtgataaagggtatgtacattggtaagatggaaacttgctgatggactgtactgcattcactaagtgtattcagatacaatatactggaggtggtggattttagtctaccttcaggaataagttaccttgaaagagtttgcatagcattaggtgtcacatagtaaaagcacatctttaaatattttcattaaggactttccattcattatgcttgtctctgggtacgaaaattccaagtttacctctggcaattctatatcacttatttgtaattgtaactcaaatctcatactacaaatgcagttatgctgtaggcatttgtgataagagcaaggaacgaatgattttgttgaattatcaagtgagggtt

SEQ ID NO: 106130 - DNA, 1048 bp, Homo sapiens
aaataatacattgagatacattttagtgacatataaaaccttttccacttttattaaaaacatttcgaaccatttgtccatttcatgagggttagttcagtttagaataggtgatatccataattccacttaaccgtctcaggttgccataagccaggagtgtgtgaatgcttgagggcacttccattatcccttccttgttctggtcttactgtgatcacaggataccttggtatcataggtgaaatgtgactgtgtgacatatgactcagtgaaagctctagtattaatctgtatatttaatacaagtaaaatgcaattttctcttttagattaaaaagtgtaaaatgaggaagaagcgcagagattttgaaaagtcaatttacttgcaatatgatgtcttacaaagtaaaaaatataaagattgacaaaaaacaagctattaaaaaaactgtcttctctttttggaagtatattaggatcccttttagaagtataggagtacctgttggtcaggatagggtaagttttgctgcagtaactaacaaacttcaaatctcagtggattaacatatttgagatttatttctaatttgcttaaagtaagaagcaggtcaggtgactctgtgggacgggtcttttccatgcagtgactcaggatccaggatttctgcatcctgatgcatggcttcaaacgttgccacagcaggggaggagagtgactggagatggcacattggttctttaattccttgaactgaaagtgacataattgaagggagtgtgaggtggagtcctctcttctgtccaggaaagggaggagagacacatatatggtggattactaccagtggggtttttatgtttttccaaaaatggagctaggtgaaataaagtttggggagcaatcttctgctattgctgttgtttctattatactgctagtgctaccagtagacatttgttgagggccaactgtgtgctaggcattgtgcttagtgctttgtgtacattatcttatttagtgatttcatcagtcatctgaggt

SEQ ID NO: 106131 - DNA, 1046 bp, Homo sapiens
tataattttttaagacctcttgagggaaaggggaaacctttatagaaaacattttttcatactgtatgtgtcactatctgtgacagaaatctcatctagaattgaatgtagcaaaaaggaaatttatagacaaatgcatcagttacccattgatcctgtaatgtggcaaaacagtccaccacaaaacatcagtgacatactaagaagcatttatcaagtgcataagtgtggtgtttagctgatctcagctgggctcgctcatgccccgctgggcagtggctggttggctaggcagttctgctgactttggctgggcttgctcacacatcttggggcggcttgcctgttggctaggacaacttggttctattttatatttctcatcttgcatcaggctagattgggaatattctaattactatggtagaggaaaatgagcaagagagtaaacacatgtgttgcttaaggcgtctgcttacttcacatttgttatcaccttactggacaaataaagtcacatgactgaacctagcatcacattgggaaaacactgccaagacatatataaaaaaaggagtaaaggattgagacctttaatgcaatcagtcacctggcatatgtaactaaaatggccagggaacagatgtatagatgatagatgatggtaacttctatgattcctggatctggagtatgaagtgatgtcacctggtttggtttcacactctttgaagtttagctgtggttccctttgtattgtctccaccctcagggaggccctttccacattgaagtactcacagctctatcttgaaagtaaggaattccagctgaagaagagcttatctttcccagctgttccaactagagtcctagtatggagtcttgttggaccaatgtgggtcacatgcccatcactaaactagctaccatgtctggaggatacaatatggtggttggccaggcgtgggtcatgttctcaccccttgcaccatccaggatggtggagtgaagggagtcaaccttatctaaacccagtgaactgt

SEQ ID NO: 106132 - DNA, 1008 bp, Homo sapiens
tggatgatatttcctagtttggtaatctgcagaggaagagagaaatgagagataaatcagtgagaaagcactgtcctatattttaatctaaatgttacatatttggttttagcactgtgtttgtggtagctgggtttattagtcagatattgctaggttgtgctgggctaacaaaggacctccaaatctcagtggcttctttctctcaggggttgtctgtgattctgctccatgttatctttattctgggacacaggctgaaggagcctttcttggacagcctatcttcatggtagagaagaaaaaagaatgttttacccacaagagggctctgatagctactgtttggttatggcatttgttacttctgctcacatttcattggccaaaacaagtcatacggccaagccagatgtcattggagcaggaaagattatcttcccacaggaaggagactgtagggatgggcaggctagggggatggtgaatatgttgaacacatgatgcaatttaatgcatgggctaaagttttacttgcatgtgcaaagtttttttttggcaacctttttaatcaactactttttttagacccattgcaagatgtttaacgctgttatttctattttactcatgaggaagaaagggtctaatgtaagaaaacaacacaatgagcctgtggtcaatattgatgatgatgaggattgtactgagtatttactaagcctcaggcactgtgctaagtacttctgccttctctgatttaatcattattcaccttatttttgtgaagtagccattgttacacttgaggccattgttactcagatacttactgaggctcagagaggtttgctaacttgctcaaggttaaacagataataaatgtgagattcaggtctcaaatccagtgtatgcttaatcacttaaccaaggtttctcagacttagatgatatcttttttaatgaaaataatttctcgtagaaccccagggttggcttaaattatta

SEQ ID NO: 106133 - DNA, 1041 bp, Homo sapiens
acaacatcattttgactttcaggatcatcatcttgcctctggctgtgcaggacaagtaccatagtggagataatgttggaaaattaggctggattaagatttaggaggcatctggattcctggttgaaatatttgagtttgatttcatgggctagtgagtataaagccattgaaaaagacagagaccagaggttgggagaccactgaggcttgagtgcatgacatacatgctttagtacgagtgaaggtggagggaaaactgggcatgaaacagagctggggacatgagaagataatggaattgagtgaacccaaatcatagttgctgttaacctatgatcatctgagagcaaaatgaaagtctcctgaaggctagtattcacttctactgatggcttcacatttgcccagaagtagggaatgagtaatgtagagaattgctaatgagatatgaatcactatttcatgctgtggggtggggtcttctactcattgtcaataccatttattgagcccttgacgaccttgtattaaatgactttggtctgggtctggctccactgtgccagttaaaggtagcagagatgaagggtaaggtcagaaggtgctgcagtggtacattagattctgtccatggacttatttctgctaaacattctagaccttccttgaggggtagattggggttactttaactgtctgtgtctcctttttttcttctctttactttttaaatttgtaaaataaaggatttggtttacattcatagttttcaaatgtttttcagctgttaaaactttgtttcctaaataaaaatttatctggaccctcagtatatttatagaaagcagagctgttctggaaatttagggtccagatttatgttgtatgaagtgtctttatgttgaggccactgctctaaaatgacacctacacacccttcctggttcatgattatgtgaatcttatagctgttcagatgttttatttgtgcatcatctttaacaaatccctttgttattccacaggttgtgtcttaat

SEQ ID NO: 106134 - DNA, 1575 bp, Homo sapiens
ccggtggaacccaaagaaccaatcaatgctcgggagaggagggcagctcccacttgtcatggttagtttcctggttggctctttaaatcagtgattttacttaaccattggtttccacctggtatggggatacagctgtgagaggcagacaagcgggaagaaaactctttgaaaatggacttttagaagcaagtatatttgacctgtgtttccttgtcctccccatcccttacccaccacccccctgattattagttgtagtagttgcggatgccgaggccactggcttaaaaatgaaaatgaatctgtgtaaagaaggaattgggggagggggtgttagaattgcccacctatttctccagaattgcagtctttataagagacaacatgtaccgttgagctatccgggaaaagggtgtggcactttgtctcctatggtcactcttgtccttgtaaagtcacattgtttctcagtatacagtacttggggcttggctctactggatggatttataaggtatttttggagccggcaaacgttctttatggggagtcacatgaatagaagggattcttttagttctgacagttaactcaacttctggaagtgagggctgccttgttctcttttgcagaatgtcagttcggtggtggtggggtcaagccattttctttccggggagtagtagagtttgcctttttctcatgtaagccatcttgtctgtttgcttctgtgctttaataaaatacttttacagttttggcagggaggggtgtggaaggtgatggtgtcatggttttcaccagcaagactttcacgggtggatgaatcatgggtgaaggaccagatccatctcaactcactactagtgaaagcctgatttttcaacacccttctccctgaattcattagaaaaattactgattgatccaaagagctgtcactttatagaagttgtacctggatgtgaacataattctgtgaattaagcctttcataaacagactgtgagccagaatatactgattagaatggttttcatgtagaagccgggtttgtcaaagcagtattattactattactatcatcatcattgttattgcataggcaagcactttgttgagtactttatatgcattatcttttttaaaccttgtggagcccctgtgaggtaggtactattcttacgcccaaattatagatgagtaactagaaggaattcagtatcttgccacagtttagtatgaaagcaagaacctgagcccgggttcgtcttacccagagcccatgaccttggccgtggccttgacttcaaattttggttgtgtagtctgcatgtgtccagtctgaagtgtgggttctcccagcatacgtagagctaaccattttaagagtccactgtgattctgacagtccttttatcagcctgttttgcctttgcatttgaaggctgtggcatgggccaataggcaaatttagtaactctgtttattatatatttccagtagaaacataataaaatataaaaaatataacacataataaaataaaaattttggctcgataaaaatttg

SEQ ID NO: 106135 - DNA, 1048 bp, Homo sapiens
taagacatgtaagaactgtatagcactatgccaagtattataacagatgtaatttagtgttaattttaaaacatgtattttacctcctaggtcaatatagtctatatttaaacagtatttctaatcagccaaaggatgagaacattatgggattattcaaaaaaactgaaatggtttcatctgtcccagctgaaaataaatctgtcttaaatgaacatcaggagacatctaaacagtgtgagcaaaaaattgccatgtatgtaactcctatctgttgttattgtgtggtcatcttcagaatatggttttgcttttcctttacttgcatgtgaaatagttactctgaatacttagagctatttaaaagcttattacttaatatttatggagtcagttgtgtagaaatgtatgatacagtttctgttatcttttgtgttttaccttagagagaatgaatggaaaccagctgatatattcagtactctgggggaaagggaatgtgatagaagttcgttggaagcaaaaaaagcccagtggaggaaagagctaggtaggtaacttttatacctttattatagttttattggcttaaagaatatgtattgaagccgggcacggtggctcacacctgtaataccagcactttgggaagccgaggtgggtggatcaggagggcaagagatcaagaccatcctggccaacatggtgaaatcccatctctactaaaaatataaaaattagctgggcgtggtggtgcacgcctgtaatcccagctactcgggaggctgaggcaggagaattgcttgaacctgggaggcagaggttgcagtgagccaagatcgtgccactgcactccagctgggctaccgagcaagactccatctcaaataaataaataaaaaagaatatgtattgaggatgaagtttaggggccaagggaaaacgtcccctttgccctctggaggttttctgaaagatcaactgacaaaaggcaaattaataaaaggcatacaaatttattaacatgcatggaagttttacaaaatat

SEQ ID NO: 106136 - DNA, 1060 bp, Homo sapiens
caagactgtactgtttagagtccttatacatatagatcactagctttgaaaatttgagaaattcaaagaattaggaaatttctaaaaagttgtaagaagctatgcaacatcacataatgcattcaatgaaacaggttcacatgggcaaatgtggaataaatggaatattctggtcttgtcaagagtttcagaatacttctagttttaattgattaaagactttgattttattttttcttttatagccacaaaacctcataagttacctttgaatatataattttttcctctatttttctttgacggtcatcttctatttgcttattcaactcttcaatccattttctttgcagttcttgtttcacagcactgaaagggtgctccagcagtactgtttcctaaacaacagccataaaagccatctaaagttcagttctctttttctaatcacttaatatgtgcaaatcttgccaaagtaacatacagatttaatccactgaggcatttatctgtaagaggagcaataacttcaaacgaatttgaattcaaagaattaagtagatatattctgattctcagaatcatattttaaatatactagatcagagatatataataagatatctaagtgtaagggaagggaattttctaatgaaaaacagaaaattctttctccaaaacaattaaaagactttcaaaattcagctggatgcagcagctcatgactataatcccagcatgttgggaggctgacatgggcagatcacttgagcccaggagttcaaggccagcccctggccaacatggcaaaatctcatctctactgaaaaaaaaaaaaaaaattagccagctgtggtggtgcatgtctgtaatcccagctacttgagaggctgagacacaaatcacttgaacccgggaggtggaggttgtagtgagctgaaatcatgccactgcactccagcatgggcaacagagtgagaccctgtctcaaaaatattgtttttcaaaattctaagtctcttttagaggctgaaagagttattaatttaaaacagatgaa

SEQ ID NO: 106137 - DNA, 1033 bp, Homo sapiens
ccagaatattccatttattccacatttgcccatgtgaacctgtttcattgaatgcattatgtgatgttgcatagcttcttacaactttttagaaatttcctaattctttgaatttctcaaattttcaaagctagtgatctatatgtataaggactctaaacagtacagtcttgttaatttttatgatgcttattctgctctaaggtgacttttagaaatcatctttggttgtcatttagaattatatatgagaataattggaaaaattcttagcaattcttatttgtcatcattagggtgaggaacatgacagatgggcaatgcactttgattcattaaagagttatcctggttctcaatctcagctgttctctcagtcaacacacaaacaacctgagtacttctgtgtctctcctgacactcaggagctggctgatgtcagcagtgtttgtacacctacaaccggaagccaggttgaaccttcagaggaggagcatatagcaaaacctattaaggatgtggttatggcaaacagtaagaaaacaaagtaagttcatgcttatgtatttattgacttttcagaaagtctgtgtgctttagtaagactgttgttatgtctaattggtttcaggtttggtatttgtctttgaaatagaaataattagtagatttatcccaaacaaaaatgatttagcttgttgaatctacctttttgaggttttgaatagctaatgtatgtatcttgccagctttctccgttctatgactgctctcttggacccagctcagattgaggaacgagacagacgacgacaaaaacaattagagcatcaggtattgcattgttaaacattgttctttaccttaataagtaacagtcatggtgaacatatacctaagtaaatggaaatttaaattctgatgtaaactttacagcataggtcctgtccagttgtgtcacgaatccaatccctaccacaactggcattgtaatattagaattagcttatcaaatgctacagccacctgcctt

SEQ ID NO: 106138 - DNA, 1042 bp, Homo sapiens
tagggactgggctctcaaaatagtgccatgctacagttccttaggtcttgggtgtttgtggagcctagtgtgagctccctcttgagcagtgctttcatgtggtctccaggtaacgccctgttagtcttgagacccacaagagtcaaggggctgtttgatggttaggattgtaggagtccttgatgggcatgtggattgctggggattgctcactttccttttcctccaattaggcagcctctgtagactcctagctaatcctgtcaagacaggctgctttgctttcttccttgcttttgatgcttcctgtcatgttgaattccactgttctctgttagatctacgtgaagtatgattgtctactcattattttggttcccctctgtggaagaggtgagcactgaatgtatctagtcagccatcttgaattccctcctgcttagatttttatttttgacaatgatttacgtgattgcttatgactagaaagccatcactgcccaggtagaagagaagcgcaggaagaaacaactggaggaagagcaaagaaagaaggaagaacaagaagaggagcttcgcttagcacaggaacgtgaagagatgcagaaacagtatgaagaagacatacttaagcaaaaacaaaaggaagtaggtacttacattctaattgtaactttggtttttgtttgtgtttttgagacagggtctcactcttttgcccaggttggagtgcagtggtgcaatcatagctcactgcagtcttgacctctgggcacaagttgtccttccaccttggtctcctcagtagcagggactacaggcacgtaccaacacatctggctaatttttttgttggtctgtggagacagggtctcactatgttcaagcgatcctcccacctcagcctcctaaagtgttggtattacaggtgtgagctaccatgcttggcctcctaattgtaacattttagaataaaaatggatatgtttttaaaggaaaaataaccagaagttgaacatttctattattttgaattgtgaag

SEQ ID NO: 106139 - DNA, 2366 bp, Homo sapiens
ttaagtagctgcggaattaatctgatgcatacttacctttccttgctgaatgaatgaatattcagaggctcttcttcctaaaatatggatagataaatgcagaaaggaatatatagcatcttcacatgtccccacaaatatttttagggctacttgttgaaatagtctgagggtaatatttgaataacaggtactgactgagcaatggaatagatatagttttttccagagtcaaaactaatccttgggagttcctaatctcccaaacctctgtctatgtggactataaacaagggttttaaaggggtatttgaatacacagcatccatctacagaagttgtgtaagtgtaaaggactcgataagcataaggaaaccttttcagctttgtgggccatattgtttctgttgctagtctggtgtgtgaagtcagccacagacaattcataaaagaatgagttgactatgttcgtataaaactttccaaaaacaggcagcagcctggatttgcccatgggatatagtttgctgatccctaatgtaaactgaaacagatcagaacagccttaccaaagcatacgtatgagaaactgtgttttgaatccagaaacgtcaacacatcatctaagatggaagagctttacctttttgactagatgccacctcaactttgactccgtttcttgatgagatgaatgaaaaatttctggtgaaatgcctctgttttgagagaggtgcccaggattatttttttctaccaaatgaagcaattccatctgcctccttacttttttttcttctctctgcttttgaagctgtttagggtacttttctgatgctggaatataccttttaggtggcttatttatattccaatcaggccttttaggatatttcttcatgtgttttgtttgtttctctattcttgtgaactgattacactggtcattacaccgattgttttctttttctaagctggctcctttatcctgagttagttcttgcttgtttttcttggtgctaaactgtccaataagttctgccgaaatctcaggagatgaacaatttgtgatgtccctctccattaatgatccacaatgtgattctgcattggtgaatattcctatatttaagtcatctaaaaaaaagttgcaaatgatttttaaaaattgtaaacaaaattttcaatattaaataattttccccaaaacattaaacaattattgccctctaagacttttttctttcattaattttcaacaaaaccgaacctctatactcattaaagaacaaccacatactcccaaccactggcagccaccactctaatttccatttctatgaactgataatcatgaaaagatgctcaacatcatcagtcactgggggggaaatgcaaaccaaaaccacctgagataccacttcacaaccagtagaataacaagggctggcaaggatatagagaatcagaacccacatgcactgatggtgggaatgtaaaatggtaccactgctttggagaagagtttggtggttcctcaaaatgctaaacatacagtacctgttactcatgactcagcaattctactcttctctcgaactaaaaatgtacatccacaaaaatctatatatgaatgttcacagcagcatattcatagccaaaaagtggagataacccaaatgttcatcaactcatgaataaaaatgtggtattataaatgtaatatttattcagtgacaaacaggaatgaagtactgacacatgctacaacatggatgaaccttaaaacatgctaagagagaaagaagccagagaagaccgttatgtggtctaattccagttacgtgaaatgtccacaacaggcaaaaatattcagagacagaatgttaactggaggagaaaagagaaatagaaagtggcaagtaatgggtacagtgtttctagagtgatcaaaatgttttagaattgattgtggtaatggttgcaccactgaataccaaaaaagactaaactgtaggataaattttgtggtacatgacatgtttcaacaaagctgttatccctttattttgtaactcttactgaaaacctcaagttttgttaatttttgaacttttaaattgaacttaattctaactgctttaattatgactttaagtaaattttaaaccaaaccacaatttccacacaaatacctgtttgcacaccagtatccttcttagaagtcgtagaattcatatatgtattcattttaccactgatttcatcagaatcatgtcttgaatttgaaatgttagatgcattatattccatttgtattgtatcaactggcaaagagaaatcacctgataaaacaacacttaagg

SEQ ID NO: 106140 - DNA, 1009 bp, Homo sapiens
catgattctgatgaaatcagtggtaaaatgaatacatatatgaattctacgacttctaagaaggatactggtgtgcaaacaggtatttgtgtggaaattgtggtttggtttaaaatttacttaaagtcataattaaagcagttagaattaagttcaatttaaaagttcaaaaattaacaaaacttgaggttttcagtaagagttacaaaataaagggataacagctttgttgaaacatgtcatgtaccacaaaatttatcctacagtttagtcttttttggtattcagtggtgcaaccattaccacaatcaattctaaaacattttgatcactctagaaacactgtacccattacttgccactttctatttctcttttctcctccagttaacattctgtctctgaatatttttgcctgttgtggacatttcacgtaactggaattagaccacataacggtcttctctggcttctttctctcttagcatgttttaaggttcatccatgttgtagcatgtgtcagtacttcattcctgtttgtcactgaataaatattacatttataataccacatttttattcatgagttgatgaacatttgggttatctccactttttggctatgaatatgctgctgtgaacattcatatatagatttttgtggatgtacatttttagttcgagagaagagtagaattgctgagtcatgagtaacaggtactgtatgtttagcattttgaggaaccaccaaactcttctccaaagcagtggtaccattttacattcccaccatcagtgcatgtgggttctgattctctatatccttgccagcccttgttattctactggttgtgaagtggtatctcaggtggttttggtttgcatttcccccccagtgactgatgatgttgagcatcttttcatgattatcagttcatagaaatggaaattagagtggtggctgccagtggttgggagtatgtggttgttctttaatgagtatagaggt

SEQ ID NO: 106141 - DNA, 1686 bp, Homo sapiens
aaatgagtaaatagaccaaagtggggggacaattttctagttctgtagagggaaaaacatctgagtcaacattttgaaatgcagagggtattggtacatgacgacatggaaaagggcacttttaaacacagcttactcttcctcaagtacagagagtatatagtgaatcaaaactaactacagccattctttttaaagcccaagggatggagcaaaggtgtaaggatgttacctgtttgttttaatcagagagcaaaaagaagtcacaatagtttgggagaaaaagtagtatggtgagtaaggttatgcgtataatttcatactgaatttattactatttgggatgtacgtcaatgttctaacaaacactgccaacacgtcaattttttaaaaagcgtgggccacattgctaagaatttgttaaagcataactgtattttttgttttagggccttattgatgttttgccgttccaatgtatgcatttttttactcaataaacttgtcttaattttagaactgtctgatgatttcgtactggaaagaactactcaaagacggcagtgtaaaagcaagtcttaggaaagtcccattttatttgtgtctaacaaacatacaggaactgaaatatttttgttaaatcctgggatgcaccgaagtaacttaaaacaaaccgttcaacaggttcccccaaccgcccacgccacataaagaacagacatatctacacttgaaaaagctcatacctgtctcagttctgaaagtcccttaaggattgcttgctgtcgatccctatttttcaccatgttaggattaagaagtggatccctgacacagtcagaatcaaatagctgtcgtttttggccacagtctaaagccagatgaaagtaacaagtcagtcaattacattagtaaaatgacatagccctgtgctatataatattgtcaggagtcattataataagtatgtatcctaggaaagtactaagaaaaatttaagacatattcaagaaactttatagaactaagtgcaggaattactaatttggaatttaaagttgttgacggggtttacatgggtcttcaatttttacagttagaatgcttaatatttacttaccttgtgaattttggtactgagggtcctgggttgaaggcccagacaatggtgcatcgggatcaaggtaatagatctcatttgttcgaacatacggaataaaatgggatgattcagaaatcccagatgataattctgtttgattacttcctgagatcaaattctctctctcatagctactgttttttagtggtaaatgtaatgtattttgagtttgttgggttctgtttttcactactggaactggtgatgatggagacctatttaaaaaaaaaatagtaaaaaattgtgtatttagattaagtatatctctttaatcacatttcactttatttatgagatgaagtctcgctctgttgcccaggctggagtgcagtggcgcgatctcagctcactgcaactctcctgcttcagcctcccaagtagctgggattacaggcgcacgccacagtgcccagctagtttctgtatttttagtagagacggggttcaccaagttggccaggctggtcttgaactcctgacctcaggtggatccacctgcctcggcctcccaaagtgctgggatt

SEQ ID NO: 106142 - DNA, 4164 bp, Homo sapiens
ttacaggcatgagccacctcatccggctaattgtgaattttgagtagagatggggtttcaccatgttggccaggctggtctcgaactcctgatctcaggtgatccaactgctttggcctcccaaagttttgggattacaggtgtgagccaccaggcctggtccatatattgtgttttttgaaggaaggatttatactgtttttgtccctttaagtccttcattaaagttcaaaattaataaaggtaatcataatttattatttagtaagtagaataatcagctgagattttagcctaagctgtatagctggccctgaggcctcgcgaccaagaaacccctggacttatcccttctttctttctttccaaagaagcacaccccctacatcaggcagagagctaaagcagtgcagttgtcattagttgcctcagtggagaaattgaattttaatctaaagcagaaatttccatactaaattttagaagtacagatccagaaactgaactgcttaatttcacagattgaatgctaaagctctaagtctgttgacgcttctgaatgtctatcagaagaaacatctggttgaaattttgtcataccacaattgtgattcacaaactcgaaatgctccagaattggattgccttatcagacttcaggctcagaacatacagcaacgacacatagtctttttaacaggtaaagagagcactcctaagctttctactatgaatataggaatgtgaatgaaaggattttatggggctgtggtgggtattgctaagctttgattctgaaaatgtgaaggaaaagattttgtgagggctaggggctgtctatattttgaagtgtttcatacatgaaactttttttcttaatttagagaagaacatcaagatgctttccagttatacagataatggaatagtggttgcaactgctgaagacttcatgcaaaactttaaaaatcttgtgggctatcacaattcaatcacagaagaaaaccttccacagcttggtgctaatgagaatcttgagtcgcagtcaggtaacttttcagtggttttcattttctttaacgcagacagaaaaagaggaatggttttgctgttaccaaataatgaaatgaccattttgaaaccacgtacctcagtataaacagccatagggaaagtgtttcaagacatttatcattctaatacttagcatgcacaagatctgctcatttattatactgtagccagtgtaagttgtaagttattatagattatgcatttctacctatattgtagacagtgcatactatggagtatgcattttgtctttgaggtttttgtaagcattattggttactattgtcagcaaaggggttatattaataaaaaggtaggaaaccagatatggcgatttagcattgagctactagatttccccacatgcataaagcaatttaattgcaagatagtagagctgtcatagctttaatcttttgtgagatggcctctgctttggttccaggttctgtgtaaaatgaaagatgtacttttgtttttgatgaaaaaaagcagaaatgatcattcatttagtgctaaccaactagtttagtaatccagtgaagctagatgtcaaaaaattttattttatatttgtcttgtcaaatactgaattaccgtataactttagatgctgttttgacattaacccctttggagctgggagttgggatttcccaacattaaacgtgaacacatttcgcagaagcttttagcatcggattatctggacattcacatctagtgtgagtgttgtgactaagtgaacttgtggcagaagaccaagctttaagggattgtggacttgcagaccctgacgcgttatattgtgtgagtagtgtataattttaaaacttaaacaaactgtgtatttcaatagaggaggactttttgttttttaaatgtagctcttttagaaaacgatgaaaaggatgaagaggatatgtctctggattcaggggatgaaatctcacatatagaagtatgcagcaattttcattcagaaatatgggagaaagagaccaaaggatcacgtggaacagatcaaaaaaagaatactcaaattgagttgcaatcgtctcctgatgtgcaaaacagtttattagaagataagacttaccttgattctgaagagagaacttctattgatatagtatgctctgaaggagagaacagcaattcaacagaacaagattcatatagtaactttcaggtttatcatagtcaattaaatatgtcccatcagtttagtcattttaatgttctcactcatcagacatttttggggacaccatatgccctttcatcaagtcagtctcaagaaaatgagaattacttcttatctgcttatactgaaagcttggatagagataaatctccacctcccttaagttgggggaaaagtgattcttccaggccatattcacaagagaaataactgtagtaactttttttttaagagattgttgtggactttgtttattaacaatttatatttcattctctaaacaaaaggttcttgttctttctcaaatgttttttcttttatttaaatcatgatggcctgtaacagttgaagcatctaaaaattgaaataaatatatatttttaacatatattgtacttgaattatctcatgttggcacttctaagttttactttttgtatgttacctgtacttaggcttcaaattgaagcctgttttatgtgtaaaatcagatgcttgcaggaggacggtaaacagcaaaggctttacttctttttctctaatgtcacctgatataaagtacttttgttgaagtgaattattttgatgtaggcttttgtatactgtgtttacacaggtataagtcagtaatagcagtgttaatatttacaggattttggctcgatacctcaagatttatctaacagtgcagtttcatttagataataaactatgtacataggacacattttttatctctaggcttagtcatgtaaaaactgcctattgctaaaattctggtaactttttgagagtattggataattttcagtacctgcgcaatccttgatttaatgaaattaaattttttatttcaaaagataggcttctgtttatcaaaggcgttgaacaatttgatttttaaattagttttagcaaaatggaagtataatgggaatatatttttgaggtggtcttagtagtaattaccatttgttgaacacattaatgctatactagacagatacagtggagatagctttcaaacccgtatctattcctaactactgcctctaatactaattactaacttgttactaatgctaacttttaaaaatgtttttgaaaattgcaatttctacaaataaatgtcatagtgcaaataaatgtcaggatttagagaaggagcctaaactgaatttgtgttatttcagtaaaagttatggagttatgggtctagacgtgttaataagttagacagaactttggcactttagaacaaatgcatgagtggtatttcagttcctaagttacataaaaagtgtgaaagaacactgtgaggtcccagcaacgccagactatattaaggtaagtagaaagtgtttttatagggcttcaatacccaggtggtgacagagcagaagaaccggtttttttttttttttttttactactaagcttttacaaaagaagtatctgttttattgtatagaacaagtacagcattttactacatagtatacaagtttttaatgagcatttaaaaaaataagtaaatctaggctatttgaaaaatacagttgagccagtgagcacattttataatttggaagacacaaatcaaatgtgaaggatttgattttctacatttaaaatgaagaaccaaaactctcttcttgattttcagctaaaggcaggagactactttccaactccttttgcttctggagaaggccctgaaatcacattgatatatgtttgttagtaaaatgtgcacacctgacttgcaatgttgtgttaaactagaattatattcacttggaaaacatatcgcttaggataaaattttgtcattcaaaaattttttcagaaatgcttgtactagaccacctcatttggatata

SEQ ID NO: 106143 - DNA, 3230 bp, Homo sapiens
gcatgtcagatggtaatttaccttttcattaactgactaagctggtctgagatctgcccaaaagttccagagattggatcaaaatcagtgtagaaggtgctgctttagcacaacagcatcctctttggggtaacacttcaggttgaaagagcagcagactggttgtcaggtaagctgggtttttattatagctgtctgaccagctgtgctgacattaaaagtaatctctgaaatgaggaatatgacctccaggatcctgcagtttgcttcagtgttcaggattccaccagcaagcagagagcaaagggaactctgcatgaaagtctgcctgtgtcctgtgaaaggcagtaccatgttcaccagcatggaggaagagttactagttgggaaagtctactttgaagacagaaacttgacagaaatggctaatttgtatgtgaataccattgtacataatgaagctctatataaatgcttttttagctgttgtgaattagagctatggttgtgaaagttcttaactctgaaggcgtttatcccagttaatactgctgcaaataaccaagggcctacttagaatggaaaggaaaaggtgagctagggagtggttaatgattagactctaggttgccttaaagtgtttctcataggatattatagtcaacctagagtctaatcattaacctctataataactaaaggagctgggttaagaacctggcctaattaacagttctttctgttaactcacactgttacttggctggctttgcatagtgctgtaacattgtgactgtgtgattggtgaagctctgtaacattgtgactatgtgattggtgaagctctgacctttagattcctcttctagaaaagaaaagtggatttgggccatgtgcagtggctcacgcctgtaatcccagcactttgggcggccaaggcaggaggatcactcgagcccaggaatttaagaccagcttgggcaacacagcaagactctgtctcttacaaaaaaaaaaaaaaaaaaaaaaattagcctggtatggtggtgcgagcctagtgccatccatgtattcaggaggctgaggtgggagggtggcttgagcctgggaggtcaaggctgcagtgagctgtgatcatgctgctatactccagcctgggcaatggtgagaccctgtctcaaagaaaaaaaaaaaggatttgatggtctcttagagtgtaagttcattcattgttaataatgtcatggtagtagttaagcttatcagtttatcttgcatttctggtgttaaattgatgtttacaaagaagtattttaatattgatttagttgtttttctttaacaggaatatcttatcaaattaggcaatacagaatgtcatcctgaacagtttttggaaagaagatcaaaattagataaactattgattattattcaaaatgaagacattgcaggtttcattcacaaggtagactattaagtcaaattcactactttggttttaaaaactcccttattttaaaatcttactgtctgccagactagtgtttttaaaataagctttaaaggagattaaacttaaggacccatctgtgaatcagcttgtgagattcaagtttgtacctatgcaaaattttaaattgctgcacatcacagatcttccctgtcactcaggtagtcaagactaataagagtactgaatccttgaatgccattgggtctgctgactgactacataatgttttcatcttcatttgtatgtcctaggaaaaacctatttgtgctccatctttgccagaccagtccccttttcccttaaattttgaggtatcccatctagtcttaggagccctatctccatcctacatcttggacgtctttcctgattgactgttcgagcacataggcttttgccttcgtctgaattctgactgtactcacaggttatagagaggtcagcttttgtccattttgtgttttcaggtctattgtaagctccttttccttagtcgtctgtggtaggtcccagtacataaatgttggtttatatattgggaaataatgttgggaatattatttgtgtggctttccagaggtaatccactaatatagatgagccataatgcattctgttagacttcttgtaggttccttcacacttgagtctgtcaattcattccctccatctgtttctctttttgttttgggatttaaacagatacctggcttggtgactttaaagaagctcccctgtgttagttttgctggtgttgatagcctggatgatgttaaaaatcatacatacaatgaattatttgtatctggaggttttatcgtatctgatgaatcaattctaaacccagaggttgtcacagttggtaagatgatgttcttttgagcacgtaactcctcttctgactctcatactttttaatgtactgtccatttattctgccattcacagataactagtacatttcagtcttttcttgagcttttattacctcaaatttctttctccttctcttagaccaataatatcctctaaatgtggtgtaaagcaaggctgtctgcccctgctgcagttgaatcacttcttgtattactgtcatcaacatgttcttttttatgtgtagatgttatattattagagctttaggcatgtatagatctgtctcccttagacaaagagaaatgaaaatagtacataggaaagtaggtgtttctacataatatgaaaaaacacttctttcataattcacttatggaatgattatttattgaattaaaaacaaacttcattatctctaacagagaaccttaaaaattttttgacattccttgaggaacttagtactccagaaggaaaatggcaatggaaagtccactgtaaatttcagaagaaactaaaggaactaggcaggtaagctttgaaacataactatataatggttgttgattttaacattgtactcataatatttctctcttcccatgtttgtagattatggatgttcatttttcacagatgtccatagccagccataattgagtatagatactgaattattctagcctttataagaagcagtatttttcagtagaagtttgctgaagttgttatgtgcataggtaaaattggtttaatctttgccatttgtggatttagagtaatcatccaaatggaatgatcagcatttttttctttttttttttgagatagagttttg

SEQ ID NO: 106144 - DNA, 1297 bp, Homo sapiens
aaccccgtctgtactaaagtacaaaaaattagccgggcatgggggcaggcgcctgtagtcccagctactcaggaggctgaggcaggagaatggggtgaatccgggaggcggagcttgcagtgagccgagatcacgccagtgcactccagcctgggcgacagagcaagactccatctcaaaaaaaaaaaaaaaaacaaaaaaacacagacacacacacacacgcctttctgtgtgtctgtatgtttagacatagatacgtaagtttgttaccagtaggtaggtaaatggtaacacattggagcaattacattagtggtataatagtaaaattaatcataaattatgggattttaattcctcaagggaatgcctaggattttgaaataaatgcctgctctcatttatggagtttacttaccatgactggaatttcattagaggaagcagagggaccatgggctttatagctactaacatgtcctaagccttctgtaagtttggggatctctgaggtcagcatgttttgtgtgatgttacctggtcaagacctgaagaacatagaaattacatgagtcagagtactgtgttgggctttccttactgattgctaatggtttcttgggaaaatgaaataagacttctaggaattccttggttgcatttttgccctacatgactgaatgtagagtttctcaacttttccccaccagccagcaacaagttccctagcacagtactctttgggggcatagctagctgcatattggtttggggttagatgagagaataggttgggcacagttcccggtgtgcttagcataactccaacttcctccatccccgcaccccccaccccccacccccccgctcctttttttaaaaggatttgtaacacatacctatttgacattttaaaaaatttatttatttattgagacggagttttgctcttgttgcccagggtggagtgtaatggcactatcttggctcactgcaacctccgccttctggggtcaagcaattctcctgcctcatcctcccaaatagctgggattgcaggcacccgccaccactcccagctaattttttgtatttttagtagagacagggtttcaccatgttggccaggctggtctcgaactcctgaccttaggtgatgtgcccgccttggcctcccaaagtactgggattacaggcgtgagccatcgcacccagccgttacatttagattaaggggataggagatgcatttcctaattaattgtgcttttaatttatctggcatagaataagtcat

SEQ ID NO: 106145 - DNA, 3254 bp, Homo sapiens
ttaaaaatattccctttatttataacccttgaggagtaaacttactggttgttgtttagctatacattttgggagccactgttgcatttaaagtaataaatagctgggtgtggtggtatgtacctgtaatcccatctacttggaagactgaggcaggaggaattgaggccagaaattcagggccagtctgggaaacatagtgaggccccatgtctaataaataattcagaattttttaaattaaggtagttcttcgcaacccatatgttttatgagatgcaattcaattttttttctttgaatatatcagatatttgacatgatacgtaattcaagaagtccaaaaatacttaagaaagtaatactgccccagcccggaacacttagattcttccccatatattagccatggttaccaatttctcgtgtatccttccagacactttatgtgtactaaagcacattttaatgttggagatttaagatactcaggatatttagtactcctaattatcttatgaaacttggattttctggtttatcaatttcatacagttctaattcttatcctggcacgttggatattttgttcccctctcacctccgcctacagacccgccttgggtcttttcactgtgctgacaaattgcctttgcaatagttaatgagtgtactggttcatgataaccaccaggattggtagagaatgtcataagctcgactcctagtgaggctatttaaacctttagaaaagtgtgatgagtgtgagcaaaatcttcactgtaagtttgaaaactacctgtacctggactttctgatttagaggcaccatttcctatactacagcagcaatttgttagggaatgttggccaaggcttaaagaaaaacagtaattttttagcgggtaaaattgtgtatacgtcttctaagcaaagatcatgagtttttgtcctttcctaaaatataacactaaaattgaagttaaatatatttttccccttgttgcttaaaaatggaattagagttccctttttcaaatgtagtttcaaaaacatactgtgtttgaatttaggatttttttggggaaagtatgatcttttggattgagctgtttgtcaagagtgaaaggttttaatctcattagtatcagctaaccttagtatcagctaacatctgtatctcaaatgaggtatagctatcttttcttttagaattatttccaaacaaaaggaaaatatttatgaaaggactgtcaaaaatgtgcagctgtgaaatatgttcttctcttgtcttattattgttccttttatttcctgataaaatgaagtccctgacattacaggaaatctacttagcaacctcgtaagtgagaacaagtctgaaagcagataaaattaattatcctagatcctagatgcaacttttaacttggcagttattcccacagcatttctgtttggtattcttacaattgccttacactcagaattcttactaaggggccattaccatagtagatattacttggcaaataataaatacagggattgagcaagctgatgtaattgactgtcttgatttaaaatgtgtattaaacttagatctacagaatggtagggaggcagaaacaagcaaatgacttaatttgtattgatgccaaattggtgcttgcttgagcgcttcaaaatagcagagttgttaacactagctacaactctaaggaccatcccataagtagggcacatagggaatagaattcataccagaattttaggattttattttaccttctaatatataattagttctaaatgtgtgttaacccttttttcccccaatttaagggtttgtgttttcatatcttatctttttggattgctcttataataatgaactcttcctgtataggtatgaaatcaccagaagaacaactggtgtgtgtgccaccacaggaggcctttcctaacgacccccgggtaataaatagacagagaagttctgattaccagtttccatcctctccatttacagacacactaaagggcaccactgaggatgacgtgttgacaggtcaggtggaggagcagtgtgtgccagcagcagaggcagagccgcctgcagtgagcgaaaccacagagaggacagtgttaggagagtacaatctcttttctaggaagatagaagagattttgaagcaaaagaatgtttcatatgtcagtacagtttccacacctatcttttcaacacaagagaagatgaaacggctttccgagttcatatattctaagacttccaaagctggtgtgcaggagtttgtagatggtttgcatgagaagctaaatactattattattaaagcatcagccaagggtgggaatttgccaccagtcagtcctaacgattctggtgctaagatagcatcgaatcctctggaaaggcatgtcataccagtttcctcaagtgacttcaacaataaacatctccttgagccactgtgtagtgatcctttgaaagataccaactctgatgagcagcattccacttcggctttaactgaagtagaaatgaaccagcctcaacatgccacagagttaatggtgacttctgatcatattgtacctggtgatatggcccgggaaccagtagaagaaacaacaaaatcccccagtgatgtaaacatttctgctcaaccagctctttcaaattttataagccagttagaacctgaagtatttaatagtttggttaaaatcatgaaagacgtccagaaaaatactgtgaaattttatattcatgaagaagaagagagtgtgctctgtaaagaaataaaggtaactaaaccagaaggtaatagtaatgctgtacaaacttctcttgttggtgtgacctctataaaatggaagttttttgtatttaaatgttttgtgtttaaatgttaggccaggaatggtggctaatacctgtaatcccaaaacttgggaggctgaggcaggaggattgcttgaggccaggagttcatgacaagcctgggcaacataacaagacattgtctcttaaattaataacaaaaattaggtgtggtggcactctactgtagtcccagctgcttgggaagctcaagtgggaggatcacttgagcccaggcattcaagattacagttagctatgattgtgccagcctaggtaatagagtcagaccctgtctctaaaaataaatgttaattgtgtattttcataatttaactcagggtgg

SEQ ID NO: 106146 - DNA, 1525 bp, Homo sapiens
tatttgtaagaaatgtgaaatgactacatctttgtagttatttatttcctttgggagttcccctcccccgctaattaaagttactagtttccttgaagaaaatcttcaccatctccttctaggaaaatgtggttaaaaaaaaaaagaaaccatgaacaacagatatataacatagaggaaagttcacaaatctttttttttttcccctctgatacagaatctctctctgtcacccaggctggagtgcaatggcatgatcttggttcactgcaacctctgcctcctgggttaagcgattctcctgcctcagcctcccaagtagctgggattacaggcatgtgccaccgcacccggctgatttttgtagttttagtagagacagggtttcaccttgtcggccaggctagtctcgaactcctgacctcaagtgagccactgaacctggccacagatctttattgtacagctttttgaaattttacatatgtacatgaccatcacccaaatcaagatgtagaacgtttctagcatcccagaagattttcttccacattctcctagttagtactctccttgttcccaagtaagtgctaatctgattagttttgcctgttgttgaacttaggataaatagagcctactcatgtcgtctctcgtgtttggtactttcatgcaatatcgtgtcagggagtccatgttttgcatctatcagtaattcttttctgatttcggggttttaccatgttggccaggatggtctcaatctcttgacctcgtgatctgcccaccttggcctcccaaagtgttgggattacaggtgtgagccactgtgcccggctagtagttatctttcttatgcttcagaatgttccatcagcacctgcattcctcttatttggaaataccatctttatattttgtaagctaaagtgtagacatctgaatgatggtgcctttagagaactgactactcccctttcacttaaaagttaaaatactgcaattatttaatggcaataagtttttttttaaaaaagcacggtgtctcatgtttgtaatcccagcactttgggaggccaaggtgtgcggatcaggaggtcaagacatcgagaccatcctggccaacatggtaaaaccctgtctactaaaaataaaaaaattagctgagcatggtggcttgagcctgtagtcgcagctactcgggaggctgaggcaggagaattgtttgaacctgggaggtggaggttgcagtgagccgagatctcaccactgcactccagcctggtggcagagcgagtctctgtctcaacaacaacaacaacaacaccaccaccaccaccaacaacaaaagctttattatggattgacatgtatgtgtgttttcaatcacttatagatgaagatattttcaaaataattaagttttgttttttttttctatttttttttgcaacagaatcttgctctgttgcccaggcaggctggagtgcagtggtgcaatcttggctcactgcagcctctgctt

SEQ ID NO: 106147 - DNA, 4264 bp, Homo sapiens
ccttaaggacaaaatataataggtatggaaaagatagaaatcaaattgtcatttttttagtagcctagtgtaatacacatataatcctaacaattggcaaaatagtaattacaaatgtttcatctcttgtcaagcacctggttgactttgagattttgatggtagttattaatacacatatttaaaacctaatgcatgagcttattttcctattgatagaatgcttaaattacaatggaaattaaactttaatagcaattttgaactatgtgcaaaattttacaattctttttgtaaagtgatgcgaatatttgtaaagtctaagcaaattggttgagttcctgaccataaatgctttatgataattttttaggtatatttgattttaaaagttttatgcttgcttttaaacttaacttcaaccaatgacttcctttttctcagagtctccacagcctattggctcacttggacatgatgctgacttgaggcggcagcagcaggatacctgtaactccggcattgctgacatccataggctgtttaattggttatcagaaacactagcaaatgcgcgccattctgatgcatctctgacagacacagtcaacaaagccttaggattgagcactgatgatgcctatgaagagctgaggcaaaaacatgagtatgagttgaactctaccccagataagaaagactatgagcagcctacttgtgcaaaagttgaaaatgcacagtttaagggtactcagagcttattactagaagttgatgcaacatctaagtattctgttgctatttctaccagcgaagtgggcactgaccataagctacatttgaaagaagtaagcatatagctgttggttacctttgtgtttgtgagtgtgtgtgtgaaagaggtgctgtgagtatgcttcagggaatgatttttttctttgaaaaagaaataaaatgcacttttgagtaaaggtgcctgtctaggatggtacttcctaagttattccttgttacaaagagataaatgctgaagtagttttccttccttcttagaagcttaatatattgtctacagtttacttgtgataaagcttaggcggaacaatctattaatatttgtcagaaatggcttattgggagttaattccttattgtttcataatgaagttgaattattaaagcattggctttctgtcggcagtaacagagaacccaaaggtgaggcagatgaggatgccagtctcagtacagcagtgtgacagttaggtacttggtatttcttacgcaaataggaatggaacataagcagcctttaggattacccctgaagtgactctcagccttgcttattagagtgtccagtatatttatgatatatgttcagagtgctggtttgtagctgagaagtagccttatctgccttaagcagtcactgcatcactggggaatagttctaggattgcaccgtattcctatgggcttatttcttcatttactgtctccattttctcttccctgcctttgtttaaaagttgtatgcatgtccccattctttctcgatgtcgttttgggatatttatttcaaggggaagatgatggcaggagggttattggggtatgtaaggtaggcactgaggaactaacctgtattaatattttctgatatcttttgtattttaaatcaagttgatggggggcgggggcatgggttgaacctagcacactacccatttttataactaaagttttattggagtacagctgtgtccatttgtttaggtattgcctgtgatagactagagagtctggcctgcagagcctaaaatatttaatgtttggcacttcagcacaaacgtttaccaatccctgttctaaattaacataaaattatgtttcgagggaaaagatgttttaattttgaaactagagtataactttaccatgttgattttacgcatttgtaatgtttagattgaagcacgtgaattttcagtgaaaaaacagtttattcttgacattaaaatgaattggaaataaagctattcagtgtgtactttgatttttaggatccaaatttaattagcgtgaataattttgaagattgcagtttgtgtcccagtgttcccattgaacatggatttcgtagacaacagtctaagtcaaataatgttgaagagactgaaatacattggaaactgattccaattacaggtaagaaaagtatacttggacttgtgtttgcttcattttacttagagaccagtttcctgaatgtttccatcttctgtggatttcactcttgggtcactaggtgcttcatcttaattggtgctgacatcttcagtgtcttattttgagtaatacagtgttcatcactgagtgttgctgttcttggtcagcatcagcaagcacctgcaaaatcaccttaaaaacagggatttaagacacactgtctctatggagtttagcatgcagactgctgaatgaagactgttggcagaaactgagtttttgataaggtgaggtagctgcagagataaaatggtgctctttggacaaccaattaaatgctgtcttctcaaactttaaacttcaccgtaacaagctgtcatctaataagtgataatgttgaggttcatctattagaaatttgatttcttaatactggattatcttaaataaattggattatcttagagaatggcctgaatgatcaaatgtaaatgttattgaactgtgaggcaaaaagtttagcagatgttgaaatattatctttttttttttttggtagcattctaatttctctgtgcaaacacatacatacacacacataaatacatactcttaatattccaagttgttactcacttttctagctaaacatttttggaaatattttcagggtatacgtcttttccagtcctacacctctaaccttttaaaaacaatagcaacagcaaacaactttttgttacaaagtagactggcctgtgaactaaactagaacctgctgagacttccgaggactctgagaagaatttataaaacttgatgagttcccatgggctttagcaccatcttctacttaacatctttctggagggtaggaggcctgtaggtgatgatagagggaacctagtattgttttatgaggtggaaacatcagcttgagtaggagaaacaaaagaagtagttgatataagaaggttatcctaaccgtttctcatttagacaccttcatacttggtgttgggtcatttgaaggtacaatgtcttaagtgttgatattccatcatcaccagtatgacccttcagattattttaggcagaagaaggaatgcttgcattgttatcacttggggttgtctgaaaggtgcttagtgtaggtatcactaatgtctgaagagagtctaatggatgctttccctcaggagggaatgcaagaagcccagaagaccagctggggaaacatggtgagaaacaaacaccaggtgagaaggcttgctttgcttttcttcccagtgtgcccttcttcagagttgctacttgcatttctgatactccatcaatagggcattgacttaaatttttttaattacagaaaatttggacagtaccatatttatttatatgtaaatcattacttgagttgtatccactattcttactataaagagtgttcagataagtcaccgaatatttatataaattttcttcacccatagtagagtctatcttacaatatgatttgggaagaccagaatatattcctaagccatttgtgcagtatattttatgataaactcttctttttttgtttttggtttttttgagatggaagcttgctctgtcacccaggctggagtgcagtggcgtgaccttggctcactgcaacctctgcctcccgaggttcaagcaattcaccttcctcagcctcccaagtagctgggattacaggcgcatgccaccatgcccagcttatttttttatttttagtagagacgggatttcaccatgtttgccaggctggtctcaaactcctgacctcaggtgatccacctgcttcagcctcccaaagtgctgggattacaggcttgagcccccaaacctgggtttcttcttttttaaatttttaaaaaatagccaagaagggtaagccatttatattttaggtatactattcatagtcttttaacctagttcttctgattgtaaaactaatttctgcaggtagattaaataagattaagaaacttggatttca

SEQ ID NO: 106148 - DNA, 4043 bp, Homo sapiens
gatagagtctcactctgttgcccaggcagtggtgcgatcatggctcactacatacagccttgccctccctcctaggctcaagtgatcctcctgcctcagcctcttgagtagcttgggattacaggcgtgcgccagcacagctagctaagtttaaattttttttttttctttagaagcaggatctcactatattgtctaggttgttcttgaactcctggcctgaagcgatccaactacctcagcctcccaagctgctgggattagaggcatgagccactattcccggtctgtgagggttttgtatgattattttttagcttagttcaattttgcattcaaattttagtaactctaaagcatcatttgccaggataaatattaggcaattcaaaattaatgagaatttttggcactgatataagacaagatttgttaaccaccttttctaagaatgaactttaatactgtgtattaagctaaagttcccactaatggctttatttcactgttggattaaggatgagtttctcagttgtggctactcagcatctacatatctgttcatgtgaagttagttactactttataagaggaagagatgacatgcaggactgttttgcttggagcctcagatcttgttctgtctctgtttcttcttacatattgcttgccactatttgaatttcctgggggcagtaggaagtgagatcttcaatgagtgggtgatttttcctttaaaaatgtgttctgctttttcatttgttttagtttcttattggcctgttttaggatcctggactttacaagcatgctattcatatatttgctatattgtatatatgtactagggtacatactcgtctggttcaacattaatgtataaatgtttttatacttctttggcaatatttagatctgtatttgattagtttcttgattgctaacatggtttgcttttttgtttgtttgttttatttacagcacaaaaaggttcaaccaatgcagcaccacaggagaggcatgagagcatgccagatgtattaaaaatagctcagtttttacaattttctttgattcagtgtcgaaaggaattcaaaaatataagcgccataaattttcattctgttgttgaaaagtatgtaagtgaattttttaagcgaggttttggttcaggtaaacgagagtttattatgtttccatatgattcacgattagatgataaaaaattcttatactcagctcccagaaataaatcccatattgatacttgtttgcatgcctatatttttcggcctgaagtgtatcagttacctatttgtaaattaaaagaactatttgaagaaaatagaaaacttcagcagtttagtccactttcagattatgaaggtcaagaagaagaaatgaatggtacaaaaatgaaatttggaaaacgaaataactcaagaggtgaagccattatatctggaaagcaaagatcatctcattctttggattatgataaggatagagtcaaagaattgattaatttaattcagtgtaggaaaaagagtgtgggtggggactcagacacagaagatatgagaagcaaaactgtcttgaagaggaagcttgaggatctacctgaaaatatgagaaagctcgccaaaaccagtaatttatctgaaaattgccatctgtatgaaggtaaaatatcagattgctcttataacagccaaaaataaagtagttctgttctttcttgtagcagaggggcgtataaattaaagcctgagggtcaaattcagcctgtccactatttttgtaaagaaagttgtatttgaatacagccatgcccatttatttatgtgtatgtagctgctctcatgctgtcatggcagagttggcactgagactgtatggcccacaaagcctaaaatatttgctacctggcccagtacaggaaacactttacaattcctgccctggtacatcagatttctaaattgtttggtttaggttaacatgacataataatactaatcagaactcttgtccttttatattcctttattttttttgagacggagtcttgatgtctccccaaggctggagtgtagtggcatgatctcggctcactgcaagctccacctcctgggttcatgccattctcctgcctcagcctcccgagtagctgggactgcaggcgcctgccaccatgcccggctaattttttgtatttttagtagagacggggtttcaccatgtgagccaggatggtctcgatctcctgacctcgtgatccgcctgcctcggcctcccaaagtgctgggattacaggcgtgagccaccacgcctggccatattcctttatttttatagttgaagaagtataatatcagaatagtagtatcttttaggctgttgcataatgaaaaggaaccttctgaatttgaaaataaaatatgcatacacatactcttttctaccccaagaatccaggaatatctttgggtttttctttttttgttgttcttttttcctttgttttgttttagttgacagaaaaagatagacatgtaaggcgcttgttttaagtgtgtttgtttcaatattgcaagtcagctaaaacacttttatctagatttttaagatcttcacactactagttgataagcacagaatgagttcttttgcattcatagaaagttgacataacaatccacgttttgtgttactgttgctcctctgattatggcagaactgaatattcttatgctttttattaagcaacttgtctcttcagattcagtgtgtcttagtctaggttagtcagatcagtgtcttagtctaggttagtcagatcagtgtctttttacacttttgctcttagcaatctgtatttgtatcctcacttttcactttcctgctctttttatttatttatttatttttgagacaaaatctcactccgtcacccaggctgtagtgcagtggctcagtcttggctcactgcaacctctgcctacctggttcaaaagattctcgtgcctgagtctccccagtagctggaattacaggcacgtactactgtgcctggctaatttttgtatctttagtggagacggggttttgccatgttggccaggctggtcttgaactcctgacctcaagtgatctgtctgcctcggcctcccaaagtgctgggattacagtcgtcagccaccatgctcagcctgctctccttttacttcttttattgttatggtattcaatgtggtagccactagccatatgtttttatttaagtttgaattaaaatgaaattaaaatacatttcaacaaccacaccattgtattagtacagagagagaacatttccattattgcagaaagttctatttgacattacttttctttgcagtaactataatgattttttctttagttaacctgtgtgtctctttctctttgcaatgttgttactctttgtctgtgttctttatctctttggtggccttcctgacttactaccttcttgcacccgtttcagtatcatgttcttctcagtattgctttgctaatttgctaccaatctcatcttatatacttgctttttaaggctttgttatagactagccatgtccagccatgtttcccactgttctctcacatgtcttggttaagggtcatctctctctgcctagagtatgtcatggtcagtcttttatttccctcttttttttcctgaagtagcttccatttctttcaagccttatatctttgcagttcatattctcctcagctttctgtctattctccttaatggtctcctctagtttatgctggatttgcaatctgtgctgaacctgttagcacttactgacacatactgtcttatcttgtgacatgtcttgagagctctgtttactatgtgctaggtactttatgtatatgaactcatttattaatagttcttgagtgataggcattattatcctaattttgcagatgagaaaatcatctcagataagttaaataactttaccaaaagttatgaagttagt

SEQ ID NO: 106149 - DNA, 2216 bp, Homo sapiens
agccaccgtgcccagcccccatggaatatctttattatactttgtgattaagaatgtgattatcaggccgggcgttggtggctcacgcctgtaatcccagcactttaggaggccaaggcaggcagatcataagatcaggagatcgggaccatcctgaccaacatggagaaaccctgtctctactaaaaatataaaattagcttggtgtggtgtaatctcagctactggggaggctgaggcaggagaatcgcttgaacccaggaggaagaggttgtggtgagccaagatcgtaccattgcgctccagcctgagtgacaaaagcgagactccatctcaaaaaaaaaagaaaaaagaaaatccaagaacaataaactcagtgaggttgaggagataaaggaacactagagtagttgggggaaagtagtagggacctgtgtcatacagcgtcattcaggcagtgttcaagtgtttggaaatttggatttgatcctaagagcagcagattttgaaggattttcaagggtgtgcattgaaactttgaaagtgtatgcaacataagatctgtgttttgaataattacgttagttactcgagaataaattgaggggagatgaggtagaaactattacattagagggtgatggcgggtgggatgacaaggtaatgatacaagaagagacagatttatgggatatttctgaggtaaggtccaatttaatactgaagcatatctagtttgggtagagggattgggtcaaacatcagattgtggtgggttgagaagtgaatggaaaatgaatgtgatgccagtatatgtggtttagctgaaggcgaggaggtggttggagagaagggaagtggctgttccaaggtttctttttgtcttgctaaatggtggtcgtaagttccaagaaagagggatacaacttttttgcataggtgcgccatttaatacaagttttacaacagttgactttttacttctcactttgttgagcctcagtttccaggtagtcgaatggcagtcaaatatctttgagtttcagaacgtgcaacttcatgtttaatggctacatagaatttaattattttcatatatatgtgcttaatcagtctgttgtttatagatgggatagtcagattgacataaaacttccaggcagagttataaaacccttgcgagtctttgacttacaggctagaaacctttcaattaaatgtcctagaattaaaacacacacgcgtgcacacacacacacacacacacacacacacacacagtctctctctcactctctgtctctctctcttttttttttgagacagactctctcgcccaggctggagcgcagtggcacagtctcagctcactgcaacctccgggttcaaccttccgggttcaagcgattctcctgcctcagcttctcgagtagctgggattagaggcatgtgccacgacacccagctaatttttgtatttttagtagagacggggttttatcatgttgcccaggctggtctcaaactcctgacctcaagtgatccacccgcctcggcctcccaaagtgttgggtgagccaccgcgcctggcccttccttcttactttctcactgcatatgaacataattttatgtttgtattacatggcttgttttcttctgaaagcctgactacaatgcaagcattcctcatcatcaaaatctattcagttcccaagttcagaaagtgaaagttgagatagtaggtttggatatggagagatactgagttacacaaatctatttggttcttgtgtttcagagagtgagtattgagaattcggacaatgaggggtttatcagaaaattacaatatctttcggttactgatatgaggatcaggataggaaagatggcatttcgttcctcacctgaccaagtattacattatgttaatggaagactggatcttttccagaatcaagaagtaaagtaaaatcctagatcttaaaggttgctagcattctacaaggatacactcccagaatctaatgtacctaggaattttgtgtagctatccgttttccagcaggcctcactgggattattccgtctatagctactttattcatagttttcttgataatgagcagtgcattgaggaatactgatttttaaattttgtccaagaaatgcacacaaggttttctgaatcagagacagattttgtgaatacc

SEQ ID NO: 106150 - DNA, 1073 bp, Homo sapiens
tagcgtggtggcacatgcctgtagtcccagctgccctggaggttgaggtgggagaatcacttgatcctaggaggttgaagctgcagtgagctgtgatcgcaccactgcactctagcctaggtgacagagtgagactgtcacaaacgaaacaaaagatctttagaataaggtgagatattcgtagatatgctcttctattttccatcaagtgtacttttttgtgtatgtgttaagattgctagagttgaaaatacagataaggcaaacatgtttttaaaattttctttcagacctgagaaattagatgttgaaacagttatgagtattgatcatctgaaacagaaaatccctccagcactgttttataaggaaacatacttaggtccaaatgaaggtaaggtaatttaattttattgaaatgcattagaagcagacttgatttggatatttactatgtatttttcttatgtcagttttgaagaatggaatgtattgcagcctttatgaagttgtggaaaagacaagaattggaagtaacatggagagtttactgcaaaaactagacagagaaaaacttgtgagtgaaaagttttttaatgtttctcattctttgttacaaatatgcatattcatgtgtgatcatattagtgtttcagtttatttttgcctctgaaagtaccatgaggtgtctgtctgttgctgctgtttagttaacagtgttttactgtggttctggtattcttttatttgggccatggtattggagcttgtgcaaaccagtctttcccatggaatatcttttttttttttttttttttgagacggagtcttgctgtctcaccaggatggagtacagtggcgtgatcttggctcactgtaatctccgccttcctgggttcaagcaattctcctgcctcagcctcctgagtagctgggattacatgtgcacaccaccacagccagctgatttttgtatttttagtagagacggggtttcaccgtgttgtccaggatggtctcaatctcctgacctcgtgatctgcccgcctcagcctcccaaagtgctggaatta

SEQ ID NO: 106151 - DNA, 1579 bp, Homo sapiens
tgtgaatagactgaaaggttttagcactttaatagaaaaagataaaaaataaaacaggtttcataactcagctttttaaaagtattaaattcaccagaggtgtaggacttagaattagagaagattgaaagtagcattgacattaaactattttaaagtttctttgtttttttttcttttctgagacagagtcttactctcgcccaggctggggtgcagtggcgtgatctcggctcactgcaacctctgcctcctgggttccagcgattctccagcctcagccttctcctgagtagctaggattacaggcgcccaccaccacacccggctaattttttgtatttttagtagagttggggtttcaccaagttggccaggctggtctcgaactcctaaccttaagtgatccacccgcctcggcctcccaaagtgctggggttacaggtgtgagccaccatgcccagcctattttaaagtttctttataatgaaaacacaatgagtagaagatacaggacactgtaggcattcatataatcaaccagatttcatacagtgtccctttggaggaaataagagatgaataattatcttgtctttgctccccaacttttctgataatgacatttagacagatacatttgttattctttgcaactggaatgattttgtaggggataaatacctgaaacaaaaatcctaatatttgaactgttagtaaatagaagtgtagaagagtcactgtttttttttttttgccctcctacttaaaccttgtttctagatattttccgtctcatttctaataaatgtgcactcacttctctgggctgccaagtgactaagctgtgtcattatattctttttatttagataaatataactataccttgtggaaaggacagcttttaaataaaggaaaacttttgtgttatatttctctgaggtcagccactcgtgcttttttgcctatcaaactgtaagtataagtaaagagcagttcgtggttgctaattttatcactttcttgagcctttttccttatttctttttcatatttaaattttattttggttcataagaacttcaatataaatgttggtttgttttttaaatggttgatttgaaattacgtgatttggcaatatgagtcctctacgtctctgtcttgatttgaggataggctagtcagtacatttacggtataaaactttatcttttttttttttttttgagacggagtttcgctcttgtcactcagtctagagtgcagtggtgcaatctcggctcgctgcaaccttcgcctcccgggttcaagcgattctcccatctcagcctcctgagtagctgggattacagggtcctgccaccatacccagctaatttttttttgtatttttagtagagacggggcttttgccatgtcagtcagtctggtctcgaactcctgacctcatatgatcctcccgccttggcctcacgaagtgttgggattacaggcgtgagctaccacgcccagcctaaaactttttcttagtgatttaagtctgaaatataattttttagttttattctaagta

SEQ ID NO: 106152 - DNA, 1038 bp, Homo sapiens
ctatctttgtcacctatgttcagattcttttccgtatctccctttgctactttgtttgcaattggagcccaggtgtgtttttcttttgaaatagcaaaaccatagtttggtttagttgagattgtgttcttagtattttgctttttgtattagattggctattctgagctgacctgggagcttaggctctgtttataatatttttattaggaaactcccggtggtcaactcttcagaagtaaacttttggaatagttagtaatactctgggatcttacgcacttagatgcagaatattttatatcacaaaatgaatacaaagtactaattattttagttaaattggcacgcagagcttaaagacattttttgtcagaagtgcatatatggttttctatttctcagaaatcaggcagttaaatataaggtttcaccttgcctttttaaagaagttaatttttcattttcttatttttagtattatttttatgagtatggctttgatgagctaaggcgaagaccaagacacgtttgtccatatgcagttgtgtcttttacttacaaagatgatatacaaactccgaagtttgtaccttcatcaaggtaagacttaggagttttagacatcatccgcagtgataattctactacagatcctgtactactgagttaggaggaccattttgtttccttcccatttttttttttttaacttcccttgaagttggttggagactgaagtgtttacaatgacttttaaatggtcggtgtgaagaacagacagtttaccatgtggaaataaatacaagctaaaatttaaacctcatctcgctaatctcttccttagaaatgaaggtttgtgtagttgagtaagtggcaggttttgtttgttttgagatggagtctctctctgtcccccaggctggagtgcattggcaggatctcggctcactgcaagctccgcctcccgggttcacgccattctgcctcagcctcccgagtagctgggactacaggcacataccaccatgcctggct

SEQ ID NO: 106153 - DNA, 3144 bp, Homo sapiens
atgtggtttcatggtatggtagcgattatttgttaatttcatatgaaaatttagtctgaagataaattagttattaaagagcagtaatagcctgaatataaaatgttagctattttatattttaaatgcatatctattttatagataggaaagccagtggtttaggataacttatagttccaactagttagaaaaagtcactcttccatcctataaatatgtatggagcacatcttatgtgcttggcattgagaatacagttacagagaaaagaagcatttttcttgtcctaattgagtttataatctagaagttggtcattcagcagatttattaaaccacctgttggatgcagtgtaccatgttaagtaaaatggaagatacaaagataattaaagcatgaatttataatctatgggagagttggaatgtggtaaaattataagataaatttaaagattggtgagcattagatgtttatttgactatattaatattatatataaagagccagttaaaataggggaaaaactgaaggacagagagtatagagagatagagattatttttccattttggtaggtgtgagatttcttggaaaaaaaaataaaacttgtagcttgaaaaacataatcacatgctaagtagttgttatagttttaatttcatttagtttacagaaaagcgaagagaactgaagtttgatggtcgtttagataaggaactttcagaatcctatgcatttctgatggttgatcgataccaggtgagttaacgcattttataaaaaacaatttggggatgtttccattgtaagttactaattttgtgattattcaacagtattctttacaattacagacttttttgatatataagtggaatacatgatttaatggggcaaaatgtttattgtttgtaatttgtttttcaaatgtactcagttttttctctgaccagtcctattttcttcccctagaatgtgcttgataataatacttttctgtttatttatttatttttttctgagatggagtcttgctctgtcacccaggctggagtgcagtggcgtgatcttggctcactgcgacctctgtctcctgagttcaagcgattctcctgcctcagcctcccaagtacatggggttacagaaacacccccccacacctggctaatttttgtatttttagtagagacggggtatcaccatgtgggccaggctggtcttgaactcctgacctcatgatccacccacctcggcctcccaaagtgctgggattacaggtgtgagccaccgcgcctggccttttttctttattaagaagactgtcttctatattgttgattatatgtgagattatcttctatattgttgattctatgtgcctggaaccatttttccttttttttttttttttttttttgagatggagtctcactctgttgctcaggctggagttaaatggtgtgatcgcggctcactcactgcaacctccttctcccagatacaagtgattcttgtgcctcagcctcccgagtagctgggattacaggacacgccaccgcacccggctaatttttttgcgtttttagtagagttggggtttccccatgttggccaggctggtcttgaactcctgacctcaagtgatctgcctgccttggcctcccaaagtgctggtattacaggcgtgagccaccatgcctggtctgttttttccccttttaatcgaagatatttaggtggaataatattttgctgtttctaattctctttgaaaagaattggttatatatattgagtggcaggagttaagagtatctgtcacacctggcatgaagaaaaatgattgaaaagtagccaggcatggtggtgagcacttgtagttctagttacttgggaggctgaggtgagaggatcacttgagcccaggagttcaaggtcatgccactgcactccagcctagagggcagagggagaccctatctctaaaaaaattaaaatgaagaaaaatggattctagatatggttactttgagaagtgtaagtcagttttacattaatatttataaagtggcaaatatataagatttctgtgatctagaatgatacatagttaagaagctttgtttttatttaaaccaagtttataaaattattttttcatgttttaaatgttgttatgactgcaagatgaagtatttttttttaaatttaggttcaaaccatatgtgaaaaaggattacatgtgggtcagtccaaaataacaattcttggcagtccttccatgggtaatcttttttctttttaaatataaatatctactactaagttgctgtctaaaaatacattgtctcgtaatttcactgcagttgttattaaattcatgctttattatgttcccagaaaaagactagtcataggttctgaaatgtaagatcagttttatcttttgtttctgatttttgaacacctcaaattgatgaaggataacttcttaaaaatgtcttattttagtcctagtgattttgaaaaatataatcagtttccttaatttttccgtcttttctaggtgtctatctttctaggtatgctgatttattacaagcgaatcctttggacacgggggcaatgggtgatgttgttatttttaaaataatgaaggtaatttaaacttacacacttcatgtatgaaaaactacacttgatttggattttaatttttagatgatgctgtttttaggagattgtttaaaagttcatgcttgttagtgtttggtacttaaagatacttttgaaaatggtttatttgccatctttttttgtgtgtgtgttgttttttgttttttggttttttgagatggagtctcgctctgttgcccaggctggatggagtgcagtggcgccatcttggctcactgcaagctccgcctcccgagttcatgccattctcctgcttcaacctcccaagtagctgggactacaagtgcccgccaccaagcccggctaattttttgtatttttagtagagacgggttttcaccgtgttagccaggatggtctcgatctcctgacttcgtgatccacccgcgtcagcctcccaaagtgctgggattacaggcatgagccactgcgcctggcc

SEQ ID NO: 106154 - DNA, 1035 bp, Homo sapiens
catggtataggtagtttgctgaaatacacagtctgagacatacttcagtgtaacataaaataggagctaagttgagtataaacacaggttcttttaagagtctttaagcaatttaggttgcctaatatagcatgcctaaggtttgcaaaattgcaccttccttgtctatgtatgtaatgccagatcctcattgttgaaggaactggtgtatgtaggcaactagttttacattttttttcaatgagttaataagtatctcttttgcgtatcacaaagtaagatagccttgatgccttttttcatggtatttaaagttacattaacccacaaaaatataaaaagctatatttaagatggagtaatgttaaacattttaaatgtttgtttttttattttagcacttttccagccattaactccaggctctcgagaatttgaagatgttgtaaatattctccattcttcttaccttgaaccaacctcagtaacaaattttaactacagacgtgcttgcttggtacacaatgagcttttggaaaaggaggtatgttttaaattatacttactgtaagattgttttcagaaccagttaacagcctgggaaaaaaatgttctctagaaatactaaaatttttaggaaaaccaaattacaaagggaaaacaagtttttttttttttttttttttttttggagacggagtttcactgttgttgcccaggctggagtacagtggcgcgatctcggctcactacagcctctgcctccctggttcaagcagttctcctgcctcagcctccaaagtagctgggattacagtcatgtgccactgcacctgcctaattgggaaaacaagttttaaatgacatctcttttttccaccagatgttgctgtagcattacatttatctgctgtgttaaattgttactaatatgcaattatgtaaaataactttttaactgaaaatcttaagtgtagagatagcttactagctaatggttcaattgtaaattcagctgagcatggtggctcatgc

SEQ ID NO: 106155 - DNA, 1048 bp, Homo sapiens
catagtttctatgagtagttctctctacagtgaaaagtggttcctttttgatttggggaaatatatatatgtatagacttttaggtgtattagtaaattaaagtattttgtgcataagatggaaatttgaggttactagaccagtaattctcaagaactaattgcatagttgatttaaatgttttaaaaattaagtggggaccgggcacggtggctcatgcccgtaatcccagcactttgggaggccgaggcaggtggattacctgaggtcaggggttcgagaccagcctggccaacatggtgaaaccccatatctactaaaaatctaaaaattagctgggcgtggtagcaggcatctgtaatcccagctagttggaagactgaggcaggagaatcgcttgaacctgggaggcgcggaggttgcagtgaaccaaaatcgtgccactgcacttcagcctgggcaacaagagcgaaactccatctcaaaaaaaaaaaaaattcagtgggatgtagaatggttggggatgtggaggataaaaacttaaatgtcctggctgggcacggtggctcatgcctgaatctcagcactttgggaggccgaggcaggtggatcacgaggtcaggagatcgagaccatcctggctaacacagtgaaaccccgtctctactaaaaacacacacacacaaaaattagccgggtgtggtggtgggtgcctgtagtcccagctacttgggaggctgaggcaggagaatggtgtgtaccttggaggcggagcttgcagtgagccaagattgtgtcactgcactccagcctgggtgacagagcgagactccatctcaaaacaaacaatgtcctactatgcgtcagatgctatgcttagagctttttccacgtgttgtctagtgtggcatgtggcatatagtggttattagagtagctggagtttgccattttacatatgagagagctgagctatataagtaatttatttacctgcattttactccaagccagtaatgctaggtctggtatttgtgtccagctttg

SEQ ID NO: 106156 - DNA, 4411 bp, Homo sapiens
aggtcctcgcggggcgttgcggtcgccccttttggcgggctcgggcgccccgaaactccgccccccggcgcggtatttccgcactcgcgcaggcgggtgccgcgctcccattggtggagtggcccgcggtggccccgccccctcccggccccgacgcgcgcacgttgagtggcgggggaaggcagaagaactgcccgagggaggagcggctccgaggaccgggcagcgcatttggggtgcccgctacagggccccccaagaggctgccaggtcgggagcgcagcctgaggccacggggggaagggggtgggtgggctgagagcagctcggcggcgagactggcccgccgccccttccccccacacccgtcgaccttgtgggcagaagcttcccagagctccttaggccggcgcgatggcgactgctgtggagacggaggcctgtcagccgacggatgcgagttgggaaagtggcggcggcggagacgacgagatgaagcaggcgcttccggagcttgagtcctcccaacaaaatggcggcggcggcggcctcaacatcgctgagcccagcggcggcgctgggcgtgaggagaacgcgggggccgaggccgcccagagcctcagccacgagcagcctcaggactcctctgaggcgggcgcggccgccctgcccagaggccccgaagagcccgaaaggcctgttaggaggagttttcagatccccaggaagagcagagaaaagaaaggtggtgcctccccttcttctcaaccccctctctctctcccctccatcttttcattagaatctttctatctcctcttcccacacccatccgagatacgtaaacacgcatgcagcgccggccgcctctcccctcaccgccacggccgcccagctgccgcgtttggtgcgagagaaagcggtggaaccacgctcccctgctgcccctccccgcggaagttggaagtagctcaggtttgaagcttgtccgtaaggctgcagctcccagagaggaaagatggtgctcggcgcccctccctcccagcccctgaaagcagagaagccgttgtgtcctcctaaggatgcttctgagaagtctcgctatggaaatagcccgtggccatggattctggggctttctccaaggccattgccaatgttctgaggaccatgagtgcttctccccgtggaaattcttcagttctgtgtgtctacttgaaatgtgcttgatgtcagcgtcctcccttatttagaaatctctattagtagatgtgatccatgcacactgctgttttccatcacacttcatttccatgtagatttttcccccttgtttttgaagcgttagattaaataggtttttctctctttaaattcgaacttagtattgtttttcttatatttgaaaagaatggaaaggtaggttcttggagcagtaatttcccaatggaaaaaaactaatgagaagttaccttattctcaagagtcaccaacttggtcttctagatggtagaacttcaggttaaaaaaaagtccagtcttagtttttggaacccatatggaaacagttacattaattacttgtacttttaaaaaatcttaatgccatattgttaatatggagtcagaattcctaatggaggtcaaaattagtatcgttttttgttattggggtattattttttaactatccagtaaattttggatattctgaatttagacaacttcctttttgccctactgtatggttaggttttcattatttactttggaaaaaaataggatttgtttttttcccgtatcttttccatccatctggtacagagtcttggctgtagcattatactgactttccataagcatcaccagttccatttgcactactggaattgtttgagccttttattggaaaaatacaaataaagttcatttgtttggatggcaaagccaagaaaatacttggtgtgagaaaccatgttgacaaagatgaagttaacctttggaaattagcatgaggaatgtttctagaaatatcttttgagttaatgtaattttagggttcagaaagatacttttaaaggtcaaaactcagttcttttcgtgtatttagttaaaatttgagatgtatgattatagtctgtatgagaaaagttcccagtgtaatcaattggtagagaataggtaggaagtacattcaaatgggctctggttatgaggtaggaggtggaactattttttttcttcacagcttgataaaagccgtttgaaatctatttttaaggtttaagtgcctaagaatatggacaaaccgtgatttttttttttttttttttactgtttgttaggaccagaagattggcctagaaactcttcaaaatttagtttgaaatgtgggaaggcagtaggaactggaaaggcactgtgtttgtgtgtttttttaaaattagataaaatccagagattgttgtaaaatagacttcagctgaacacactaaaagtggaaataattgagggattaggaaatataaatctagctgttgtcccccatagtcttgtacctcttgggtaaaacttgtattttccatttttacttacagacaaaagttgggaggaaaatatatcgcagtggactttgtcatgattagtgaaaatgagcaatttttaacttgtgtaattatttataccctgaacaccagctgttcaaatagtaaaatagcgatttaaatagaactttaaaaaattaaataagcagctattttaccaccatgaattttatcttgttcaagctgagagaagttagtggttgctgatagaatttaatacataaattcaactttattaaaaaaattcaaaaacagtgcaggttctgttgcattcatattttaatatggtagaccttttcttgtgactgtgcttttccagtgaaatttaagattaggacttaaatattttaataccttaaaggtcactgctatgcaaatacaacttgactcagaaagttctttttttggtcttcccagtagtgtgacatccaaaataactgccattgtaattgagtaataatattggcaaacacttgtatagtgcctaataagttgtgggcattgttctaagcaatttacatacattgactaaatctcaacaatgttttgtggtaggtactattcccattttacagatgaggagactaaagtactgagaagttaggtaacttgcttcaggtcacacagctaagttgtggagatggaatttgaaggtagttgtagagtacttttactactataaaaaagaaaaatcttgctacccagtttgaataatctaagggtttaagttagctgcttttgacctgacctgttagtaacaaaaactgttcccccccttcattaaatatagaaatatttagtatgttttcatccttggggaattttgacattcagaaattatgtttactatcaacatttggttggtactgacatactaagtgcgtctttgactggaaaggtatacattttactgtttttgatgtatgttatttattggctgaggcatgattcttacatttaaccaaattatagaatttaaccaaattgtagaattgcattttgttggtagatgtttcactattgccttctttaaatctagtgagtcataaaaagtaaattaaaattggtaattgcatttgatgtaatttttccctccaaagttcttgggaaatggagtagcgatgattcactttctggaaaacgtttattggttaatgtttttgtagggtccaagggagtctcaaaaattaattgcgctcatgcactaaatttccatactggtttagtccagaagtaatggctaattctcctaacctccatcttcccccacaaaattttcacttgcctttttgaagtcattggagccaagtctcattcttaaggaaatttccatggtatttcattagttgtatatggatgagtgggttctgagaacaatagctctctccatacataatagcaaagtaatcaaggtaaaatttactttgagctatcctcagtccaaaaaactttgtttcgtatttgtactcttgattcctgccagcatattcatttctaattgtacactatgttcaaccttgttgatgtagagatgaagtacccactcctaaagtattgtctgtggtaattttttttagaatgaagaaaagtgattttaaaaaaagatcttactgtgaagaacaaatggatggagagtggttgtattataatcattaataggcgtcagctgtgaattcagaaaatttcagatcctcagcctcttcttgctaattatttcgtcatcttctatgtattagttactttaaatcagacaattgtttatttgtacttcgtatgacccatttgtatgtcttttttttttttttttt

SEQ ID NO: 106157 - DNA, 1071 bp, Homo sapiens
tcaatggctcccacagaaggttctgacgaagtgcttttcattccaaattcttcctctcctgtgtttctataaacagtgtcatcgatagagtcatggtctctcttccttgttgcttcattcattctctaaaataatgagtaggcctaggcagatgaaacacaatgaatacagggccttcttgttatcctggcaggccttcctaagccctttgggttctattctgatgttttaggctagcaaccaactatgagagacacctcctggtgccatgtgcatttcagttaaagattcagagctggcagccgcttctgtcctggcccttttaaggtcagcctctattttatgtcctaatacattcttgcatcaaacttgcactggatgaagttgcaaagttcagacaatgcatcctcctttgcaaaattaagccttcagaatccccagggatgttttcaagctttctagttgagtaagatcaaaccaagttcacttcatgagttggtctttcctgattctctctctaataccatcccaatacacagatgagttcctcatgccctatttacaaggccgtctaaattccgtgcctttagctaccacatctaagagctgggaaagtggtacagaagcacaagaggaaggactcttcaaacaatctatgtaaaacagtagttttgagattctttttctatttttttaaaatccagcaggacaactgaaagtaacttgtttgagtacctctccatccatccagacacttgggaaatacaacacagggtaatagttgccacagattccagcttacacagacagattggcagttacagtactagggacaaaggtacagatacgagagactgggccaacatgtatactttcacaaaagtatgaaaaagtgcttctccaaaccgttccatctgtggaatgcaaatactgtacaggtaagatgcaggcctgcttcccgaagtgcacatgcttctgtcagacgttactttcaccgtgcctgctgtttccacaggaagagtctgtctgttccatgcgctcacagtcgaggctgacctcactcgtgtccat

SEQ ID NO: 106158 - DNA, 1019 bp, Homo sapiens
ggcaagctggggtgcttgactccgagggatcgttcctaaatcccaccaccgggagcagagagctacagggagaaacaaaacttgagcagatggaccaatcggacagtgagtcagactgtagtatggacacgagtgaggtcagcctcgactgtgagcgcatggaacagacagactcttcctgtggaaacagcaggcacggtgaaagtaacgtctgacagaagcatgtgcacttcgggaagcaggcctgcatcttacctgtacagtatttgcattccacagatggaacggtttggagaagcactttttcatacttttgtgaaagtatacatgttggcccagtctctcgtatctgtacctttgtccctagtactgtaactgccaatctgtctgtgtaagctggaatctgtggcaactattaccctgtgttgtatttcccaagtgtctggatggatggagaggtactcaaacaagttactttcagttgtcctgctggattttaaaaaaatagaaaaagaatctcaaaactactgttttacatagattgtttgaagagtccttcctcttgtgcttctgtaccactttcccagctcttagatgtggtagctaaaggcacggaatttagacggccttgtaaatagggcatgaggaactcatctgtgtattgggatggtattagagagagaatcaggaaagaccaactcatgaagtgaacttggtttgatcttactcaactagaaagcttgaaaacatccctggggattctgaaggcttaattttgcaaaggaggatgcattgtctgaactttgcaacttcatccagtgcaagtttgatgcaagaatgtattaggacataaaatagaggctgaccttaaaagggccaggacagaagcggctgccagctctgaatctttaactgaaatgcacatggcaccaggaggtgtctctcatagttggttgctagcctaaaacatcagaatagaacccaaagggcttaggaaggcctgccaggataacaagaag

SEQ ID NO: 106159 - DNA, 1108 bp, Homo sapiens
cgccccccccccccccccgccccgcccacctcgcctggctagtttttgtattttttttttttttttttagatggagtctcacactgtcgcccagactggagtgcagtggcacgacctcagctcactgcaagctccacttcctgggttcatgtcattctcctgcctcaggctcccaagtagctgggactacaggtgcccgccaccacacccggctaattttttgtatttttagtagagacagggtttcactgtgttagccaggatggtctgtatctcctgacctggtgatccgcccgcctcagcctcccaaagtgctgggattacaggcgtgagtcactgcatccggcctagtttttgtatttttaatagagacggggtttcaccatgttggccagcctagtcttgaactcctaacctcaagtgatccgcccacttcagcctcccaaagtgctagaattacaggtgtgagccaccacatccggcctgattacttagaattatattgagtaatataaactaaagtcaagagagtgctaacttttttttcccttcatcaccttcttgattctatttccctttctcgtttttttcttataggagctggggcaggtatgtctgtacaagttgtgaattgcaatgtgaatagggcccccaaagttggcaaccctggctgtaggtgtctgtaggcagaagggctttctccattgagtccctagggaggtgcttctacaggaagggcagtggacatatctggaagtgcctccaacatgcccaactttggttctcctggaggtagatttgaacctaggagttcataatccagtgtgaacctggtacctggggacctctttatccacagaggtccacatatcaaccactcattacattattgcttaatgaaagcttgtggatttttttcttctagaaactgcatgttttcctgttccaagaagtgcttgtgatcactcgagccgtcacccacaatgagcagctttgctaccagctgtaccgtcagccaatccccgtgaaagacctcctgctggaagacctccaggatggagaagtgaggctgggtggctccctgcgaggggcattcagcaacaatgag

SEQ ID NO: 106160 - DNA, 1110 bp, Homo sapiens
atattaaaaagaaatctttacagtaactcagaacaggctcccatgcttcaaaaaagtcatgactttgagtagctcatgctccctgttgtttttattcctgcagaccacacacttgctgggatgaaatatggaaaggaggcaactctatcgcactcttcccagtaataaaaacagacatgatgaagtgagatgggcctcaaccccagcgactgcgtcccccatctgtgctggactgggggcctgatctctgtgttgggcctgccagatacattgaatacctcatgaatcagaagagggtcctttattcttcttttctatcctacttggaggcacccagcccagttctgcaccagtgaggctggtgaccagacagctctccacaattacaaaggcaacagaaactcaaagtagtgggcaggctttctgcatcaaggtatagaatcataaagaagttgaagggcacaggatttggagtctacactgacagggtttgaacatcaactgcatcacttgctggctgtggacctgggcaagctatttaacccctctaagcctcatctggaaaatggtcctaataagaacagctatctcctaggctgttgtgacggttaaatgagatacataacctatgaggcaaattacataaagttgatttactagatactcaatgccagcaattattaccatgattgttgttactactacttattattaaacccctatctgggaggaaataggcagtttgctcagcaggttcaaggtttctgattttcaaattacctatgcatatcctccttctattattgtcccagattaaatcagaaaatgagccctttgaatggtctgctagcctctatccccactgccacctccttgatcaggttttcacacctggacagcatcctcccaacttgcatccctatcaccagtctcttcctcctcagtcccttgttctaccaagagtatgtgtccaaggttacagagcttgtaaatgatggagctgggatttgaatcctgaatcccagctacttagaaaccaaccaacaaacaaaaaaaaaacttcaattaattgcatgacaaaggaaaaaatctcttaaattgatatttaaa

SEQ ID NO: 106161 - DNA, 1072 bp, Homo sapiens
aaagttagtgggattctatttatagaaggaggagagtaggagtactggccaaatgtttgaataaataaaggccatccactattgttatctctggttcttttaaagaggggagatgtccactggaaaaaagtagagctcatcacgtatccaagaactgccttcatgcgtgagtttggcctgatatgtgcttgcactatagtccacttggtatccaggtcacacagaacagatactcccagcacatgttccaaagcagccccctgtccaattttccttagcacgtaggctcaagacaatgccccacttcccaaaggccttgtggcaatgtcctctttttctttcacatatatgatttatgttccgtcaacgacaggaaactgctcaaagatccacccagtcctgccgctgcccccgtgatggtttgtttttctcattgtttagcgctccattagcttccgcagtgagagccgccctgacatcctcgccccccgaccctggtccagaaatgccgccccctcgagcacgaaacggagagatagcaagctgtggagtgagaccttcgatgtgtgcgtcaatcagatgcttacatccaaggaaatcaaacgtcaggaggtaggctcggggcccatggagctggctgtgtgtctggaacaaaggtgcattgcagcgtcagccatgctggaatttgcgccttagtctccaaatcaattcttcattgcgtttgcagaaggataaacaagagtgtctgaccttggggaaggaactgagaaaccagaaaccagctgggagggtgtggcccccactttaaaaagaaactgatgtgaaaatatgaatttacaagaagatgaaaccaagtgtctatttaggattctgaagttcacaaaaataatcattttagttatattttgttagcaacttatagactattttaaaatatttagtttacatagctttgattcagcttcatggaaaacttcctttctatagaatccagttaatttcattcccggtaagttttctgtatcagttgccctaaatgactctgataatattaccctgtatagaagagctt

SEQ ID NO: 106162 - DNA, 1032 bp, Homo sapiens
tgtgagaaaacatcctccgggcccatggctggccttcccataagggccacagagacttgatgctgctggcaactctcctaatttttaaggaggttgaactctttaaagttctccagctctgagcatctggccctttctgcctcagaaggcagatgtggagccagggaccgcagagagagctaaatatttggcttcctctttctctgaaggtctgtagcatcatgtctgggcatgaccaagatgagtttcaggcagtgggggctggtgtttgctaaaaggaacttaacaggggtgtgggtgtgcagttctccctctgcccaaggttaagtaatagtaacatcctgtgtaaagagaattgaatgtggttttctgctaaacttcaatgttttagggctgtttattagatgtgtttaatcttgggccaatttaaccagtagcagactaataaaataacagatttgggcttgctgccaggacaaatgttgacttacccttataatgttgactaaaacgagtaactttgaaagttattgcagagtgaaaccttagccagaaatacagcgtctgaaacagtggttttgttttattttactggctctgcttagagattatgtttgtaacctaggctgctgcctgcttcacctctcagagtcctgtattttactgaattatttcccaaggctctttttttcagcccataaaccttcactcagcaaaaatgaatttccccatggcaggcaagtaggagaggttacttttccaatgtgggggcaaaaactcagtggtaccaagaagaatgaaggtaatgacttgcttgagtcttctctcagaaacaaaatggtatgccatgaacattcaccctctccaaatttgtagtaaaattaattgcttctcccgggtgtaccggaagaaatccatctcgcttgccgcctacccccacctttccttcattttgccatgcagtttattacaaacactagagagctatagtattttgctaccatgtgttttggacttgaaggaaacagggga

SEQ ID NO: 106163 - DNA, 1101 bp, Homo sapiens
gacttgtgtctcatcctctaagccctagtttcctcatctgaaaattgggaatttgcaagggaattgtgaagatgaaataggcatataaagggcttccaccaaacaagtacttaataggtcattagcagcagcagcagcagcagcagcagcagcagcagcagcagcagcagcatctatcttgaacgtagatcagttgagtagaagctataggtggttatacttagcaaggcatctgctaggaggtagctccttcctttgtaggaaataaagagatcagagttagcattgggcattattatttttaaaacaaaagatgttccaagcatactggcaagcttcacattcatttctgccaggtagaataacaaaaaaatctagtgtggctttctggttgttcccagaatgactttcagacaggggttggtgtgtgagctctgggtagagaggcaccctggccagaggagtagggagcaagttgtcctgaggccggctcccacctgacatgcatcatctgagaatcctagccaagtgccaaccacggacacagacccaaggcaagcagatgagggtggattaggttgctttgagctcttcatgccctattcatttgcagggtgctttaactataaatagatcctttgttggaaatgtagggaaactccatagtgtgatggatatgagctggtaaagagctagacaactaaaaaatgacccctaatgctctttaattgtccataaatatttattgagacctggctctgtgtatcatgttccccctggtttagaaaagccatgctttctgtcctcaaggaacttctacttcagtttgaccaagtcattaacaacacgacaatacgggtagtgactgtcaaccacgaggagggggagaagcaggcaatttcattggggagcttggcagactatggagggggaatactgagaagtggtcatccaataggctccctgatgctggatgcccgccaccccccagtcctcaagtgtgcccttagcagagggcagcatcttctgggggcacataagcgggacacctttgaacctgggctcactaagattctgagggaggagtcaagaggagctgct

SEQ ID NO: 106164 - DNA, 1043 bp, Homo sapiens
ttgacttcacacaggttggggaggggtggaagtggctcatcaatatcatgttaggttttggcagtcttggttcattttctcagccatcctggtgattgtgttggggatgtctgggtgtgatcttgcagaaggagtcagaaaccactgtaaagaaggaaataagctgttagaagagggaaaactgatggtttcttgtgtgtaagccacagatgcatgatgaactgtcacctccacctccttcctcctcagatgtttggtggtgacttatctgagagctttgaaggagagagcatcagaaaagacatgttgcattctcttattagtctctgaatgctttatgcccaggttccaaaggcctagaagagtgagcttgattctggcaccaacatcgaggaacaggagcttgcttcggaagtctcttaaatgcagcatttatttctaagctggttcttataagagcttcccaagtagctggggacagggcaaaggtaggcttagcttcttggaatttcagagtctgtttctggaatgagaggactggattagttcattgtttcccagaaggtgggtttcataccacttgggcagctcaaatcttataaagacaaatcacaaaataatttaatcactttcccttttaaattatctgatccttctgattatttcaagtttccacttggaattagtgtgtctttaacacctccccatcacttgataatttccctgtgtaactaagtgtaggcctcagggttcattttttaaagttagtttctgtttatggcaggtgatagtgattttccatttaaggcagtgatagagtttatttttacaataagtttttaagtaaaaaatgactaattaaggaaatagtacataatagctcaggtgatatgtacatatggcaaaaaattatcatggcaatacagagagtttggaaacagtgaacaaggcatgttctgaggggctttctaggattagaattctacaataagttcccaagtttgacacagtcacttgcaaactaaacttgaaatttggacatt

SEQ ID NO: 106165 - DNA, 1174 bp, Homo sapiens
accaatcacccttggatactgaaggatgactgtactccgtctgtgttcagtatagatgatgagaaaatcctttcttagttgtaacattgcttcctgcagcaatgttcagtaatactttcttttttttttttttttttttttttgagatagagtctcgctcttattgcccaggctacagtgcagtggtgcgatctcagcttattgcaacctctgcctcccgggttcaagctgttctcctgtctgagcctcccgagtagctgggattacaggcacacgccaccacgccctgctaatttttgtatttttagtagaaacagggtttcaccatgttggccaggctggtctcgaactcctgacctgagataatccacccccctcggcctcccaaagtgataggattacaggcgtgagccaccatgcctggcccagtaatactttcttatgtgttatccctgtaagtatttgaaaaccactctctctctgcacctctcccactccacactcatgtgcattctctcctctccctctctcccctcagatgttttccttctcctggcctggtattcctggttcccttaacttttccaaatgtgacatactgtcctatctctttcctgtccttgcttatttcttctggacatctttagtgtgcctgaaaaacttgagtattaataagtgcaaggatactgtatgatactatgtcaacaaacaggatttcttttaggcttaatatgcttctttagacaagagaagtacactaatatattgaaaaagatttttgaaataaaaatgacagactaaagattaacatctttgtcatataaataatttatacagatatttaaaaaataccctaagatattcattgacaaataagccaaagatactagaaggtagttcatacacaaggaacagtaaagatttaaaatgttcactctagtaggaattatagaaatgaaaaaggcaataataaggtgctattttatacctaactgatgttgcaactatttttaagacataataaaaccaagctgggcatggtgactcacacctgtaatcccagcactttgggaagccgaggcgggcggatcacctgagcttaggagttcaagaccagcctggccaacatggtaaaacccagtctctactaaaaatacaaaaattgctgggcacg

SEQ ID NO: 106166 - DNA, 1187 bp, Homo sapiens
aaccaatgaaaagtgaaataataatttaagtgatagaatcgtattttaacagctaaaaatatgggagtgaatctctgtcttatgtagagattcgtacaaaaaacattcaccccagtattatgttcttccatgcatttaaattatcatttaatttggtaaacattgatctatgtaaaatttttaattattcccccccacagtattttttacatactttacaaaactgtttattgtagaaaagttgggaaatataggtaagttgttttttataccattattgttaaaggctacataatgttacatgttatggctgtatttagcccatggagtatgatatttacattgtttttatttttaaaaaataggtattttcctgtgataaacattcttacttttgcacacagttttcttctgcacacatccaagaggctgtattcccagcagtggaattattgagtcaaaaattatcactttgatggttcttcatggctacttccacatttagcagtgtgttagaaatatgtaagtttctggctgctggaggaagcttgtaatcctgccgttctagcatgttgttcaggtggctgtgtgcacatgatggcacaggaaacagccctgacctgaccagaatcgctggtcatgtattcatggtagagtgaactcaaacagtcagaactaagcattttcaggtaacttattgactcctgggaggaaaccgtttgtcaggacctgccgcagtttattgtgacctcatctgctgaaggcatggccttggagtggagggtttacaaggaggcaagcttccacaggccctgctccatacaacattttttgccctccagcttttagttgcttcatgaaatggtctatttcttgaataatcgtcctcttcaattcccattggtaattattggaccatcttttatcctcatgttttctgcctgatggactgtcaggcagagcttcttggcaagttttctagccaattaaagatggaagactaattccattgagcagtcaattccagttagctcagctggtgggattgtggcgttaatgcaggaccacaagacaagggtttgatcctacatgaactcggtcaaccgtgctcttttcagagtatggtagcagagtagaaaaacgtctggactctttgcttgctccctccccttccttttaagtaaagt

SEQ ID NO: 106167 - DNA, 1026 bp, Homo sapiens
aatatgcttagttttcaggtagcaatttcaagcattctgtttattagtttaacaataagtcataagaaaagaagcttaacagttcttagaaaagctaatcctggcaccatgatggatttaccttgagcatatctttctgtctcaatttccctacctataaatccacagggtgcagtatccatactaacaagatattccaaagggaaataataatttttgagcataaactgaaaatcctacataatagaaacatatttgtattctgcactgtcgagcagaactttgccacgcagctttaaataatttgtcatgcactaaagtgccaggtactctgcttgttcttaatttccttttcttacagaatcttgccagtgacctggaaaggtagatattattctcttcattttgcaattgatgagtctgagattcatggatgtttaatgagtccaaggccatacagttgtgagtcacaattctgcctgattttatgtcctgttaacctgccgttgcactgggaattacagaactaatgccaatccctccctcaaattgccattcatgtattacttttcctgaaattagtggcagttttctagaaatcagaaggggcagaaagtaaagggaatcttcttcttatatatcattgctctctgagaaaaagtattatagaaaagccaaaggtcaaattgcatgatattttcactttacaatataaaaaacatctacactatggaatacatggaatataacgcagcattaagaaaaagaaaaggaaagaaagatggtgaaagatgaaaagattgccaaggcatactgttagatttcttttttcaagttacagaaatttgggctgggcatggtggctcacacctgtgatcctagcactttgggaggccaaggcaggtagatcacttgagtccaggagtttgagaccagcctgggccacatggtgaaaccctttctctataaaaaaaaaaaaattacaaaagtcatccaggcatggtggcacatacctgtagtcccagc

SEQ ID NO: 106168 - DNA, 1051 bp, Homo sapiens
tgatctgattggaatggtattttaataaggtcaaggactgaaggaatggcttagtgaagttagggcctgctgactagtaaatcaattaggaagtcagggaaatctcccagggagataatttgctcatgaaggaacatcatatattaaaacgtatactgttctctctcactgtgaaaggaaagggaaaatcaacaaagaaacacaaaatatagcactggtttttagaataatgctgtaggactcatttcaattcaggtatcaccaaatagaccatgtggctcaattctaatatagattttcagtccctcattgctggtgagaccaggctgtatatgatttctcccctgtgttcagatggagacatggaagaaaatgtgatatattagttatctgtaacaatattactacaaacttagtcttaaaacaacacacatttattatggtgcaatttttgtgggtcaggagttcaacattgcttagctaggccttctactacttcagggtctgacaaggctgcaatcaaggcgttggccagggttatggtctcatctgaggtttgactggggaagggtctgtttccaaacttacatgactgttggcagcattcagcttcttgtggttgaaggactgagggcttcagtttcttgttattgttggctggaggccaccttcagctccaggaggccactttcagccctttgccacatgggcctttcaacatggcctcttgcttctttgattccagcaatggaaagagttgcctcaaaatatgagtacataacccaatcttatgtaatgtaatcataatacataatcatgtgcatcctgtcatcttgccatgttctatatggctagaagaaaatcagtatgccagcctattctggccctacagggatgtgaacaccaggaggcagggatcatgggggacatcttaagaggccatctgctatgtgtaatgtttagtgacttggtgaaggctcccagaaaacattggggttgtcacaaaaccaccctgtgtttttgtacacacatgtaatccttgttccatgaa

SEQ ID NO: 106169 - DNA, 1049 bp, Homo sapiens
gtggctcacacctgtaatcccagcactttgggaggccaaggcgggaggactgcctgaggtcaggagttcaagaacagcctggccaacatggtaaaaccctgtctctactaaaaatacaaaaattagctgggcatggtggtggatgcctgtgttcctagttactcgggaggccgaggcaggagaatctcttgaacctgggagacgaaggttgcagtgagccgagaccacgccactgcactctagcctgggctacaagattgagactctgtctcaaaactaaaataagataacaaataaaatcaaggataaatgctcttaaagacttctcaacttttacaagttgggggttcactattttcgaataatgccagaaaaacaagagaatctttgatgaaagaggtgataaaatgctccctcctcacctccagcttgctgcttccaccttgaaagcatcttactaaacgtacagcacagttggccaaaaacatgcttgggaaaccaaattgaaggtataagatgaggctgaatttggtttgaatttgcaaatttgagtcttagaattatgcctcaatttggttgaattggctccaagacagaagaaactgctttcatggagtgaattatgaggagctgggaagaccacattacccctgagttacaattcttcttgtgaatctttctatctgtagtttatgatttggtgaaaatgtagggagcttgggaggtagagtcagaaaacctatgttctaacccctccaccccctattctgactctaattcactgtgaccttaggcaggtcacttaaacctctctgagcctctgtttcttcatccatccattcagtaaatactactaagtgcctactaagtgctgggcactgggcatcaagtaagattgtttgtgtcaaagtaatttgtaaataaatcctgtaagaactattgatgttttccttgttaaaatgcaattattaatgttttcctggttaaaatgcaacctttggaggagagcactttgaatagcagtctatccttgtgggtgattcttagca

SEQ ID NO: 106170 - DNA, 1055 bp, Homo sapiens
ccctggggtttaaccactgtgttctgtggatccgtctaacattaggccgtgctcgctctcctctgtggagaccatgaaagctactcttatgagatgagaagccttccatgctaggaataaagaactgagtcatggttctggctctacctataattaacagtgtaccttggacgagtcacttcctttctctgaacttctgtttcttcttttgttaaaaaagaaaaagaaaaaatgtttgggatcagcccttctaaaaccattgtgaaaaggaaactcattagatatggattgttaggtactcaactgataacattatttaccaatgtgaacaattttttttagctatttttaattactgcagagttttctgtgatgcaaccagccatgatggagcgagcttgaactggctctaattaatgtacttgagcgtctgttttaccatgtggtgtttgtttgttccaatctttagaccctcagattgatggagttgggccagtttactaagttgccgtggtgaacaggacaaaaagatgatgttcctttgggttttactttactcattgaatattttgttattgacaagtgaagtctatggaatttctcttagcagcaagatttttttgtgtgtttgaatctttttaattttatggaagtttacttttagaatttaaagattttcagaatttaaagactgtcagaatttacagagcccttagccaccatgtatgtattccagtcccctcactttgcaaataaagaagtggaagccctggaggtgtaatgactcaggcaagacttcaatccaggtcacttctaagattatgccttgtcttacattttcccccaagtatatattgatatccatttttcaggaaagcatgtctctagatgctttctatcgaagaaccactaacattgtattaaaggactatttacaattatgaattgtgatttgatttttgtcttgtttgtcatcaatggccttgacttcccatcaaggtcacaagactgtggataatttggcttcttttctccttgtgcagctacggatgata

SEQ ID NO: 106171 - DNA, 1056 bp, Homo sapiens
aaatttgtaattaggaagatttttgcaagtcaaatactaccccattagataactaaaataaataaataaataattgagaactacactggagttatgtctccttgagtttgagaccttctgccaatgtgcaaggagggtgagagtgctggtttgtttgtggggaaggagtgagccaggcatagttttcaatctgaaaccttgtagtttcctatgagacaagtctacctcacccaagaggtctgggttttttataaggcaaggaactggagcaagatgttcattctggtgagatccccacttcataaaacaagaaatgtcagccatgaattatttccataatagctctgagcaggaagacctcttgttatccatgacaaaagttgaaagggaggtttccagaagcagctattttgaaagggctctgaagagaagatgccaggtttgcataagacaaaaagaaacggatgggtgtgtagttgcttttgaaccgcgactcagtgtgggctctgtatcccggacagggctactgattcttgggtaaagttcaagtagatcattgattcctctttgaagacccaaagctctcctcccagtgtcccttctcctagtgatgctttattttctatttcaccccagtgtttgggtctgcaaagctccaggcagcacagccgctgcagccgatgggatgcttcacattgcttttggtggggacccagtgagcactgtttgtctcttacaggctggggattgtcagtcagaaactgaacttctggtgtacctttgaatgcccaaagagtgctctgcaaaagcagcagtagcaggagaggtggggagctcttgactggtgcggctctcagcctctgacacttgtaactgatggcccctgtcacttcctgtcatgcagcccaagtggcggggaggagttccttcagggaaactatgctcagccctgttcagagaatcctgtgcacagggctccactgcagttaggagccggtgagtccgggtggatgaggtcagagcgccccatggtgtggtgctgcctctttgtccgtt

SEQ ID NO: 106172 - DNA, 1093 bp, Homo sapiens
taatgatgacacaacccagaggtgaggttcttgttatcacactgggggaatctgggtgattggagttgtaaaatcaagtagctggggaattccttgttttctccataaattatccatgtgagagctctgtgtaatttcacattacaggagggaatggctgtgtttaactccttctgttggaagggcagacttatttcacttcttactcagccaggagagggagttggaaagcatagaaatggaacttcttgttattacaattcctggctttcagcaaatatatttatgtttgtgtactttaaaaatacataggaaaagcatctgactagtactgtattctatggccatggccactgttcttgacaaaaagaatttctatctggtcatgcagctgttctggctgagaaacttgccctggttccccatttcctgcagggtggagttggaactccttccttggctccaagcatctcatccctggccttcgcatcctgtcccttccatagaccccttgactgtctcctcgcctcctgaatgaactttgctgttcccacttctcacctttgcgctgacccccctctcctcagcctggcaactcctatacatcactgacaaccagctggaatggcactgtcattggggagaccctgagaatggtccctggcttcttcctctgcagcctagtgcttcgaggctgtgggaaccagcaggttgagcagtgagcattgtgtacaggtctgcgtctcctctggcctgtgagcttctgaggtatttttgcatgcctgatgctttgaacacagagctgggcacatttctgttgaacaaaggaagctggtctcatctttacacatgtcagtctgcatttcttccccaagaagggtttttgggtgatgggtagaataccaggtgggagattggaccaccagcctccaggctccatgagagccaggctgtcctgtggctttggtgcctgcactgtggccagtgtgtattcagtcactgcctgaatgagtattgtggtaagaacctgtgctgcaggcctagactccagtccttattccattactgccaagcttggcacattggacaactt

SEQ ID NO: 106173 - DNA, 1018 bp, Homo sapiens
tcatattttggtgaatattttagacagagtttttggcaaagaataggcacttgctccattacctcaagaaaatggctttttaataagagaatatatagttgcaggaacctaggacttctctttgtgggtcagtttcattccccttctctctctgccttcacttgttactgacctataggttctgctcccggtgtctcctccttgtatgtggcactgttgggcttgtcatgatgccagctctggaccaactcagtgtgatctttcagcagctcgctctcctacagcttatggcatagtctcaggttccccatccccaaatccctaagaaaacttcaattggatcagtttttctttcttgcactgggcttcacaagtggtgggcagtcagctggctagctcttaaaagggcttctctacctcttggttcagtcatctgtggccagagagtcaaggtcaaatggatctgtcactcaccagcttgggcaagtaatcagcctcactgagattcagattccccatctgaaatcatatgtagctcatagggttattatgaagattgacttaaataatcatatcaagtatttagcactgggtctgtgacatagtaatgtgtctggaattggtgggttcttggtctcactgacttcaagaatgaagccacggaccctcgtggtgagtgttacagctcttaaggtggcgcgtgtggagtttgttccttctgatgttcagatgtgttcggagtttcttccttctggtgggttcgtggtctcgctggctcaggagtgaagctgcagaccttcgtggtgagtgttacagctcttaaggcagagcgtctggagttgttcgttcctcccggtgggcttgtagtctcgctgggctcaggagtgaagctgcagatcttcacggtgagtgttacagctcataaaagcagtgtgaacccaaagagtgagcagtagcaagatttattgcaaagagcgaaagaacaaagcttccacactgtggaaggggaccccagcgg

SEQ ID NO: 106174 - DNA, 1031 bp, Homo sapiens
gatgactgctgaggtcatgaaggagctcatagcaccattcatgtttctggactcagtcattgtgcctggggtccccatagcaaggaaagtagggaagtgaaccaaggtccagccagtgttgctcttggctgcagggaaggaaaaaaaaaaaaaaagtcaggatgaccgggaagagaaggagccaagccaccttcctggtcctatttaatgagtgttaatctttgtaaatattcaacagtatctgataccaagtaatagctttgccaaatgagtgagtggagggcctctttctgtttgatttccctggttagtttttttgtgtgtgtgcagagagagtttggaccattttcttttgtgtgtttgtgtggattgaataaaagagtgattgtttttcaattgtctctatgcaggaagccttggctgactgtaaaaatttggcactgggaagcgagcagcagtttgcgatgttactgattcagtgtttgcataaataactttgagaaccttaaaaacccaactgtacattataccttgtagttgcaggacatcaaagttaattaagtcttgtccgcctcattttgcagatgaggaaacagaggccagaagagcttgcatgtgacgttgccttcaactgtacacacgttcatgagaagtgtgactttggaattgtgaaagttttatgagttcttgctgaagcatcttccaggaattctagaattggaatgtggaggccctggaggagtgaaaatagaaaatctttcagttttcctgataatacaggggaatgacagggcagtgaagtaaggggtgcagagcaggtgtttggatcatttacccttcgtcatctcctactgggggcctctcattgtactcgcaggctgtctctctgttgatcagggcaaaggcatacgtggatgtgaaaaagcccccacaaacagctcctctgagttcctgtgacaacctgcccggggtagatctgcgcggagtcagccctgtttatggagaggctgccagaccccacttttgcccag

SEQ ID NO: 106175 - DNA, 3115 bp, Homo sapiens
ttctcccaaaagaaagaaaactctctggccccccaacttcaacactaatttggctccctgaagaagagagaaaatattatttctgtctttattgaagagaaatgggcaatgccaatgtgaaggttactagtcttttttattttctattggtgaagactactactgctcttatttagcagatcttataccttcagtggtcaccagtatagcaggtgaggtataaggaaaacagcagtgtgatgataaatggtaattaatatactttgtctgtgtcagcaatagggaatggtggggactgtggcaaactgaagcgcccctgttccacccacagtgggtaattttccagtcgactgtggccatgaagtacttcctgatcttcccatttttcaagaaaagctgacaatctggatttttatatgaaaaattctgattttaaaaaatattggcaactaagttaaaattcaagtgaatttagacccagcagaagacatggatggacctgatttggtccactgactaccagtttgttaacctgtgctttataagatttgaaggaaaggcattcatggtaattacagacggtgccaccagaaaatgctcttgctaaatgcagccagtagttagattgcttctttctccagtctcccccgcaaagaaatttgacgtgattctgaatgcactggacatgtcttgattgcgtctttacatttcacagtgtcttaaaagaaaggcaagccagttgttaatttcagaatcagatttatgctctctcaatttaaaaaatgctgggaacaatttcatttttttttttttgagatggagtcttgctctgttgcccaggctggagtgcagtggcgtgatctcggctcactgcaagctccacctcccgggttcacgccattctcctgcctcagcctcctgagtagctgggactacaggcgcccaccaccacgcctggctaatttttttgtatttttagtagagacggggtttcactgtgttagccaggatgatctcgatctcctgacctggtgatccgcttgcctcggcctcccaaagtgctgggattacaggcgtgagccactgcgcccggcctaacaatttcatttaaactccacaacctaaagggctttgtttatagttttagctcttggcataatttttttcaggtggtgtgcaattctgagcataggccaagacatgattaggaaagcaggcagttgtagagagtaaggcaaggaacctcctagcgtccattagagccaggtatttgcattatcttccgttttaagtggtctgtgaattgactgtgttttggaggtgtgaaacagtatacagagaaaagcttttcctgatactgagatatcagttaggagtccaaatggggtgttgggtcatccttgccatatcacctcctttccaggctcagagtgaaaatagacaaaaggaaatctgactgcaagccagtggctttgattccagtttcagagtttagggactaggagagagtttagattatctagcatattctccccctggtgtcagacagggctgtgcctgaattattccagacatatggctgtagatggtattctttattttataagaaggagattctgtaacctaccctgctgatcagatagttctttgtatgtcttagagaaattcaagccagcttccttttgttcggcttgtagtggagaaagaacagctggtcaccttccatgtattcaaaaaccacagtgaagtcatccccctggtgtttttatttcagtgataaataattccacccacttaaaccattcttcatggctcttgttttccaggggcctaataattttcactgctgtaatgtttctcagcttcacacttagtttagttgcccaaacaatgttggtgccttactcacattggtgccttgtgaagacgaggctcaggatggggattatggggaaattcttgcacacccagctcctcttaccacttaaaaatataatggcactttcacaaaatgatatgtcacctatattcattgagaattatttgactgccacatttttcccctgatgatagtcatctatcataacttgtgtttgttttcctcctgagatcaaacacttggtgcttattcctgatgtatactctgagaccagctcttaccttctgagtggcagctacccctccctcccaattttagatcctatttttacacatctctatagatatcacctttatttcatgactcacaatattaaatggtacagacttcagtttaaccactggtgtggtaacagcagtagttgctaagtaccaccttcccattgctgtttgagggctaatttgcaaagacatttgaatctcccagtgaagatgtctggggaattttggccagttgtcttccctcttgcccttttgttctttaaaattcagcttggaccatagacacctccaggatcttgtttatgttctgctctcaattgaccaagcactgcgttttgcacaatcagaagtctcacaaaagcaaacagttatgactgcatatctgatgtttatatcctataaaatttcaggaagattcagagtcaatcttctatttgtacatgatgtagacaaaattagctgctccaattgttagacaaaaaattgccattggattacactaatgtgctcatctgttgttttaaaagtttggtatcaggcggggcacggtggctcacgcctgtaatcccagcattttgggaggccaaggtgggcggatcacctgaggtccagagttcaagaccagcctgaccaacatggtgaaaccctgtctctactaaaaatacaaaattaatcaggcgtggttgtgtgtgcctgtaatcccagctactcgagaggctgaggcaggagaatcgcttgaatccgggaggcagaggttgcagtgagctgagatcacgccattgcactctagcctgggcaacaagagcgaaactccgtctcaacaacaacaacaaaaagtttggtatgtttctctcaagaaaaaagcatggtgagtccagacagcagcaaaagcttttgtgaaaaccaattgtgttcatctagatagtaagtaactcctatttttactgttaatttt

SEQ ID NO: 106176 - DNA, 3015 bp, Homo sapiens
ttagtagagattgggtttcaccatgttggccaggctggtctcaaactcctgacctcaagtgatccctcaacctcggcctcccaaagtgctgggattacaggcgtgagccactgcgcccggcctaaacgcttgacttttaagaaatatctcttccttcctcaactaagggaactagaacctgttaggaggatgagagtgccccatcttgagttggttgggattcttgcctcgtttatacagagcccatagtccaaacccagatccagtcacattctgccatgagcacctgcccagcccagtgaaatgcaatgacagtgtgactctgtactctcttctctccttaggtgaggaggaacctcctgcccttccttccaagctcctctcttctgggtcatgcaaagcagatcttggttgccgcagctacactgatgaactccacgcggtcgcccctttgtaacaaaacgaaagagtctaagcattgccactttagctgctgcctccctctgattccccagctcatctccctggttgcatggcccacttggagctgaggtctcatacaaggatatttggagtgaaatgctggccagtacttgttctcccttgccccaaccctttaccggatatcttgacaaactctccaattttctaaaatgatatggagctctgaaaggcatgtccataaggtctgacaacagcttgccaaatttggttagtccttggatcagagcctgttgtgggaggtagggaggaaatatgtaaagaaaaacaggaagatacctgcactaatcattcagacttcattgagctctgcaaactttgcctgtttgctattggctaccttgatttgaaatgctttgtgaaaaaaggcacttttaacatcatagccacagaaatcaagtgccagtctatctggaatccatgttgtattgcagataatgttctcatttatttttgatgtagaatttacattgccatgggtgttaaataagctttgagtcaaaagtcaagaaagtgactgaatatacagtcaccttttatgaaatgagtctctgtgttactgggtggcatgactgattgaggtgaagctcacggggccaggctgaccgtcttgaccgttccacttgagataggttggtcatcgtgcagaaggccccaggacctcagcacacacagcctcctcttggtctgagtaggcatcatgtgggggccagatctgcctgctgtttccatgggttacatttactgtgctgtatctcagatgttggtgtctggaagtttattcttaagagactgctacccagctggtctgtattattggaagttgcagttcgtgctttggttggccttctggtctaaagctgtgtcctgaatattagggatcacaattcactgaaatacagcagtgtgtggaggtgatggccagttaatctgctgaactggttttgactaatgacaaacctctttttaagatggtagaatggaggtgatagtcacaaaagtaaatgttccatttttatgaatgactttctacagagtttctatttctaaagaaaaaacaattgttcacatcccatctgatgattagcatgtgtgtaatgaatgctgtcttggtctcccctgtggaaacccttctccctgtgccttagagcaggtgtgtacatctctcactacctttctcatgggtgctgttagattttggcacccgttttctcagcattcagcccagggaatgtggttttcacttcttcgtcagataagaccaacatgaaggggtatgttgagaaacatcctgaggcaaggtgggaggtgggatggggcaggactttcccttccaagcacatgcatggcaggtggggaaaggggggcttgcacccctgctggaaagaaaaggtttgtgtatatttctgatgcaaatgtcatactcactgctctgtaaaggcagctggcagctttttgggaaaagaacgtgctcgtctgttctctggcatcaagtttcttgcagctgctctgagggagagacagtgagctgcaagactgcctccccataacaacaggcaactcagagaagagtcattttatgttgttcctatggaatctggaatgagtgcagagctcctacccacacatgactgccccgccatttcatcctaggcattctgtgaaggagattggttagtccaaacttgctaacatacgaaaattcacttggaacatgatgagagatttcttattgaggccaagagatgtttcctgtcccagaggaaccattaggagtcgcttttagggtattcagctttgttcatgaaataaggcatctctgagaaagtggccccagggagagaatggaggactgggaggagaagcattaactgagctccaagggtgtgtgggcagagagcttgctatgtgaactcactccttaagaaaatggaagagaaaaagagagtgctagttaaaaaatcgggatgttttagtttggatttagggttttgatacttatgttgaaatactaatgtttctgatcaataaaatcaaactcttaatataccgagtaatgaaaccatagtgtgattgcctcagaataaattgagaagtccaacttcctagttttgtttaattagtttcactttttctactctccccagtatgctagaaatgggaatcgttgccctgcagattacggcaaaacatctgttttaagcaaagctgcattttttgactcagaaattgtcccagacggtggatataagatgaaattcagaaaaacgttctgccaagtcacaggcttttagatattatggaaacaagaaatggaaaacaggatgatctccatgagaggccttgatcctgagagtaaaaggcttgtgtagataggttagacaacgtcctctagaaaagagaccagggataagtccaggtttccaggaaaaccaagaagcctgcgggtagctgaaggtagagtgctagttgttcatcttaacttaccaatgagctacagaaaggacttagcat

SEQ ID NO: 106177 - DNA, 1329 bp, Homo sapiens
gacctgagtaccaagtacagactcatggacaatcttcctcagctctgttcccacttgcactcccgagaccacggcctccaggagccggggcagcacacgcgacagggcagcagaaggaactacttccggagcaagtcaggccggtccctatacgtcgccatttgcaacatgcaccagtttattgacgaggagcccgactggttcgaaaagcagttcgttcccttccatcctcctccactgcgctaccgggagccagtcttggagaaatttgattcgggcttggttttaaatgatgtcatgtgcaaaccagggcctgagagtgacttctgcctaaaggtagaggcggctgttcttggggcaaccggaccagccgactcccagcacgagagtcagcatgggggcctggaccaagacggggaggcccggcctgcccttgacggtagcgccgccctgcaacccctgctgcacacggtgaaagccggcagcccctcggacatgccgcgggactcaggcatctatgactcgtctgtgccctcatccgagctgtctctgccactgatggaaggactctcgacggaccagacagaaacgtcttccctgacggagagcgtgtcctcctcttcaggcctgggtaaggtgcctttggggccgggtcctaacaggccgcagcctttgaccatgcttctgaaatcagtcaaagcgtttttccacttttggtgccaacttattgggcaatgaaacctgatgagaacacagctcgtttggtagtcttgatttataccaggtgatgggagtactcacatgtttgagttgcagaaatactaatgctaaattatagtgagctgcccagaccctgcaaggggtgttgtgccacatacagactatgcactgtatcacttttctaaactccaaaaacatcagacacgaaaacacattgggccccaagggtcttgggtaacagtttgtggatgcgtcttttttagacctgtaatgttcacaccccccgcccccattgtctttaaagctacattcattgagtctgggattcatgggtacagtattctttctatccttcagcatagggtcccaggtatgagggctctctaggaaggcctacttctgcagggagcatcaggtagatgccatctcaggctgtcccttaccatgtctgtaactagttggagtcatgcatacaaacccttgactttttttttttttttttgagatggagtctcaccctgtcgcccaggctgcaatggcatgatctcagctcactgcaacctctgcctcctgggttcaagcgattcttctgcccagcctcccgaatag

SEQ ID NO: 106178 - DNA, 1057 bp, Homo sapiens
tgaaatttggctctagactactatagaccaaggtatgtgatactctctgtacttcatgatttacagaaacaaaacaaaatttggctcctctctcttaaatgatgttccatcaaatctgacttttcttccattctaatgtttataacctggaagattaaagccagtttggtgtgtgtagctcggactagataaatagtcaattgtcctctgaagaaaagtggtgggaggggagatttccttaggcaaaattctcactcaaaggtattttatgtcccagcctgactcttaactgttgaattgttctttgcaactctttaaatatgaacctttgaatcctttttaaatcaccaaaccacactagagaaaggtggttgcatggtcctagaacctgttatgcggcttatgtttaaaaagaaaaaaagttgtttctctttgaacctttacactgcttaagtttaaaaactttccctttgaaatttcccagtgcactccccgtgggccgggcccatcagagccgtggccatcacagtgccactggtagtcatatcggcattcgcgacgctcttcactgtgatgtgccgcaagaagcaacaaggtatctctttgtgtgctgtgtctccccacaacaaggggcaggccagggggtgctgccaagagaaagagagactgggagtacctgggtcctccaggatggcgcctgggaagcctcatagctcctactattcagttcccagaattaaaatatttggcttttaacctcaggagccactaaaaaaaacaggtatcattatatatctgtttcttgggacagggtctcgctctgttgcccaggctagagtgcagtggcacagtcatagctcactgcaggctcgacttcccaggcttaggccatcctcccacttcagccccctgaggtagctggggactacaggcatgcaccaccatgcctggctaattttaaaaaaaaattttttttgtagtcatggggtctcactatgttgcctaggctggtcttgaactcctaagctcaagcattcctcctgcctcagcctccctc

SEQ ID NO: 106179 - DNA, 1057 bp, Homo sapiens
ctggcttgctcaaggccgcacagctagtaagtggaaaaatcagatctaggagccaagccactgataactcagtggctactgattttacaaataggccaaggttaaatagaaactaagtaacccagcctttaaactgggagtggtcagaagagtggaaaccgtttcatggatgttcacaggactgtctgattgcctctgtggataccaagaaagtttttggtcgtggtggcaaagcccagtacctccttagacatgctcctgtgtatgtcaggttctgtcatagtttgctctccttgctggctctcatctctatcaaggtctttgacctcctgctcatgttaaaattatggcaaataaaatatgtataaacacagactggtaatttctttcctcacccttttattaagtaaaggttgttcaaaccagtttctttgtcttcaaatcaaatattcctgctgagggtgccaccagctaagcatagactatggcaagggtcctgggctgtcctgggccttttatcaaagggaagttcagataacatgtggcagataaacacagttgcttttcgatctaatcacattttctgaaaactgtggttgagactggtggcaagtctccttcagctctgggggagaagaggtgtcctgaagacctttgcccaagaagtgagtttttaaagtgttctttggtctgttgcaggagcaaactacagagacgaccagctgcctccttcaaaatgtttctccaggggattatataattgaggtatgcataacacaagaaagccctattaatgctatagaatgaacccagttcatatagaattccaactgtttacaacactaaaatttcaagctattgaaggtgtgcacagttatatttttatatggttcttaacatgcttttaaaaaaagtttatatataattgatttttgatctcttcattaaatatttcaaacaaatatttttatgtaatcatatggtccatatataaccatggtttaaaatctctagtattccttaatactacaaagatatatttttaagattttagctt

SEQ ID NO: 106180 - DNA, 1041 bp, Homo sapiens
gaaacagagcctccatgtgactgtagcatgaacatagctctgctgcccttggctaccagccttgaaattatgtaatgcctgacaagcttttaaaatctgggtgactttacattgttaccatttatgtggcataaagtgaactgcattaatatttttatattataccatttaaattttcataagatacaactgcacagtagtgaaaatcctcattgaattgatgtattttataccttttctagcatcacccggcacagtatctttatatttcattgggttgttgggagaggaaaatgtctaactgtcctaaaactaaaaacatgtatctttattctcttaatagcctgtgacctgttgttacagccggacaatctagcttgtaaaccctgtaagtaatagtgttcttatctatcaagtctcaaagtatcgccactatgatggtgttagggtagcctctggttgctcactctgggtcctaccttcttccagtctggaagcctcggaacctgaacatcagccagcatggctcggacatgcaggtgtccttcgaccatgcaccgcacaacttcggcttccgtttcttctatcttcactacaagctcaagcacgaaggacctttcaagcgaaagacctgtaagcaggtgagctgctgggtgtatataaaggaacactgcgtgtttcaaagcgacccccaggccactggaatttgggttgctcaatgtgagcattaggctttgttggctctcagtggttggtagatacttgagaatgtaatcattgggcatgtctcagggccatcttgccactgtccttcattccctagttatctgtaacccagctgtcctggtggtgatatagcctggtaacagtattgccaaggaataaacaagaagtatttctcatttgttcatatatatgtatgaacaaatatatatatatatatatttttttttttttttttgagatggagtcttgctctgttgcccaggctggagtgcagtggtgtgatcttggctcgctgcagcctccgcctcctgggtt

SEQ ID NO: 106181 - DNA, 1041 bp, Homo sapiens
aactgttttctaagggcatgtggggggtgctttttctaagcagctcctttcattcataagaaggtagttgtatagaattgtgatcattttagctttatcagccataatttaagtaaaaatgacaagaaggaacttgactcatatttagtgacgtctggcatctgattaatctcttggacagggttatgaatcaatgtaagtaaagggcttaggttgcattgaggcctctcaatgcataatcactgctaaagcaggattgtaaaagttgcggttacaatctaacaattttaagatacaaatatgtgtgtcagattcacacccacagttgctggcatggctattttaggctaaccagtgaggacttacacgtgcaactcagggagctcacattggtggtgtatatatgttctgggtaaatgctgggtagatgctaatgaaagatttgcacatccatgatacttggttcagctaagtaaagacgtggaagggatctttctttgagttacaaagtgaatttctaatatgtgctcttggtcctagcagatcttgtattacattcaagagttcagaattttcccgtcagctgcaaacaaacatttgtatctctaatttaatatggggtttgtgaaggaggatctctccgtgtaaaactttaaagtatcttgctgtttttttaataataccaaatatttggcccacatacctatgcctgtctcttagtcattactttctttttaattcttcaacatttaattaaaatttaattcacagcttgtattgactcctgagacgtttgaagttcagttgcattttgggaaaatgtcatttggacataaattttttgcaaccagaatccaacactttggacttgctagtaattggatccaggctgtgtagaaaaacttattccatattttccattgaaaaagatatttctgtcttccacagggaagttcctgttactgctcagttgactggttactagtcaactgaaataacttgtttgaaataactaagaaacaattactgggttttcaacaa

SEQ ID NO: 106182 - DNA, 1256 bp, Homo sapiens
ggggcttataagagcacagaacagtgtgatttggggatcttgggctttggtcttgggggattggattgtctcgttcctggtctcctacctggttgtgttactgtggtgtctgccatctgcaggttgagcagcctttagttgcacaaactgtggtcttgtccctaagcagttgtagacactcttaggattttaataagttcacaacactttccaaagtgttttagttcaggtgaggagttctggaatcttgtatatgtggggaagagaggctagaaggaggaaagctggagaaggaaggtgaactatgaagaaggggagcttcagtagattgtgggctggtgtgtcatgtggatttaggttttctgttacttattcctcaccttagagtggggggtgggtggtgtgtccatgtgcccctctctgcccaattgtgctttcccaaggcccatgtatatctgagttcagggatacactttcagtgggtgtgcctggcttcaggataagcagcgtgaagatgcctgtggcatatggatgtcatgtggttgtggctgaaaaccctgggctccatcagaagtgttctccacattttgttttggtgtaacaattacccattaaatgccaggctgcccgcatatggttccctccaacatccttcttgttgagtggaaacttcaggtgtgtggctggaatattttcccatcatttagcatttcagaattaacatattttggagaattctgtgattaatgctgaacggcacatttgcagagtattacagaaacagttaaattggagttggtagatctgtagctgctctttctcatgatgcataagtggtggaaaaggcggggtcaacgggaggattccggggctcactctgtggatgctataattaaagtgggaagtctggcacagttgttagccctggtattgagtgcagatggctgacggccacatcaccaagagtaagagttaggccttttaaagtcttttttctttttcttttatgacccacactatgtattccaagcataggtatggatgcagtgaataattttctcattaaaagtaacagcttattcccatactcattcccagtcttgaaatgagaaaccagtttccttagagttgaggaattgcctatctgtcgtggcttaatagagcttgcggatgagggcgtctggagtagatgaattttataaccaatcagtgctcaaagtggatctaactggaagggctccagctggcagctcttg

SEQ ID NO: 106183 - DNA, 1104 bp, Homo sapiens
tcgcttacttatgcccatgtgcctgcccttccagcgggccaaggtgttttcccggcatcaagcccgggaatggaaagtcacaggtttgtagatgatcagcccatctttgatcagcttctggatctgctgatggaagttggcattggcgatttcattggtcttattggggtccaaccagaccttcttcttgccacagcagaggacactaaaggcgagcctcatctgaaacctgagcatactcatggctgtggccgcagcagcgaaagcaatgagctccccgattcttagtttaaagtcagtttagccagaacctttggactttcctttaaaaaagaattaatcactgcttttaatcttttctggttagcttctgtttcatgctaacttcatgacaaaatgttacaggtttctaatttaatttcaccatattactttgattttgtaaacatttctccatgggaagccttaatgaagtggcaagatacattgatttctttctgttgacaggtgaagggacaaggttgtatgtgccatttacttgcctcagccctataggagaggactaggaacacaccaccaggcccacttcatcaggggtggaaatatgctcctacctgctgttccatctgctgcgtctgcctcacaatggatttgctttataattgacctctctataccactccttgccagaaatccttggagagggagtgcagggagaccttaattcctgggaacaccccactgccttcttcacccacaaaaaagacatttatcaaaatctaaaattgaccaagacatcagtacttcatttttacatcattctttgccttctccgaatgacattttagtggttcaaggaaattaaaacaaagctgaatactccttggcaagcataattatttcctggcctaaatgtcatacaatgatttaattggtatgtcattgtgtgtatgtgtgtttgcatgtgtgtgtgtgtgctttaatggaaattccatgtggtatctttgggaaattaggaaagagagtcttctagatttattgcttatagtttaagaacagactgctggcttccatccaaatagtaggacgatgtaaagttacagg

SEQ ID NO: 106184 - DNA, 1031 bp, Homo sapiens
tgtcatctgttatatcactctggggctagaaactggcaagcagtggacaggaaatattttcatttcaaatcgcttcaatcttatggtctaggggcaaaagtgtctgatttcaggaaagccgcagtgaatagcatagtaatgaatgcatttttagttgattaagcaggcattctctccctttcaaacaatcttccctctttggcttggaggggctaaataaacatgtgatattaaatgatagcatttcttgtgttggccatgccttttctttgatcatcttaaacttttcaaagtgttttccaggaatcctcagcagagcaggagcaagccagaggagaatggctaaactcaagttttggcccccttcgtaattgtttactttctgagcagaggaggttttctgagaagatgctgactcttctgaattcctctttaaaaatggaatttggtacctcacccttgggatcatgaatttaggaggaaaaaatattttgagtttttgtttattttcaaaaagtctgcaattttattgtaatttgagtcccgatctctcacatccatcaggtaaagagggtgaggagagttccatccagaggaaatctggtgaggcgatgacatatccgggacagtgtacctttcgtcctgactgcccagcctttgaacatgttacctaagtcatcacttcccagcaagcctcggaggtagacaattatttctgatgtggttcccttttttccagatgaggattccatggcacaaagagccaggaagggattaagatgagaatccttgtgactcggagaggcctctctctgccagaaaccggagctgcagagttcttaccctgcccatgcccccagcagtcgggcttgccctgccttccaagcaccctgtctcagatggacggctgccatgtgcaacaaagcaactaatggggggtggaaagaggcgagactagacagcactttggagataattaaattaaactcagattaggcaattaccccaaagattcccaaacctggctgaac

SEQ ID NO: 106185 - DNA, 1880 bp, Homo sapiens
acacttgaagtcctgagtgcataaatgtaaatgtgtctttaaaaaaaaaaaaaaagaagagatatcgacattgtaaattaagtcagtgtgtgttttatctatatatggcaggttaaagcaatccaatcaacaatttctcattgtgtgagttggaaaccctttggtgtctgggaagggcatgttgtctgttcatagaaaaccacaccctgctgctttctctatttgcagattctacctgttcagtcatatgctgaaaagtccaagtaagaaagaagtctgtagcttaaataataccaagaatatctctggggagactccttcatcctttcccaaacaatatattaaaagaaggcttttaattaataacaccaggcaggaaactaaaaattgaacaatttaaaaaattacctacataacaaaaactccatttgtaccatgtttttgtgaagtggcctaaaaaacgaataactagtttctaatagagactgttaacattgatgtttgcaactccattgttcaaagtatccatgataaaaatggattcccttttctttggttccttgtttggaaatgttgggggaaggtggatgtagctaattaaggctacaacatttaaagggggggacttaataggtaccagctgtcctcaacaaatcactgggtggacgacaaaataaagatgtgatgtgaacacacatgtaattctcttctaaaacggaaatgggctcataaattttctgatttaatagtgtaaatgaaaactacctctactgtgcttatttaagaagcattcattttatggtaaaactaatgctaaaatgtcttatttgcatatggctggtaccttaagacttgaaagggcagtagatggcaagtattattggaagcttagtaaattgtaattttattgtacctttcttcattccatacctgatctaatagacgttaatcatgaggcttttcattaaaactactacatggtagggaagcatgcttgaacgtaccagaaaagccatataaaattcaagtatcaactttgaaaacggaatggaaattggtagcattaattaaaatgtttggatggatatttacatttcacacattaaatgaatacttcatatgaatccttttgaaatcatgagggattaggccttaaatacaactttttttcagatgtaaaaagtactttattgccttcaaaactaggagtttttccaagtgttctgtttggtcatttttgtagatcttttccccccattgaatagtaaccctttaaaaaatgctggcagtgtccccagacttctgtgctgcgatggactgttttactcgagagtgggagggttaatgggataaagggagggcttccttggaacgaagaggtgtgttttcctgagataggccatatggtttagaaaccctttccctgtgattttattctgtccgggtgatttctggtttcttctctcccaaaacggcccccttttatctgaggaaaatgcagtgcagtatggaccaaatgtagcagcagtccgccgcctgagcgtggtctctgttgagtgacggtttatggccccttcctctggagtgtgcacatttgctctgggtgcagcacaggcactcacacggttaggatttattgtaactgttcagtatctgaagctcaaaaagacttatttggagtgaggaggcaggagaccctttttttgagcagccaccctgtgttaggttgtgggaccagtcccccgtccacagtggctgcctgtctgggccaggagcaagacaaaggagtaggggcctggacaacagggaaattcaggaagagattctggggccacagtaccgagcactccccgtcctctctccacacttccctactcatt

SEQ ID NO: 106186 - DNA, 1386 bp, Homo sapiens
agagtttggctttaaattatgtcactggccttagagaagaatgtgaagactttctcagagccctgaccgataaaaggggtcaggctgggtggggagtgtgaggatgggaggagcagggaagcggggcgggggagaagctagtttggatgggtgcctctggcctggggcagatgaggaggcctggagtgaagaggacttgacacttcccctgagttcctccctagaacagctgggtttgtctgaaaacagtctcaggaaggagtagcacaggatccaaatcagattctcagcagttcaaatcttacaacttcccaacaaaggaaagaactgctagtgcttttaagtatttttcatgcttcatttggcctaaaacatgttttttttttcttttttaaagctttcaaggctttttcttcctctgtccctgaactttttatatactgtgccccagcaggtgtctgctcctgctggggctaccccatcaacaattttattgtcctccttcattccccgctgcctctttttttgagacggagtttcgctctggagcccaggctggagtgcattggcatgatctcagctcactgcaatctccgcctcccaggtttaagcgattctcctgcctcagcctcccgagtagttgggattacaggcgtccaccaccacacccagctaatttttgtatttttagtagagacagggtttcaccatgttggccaggctggtctcgaactcctgatctcagatgatctgtccaccttggcctcccaaagtgctgggattacaggcgtgagccaccgtgcctggccccccactgcctcttcagcctgcttctgatggatgggtttttaggcttctagaacttgagcctccacccttgatttgtaagaatgtggggtgaggagagggctcagctatcagggagcttgacaggttgagaggtgcagtggccttagagcagacctctctctggccaccctgccctggcagccagaccttttccatttcccatctactcccaaatttggagagctcctgccctcagtcagccggggggctgtctgtgctggagctacaggccccatctccagccagccagacttgcccagccagtgggaggcattgtcctcctgggcagtgtttgtcttggctgcttggatgttctgaatgggcctgacacacgattaggtgactgatggcctccgaaacacattgtctcctccggggcccacagcctttgaagctcttcccggtgggaagtaaagagactatttgctctattaaaatgccttggtatttcctctgtttaaccacaggccacttcccctctgccactctaaacccggcagggccaccggctgattgaaaagacacaagccctcaagt

SEQ ID NO: 106187 - DNA, 1334 bp, Homo sapiens
gtcgcggccgtgactgtggtcgctgtcactcgagctgtgcacggcgagggatggacggtgccttcgccgctccgcgactgctgcgctgctccctgcagacttggccttaataaactcatcaaaataaaagccctgtgttctgtgcgtcggaatgatgctgatgtggttgctctagcttaagacagttttggaaaatgtaaccatttaatatgttttcagtactgcagaatgaaagcagctatattttttaaaatgttggcaggggctgtaacttgcatagggaaaacttcatctctaagccgttttacacgataatttaaacggtttaagacggtgttgctggttggacactatttagaatgaaacatttctgaattgttgctgatttagaaatgcagttgcaccatttcgtgtgtctttacagttgaacatggcccccaaagaagaaaagcagaagaggtctagatctccttttcctggatggcacttctgccatggattttgtgccaatgttaattgccaagttgaaatggggctctgattgtagaattgatttgttcttttttattctgaaagttatcttcacaggccagttgcctgctgctaatgtactcttaacagctgatagtgacaaaaagagaaactcacatttggtttatcttgactgccagtatactcggttcaatttttttcttgatgatttctccatataaagttataaactgtatttgtttcagatgatttgcaaaaagtttgtggaattggtcaggtgtactttgtcattttactttttattatgtaagattcaacaggttgccttacctttcttctcttacttggcttttttttttaatagcccataaagactataaacggctcagaatggattgcacactgccctggaaatgacttgtgaggcagagataaactcttgactcatctaatgtcttgaggtttttgccagattagtttacaacttaagaattgtggtttttttttttctttacaagcatgcatcatactagtgtccgttttacaatatatttgtttgttttttgagatggggatcttgctatgtttcccagtctggagagcaatggctgttcacagacactatcgtagtgcactgtgtcctggaacacctatgctgaagtgatcctcctgcctcagcctccctagcagctgggaatacaggcgtgtgccactgtgccagcttttttttttttttttttttttttttttcctgagacggggttttgctcttgttgcccaggctggagtgcaatgttgcaatcttggctcactgcaacctctgcctcccgggttcaagtgat

SEQ ID NO: 106188 - DNA, 3367 bp, Homo sapiens
agccaaaccatatcaagcagtcacttccacctccctgctccctcagcccttgtcaaccactaatcttctttctgtatggatttgcctacttttgatatttcatataaatggactcataattttagacttctttatgtctgttttcacttagcataatgtgttcaaggttcattcatgttgtaatatgcctcagtacttcattccttttttggctaaataaaatttcattgttatggatataccaagttttgtttatctggtcatctctttatatatctgtgtatctgtttatctagtcattgtttatttgtgttgtttctaccttttaactagttcaaataatgttattatgagcattcatatacaagattgttttttttgttttgaacaacagttttcagttctcttgagtaggtacccagaaatgggattgctggatcattgcatggtaattttatgtttatttaaaagttaaataattttagaaaaccaccaaactgttttctacagtgcctgcaccattttacattcctaccagcaatgtaggagggttccagtttttccacatcctcgccaacaattattttagtttgtgtgtatttaaaatttttttaaaaattatggccatctgagtgagtgtgaaatggtatctcattgtggttttgatttgcattttcttaatgtctaatgatattgagcaccttttcatgtgcttattggccatttgtttatctttgaagaaattatatagatcctttgcccgtttttaaattggttgtctttttattagttgtaaaagttctctttctagatacaagttacttatcagatacataattggcaaatattttctcccattctgagttgttttttttttttttcactttcttgatggtgcgctttcatgcatagaagttttaaattttgatgatgtccattatatattttctcttgttccttgtgcttttagtgtcatatgcaagaaagtgttaccaaatccaaggtcattctgtgttttctaagagtttagtaaatggaattttttgactatatagtattttgtactatatcacataatttttagtgttttcctatataaaatatatcagaaccatttttactagattatgtttaatttacataacactggttaaatgtctgtgtatagttatttggcctttttggtctttctttttctagcttagctcttgtcatgcagtgctttcaactcaacttgctgatgccatgatgttccccattacccagtttaaagaaagagatctgaaaggtattgaagtcaagcttatgtttactttcattggctgtgagatcaacacttgtaaaatgcatattactctgtacttacaccatttctggatgacagcctatgccactcttactttgctcagttaccaaacatttataggagctcctgctagatgtcaaactagatattgagaaataccgatatggataagatatcccctcttttgagaaattctagagaaggaagtgggcacatgcataattacaacacttatgtctcttataattagggaatgagcaaggtgctggcggggctgttaggagggggtcagcaaggctttacccaaggatgtgacatgagcattgaacagtgaagaggaatttgccaggagaacagtcattgttctgttagagggactagagtgcacaagatatggcttttagaaatacacagcctatttgacagtagcaagaaactcagtgtggctgcaatgctgtatgtgttagagtgaggcaggagatgaatccagaaatagagtagatgggagtaggtcatgctaagaggctagaacttcagattatgagcaaaggagaagccaatgggggtctttaaggagagacacaattcctttggaggatggaatagagtagccttgttatgtaggagactagactgggaagttgtgggagtccagtgagatatgaccaaggcctgagttaggatagtggcacagggtatagaggtgtgtgtatgggccgaagtggcaagaggtaggggtactggcacatctaacaatctgcaacctagtcgtttctgggttttatttttacccacttaggattactaggtgatacaatgagagttttatagagttggttttgctttcccataacttgtaatctcagccatacacacttacttccaaaatatgtagagagattaaaaatattgaactaatgtatcagtgaatggtaaagtatttaaattatacatggaatacagacaaatgtgtattatactattctacacctacaccatttctggactgcaacccgtgccacctttactttactcagtcaccaatacatctaatgtattttaaagatggagttactaattgtggttgtgatcctcaagaatggtcatttctaaggtctagaacaagatctcttttcttcagtgtaaggggactgaatggcataatcttattaatgagatgttttgtttctcgtttagcatttgaatatttagattcatatatcaaaaatgcatgattctggcactaaatcagaatatttgcatatcttaccatttacagtgggtttttaaatttgtttttatgtcatatcactaatttgtagcaagtagattttctggtggtgtaactgttgctaatgatagtaaatgtttcatagactagctgaaacacagagtagctttttcaccctgaatgttgaactatgaaatattattttgagttttaattatagtttaagtagcagttattgttttccaaacaaatgtatttcataaatgtgccaaacttaaattattcttgaactttttcagaaatactaacattaaaggaagtatttcagattgcaagtaatggtaagccctataatttgcacacttatttcttgcagtgatgtatttgtttatcagtgcatatctgtggccagattctttgtaataattgaaaaaaaaccaattaaaaataagtgaacattacttaaatcagtattgctacttaaattacactgtttatacagtgtaatttaagaaaaatcttaaggaaattaagtcttacaggttactatcttcataatgcctaaagaggtagtgtaatattttacccttcttgttcttttatatatcccaatttttctttaatgagtgttatatatatatatattttaagatacagggtcttgctctgttgcccaggttggagtgcagtggcttttcaagccacaatcatagcatactgtagtgatcctgctgccccatcctcctgagtagctgggactattggcatatgccactgtgtctaagctgcgtttgctatttttgtactagaaaatactttaaaaagcttta

SEQ ID NO: 106189 - DNA, 1017 bp, Homo sapiens
aagaccattgaaagcatttgtaagttttgaaaagtactgttgtattgttaacactcatttcttttttccagatcatgatgctgcgattaatagatatagccgtttatcaaaaaaaagagaaaatgacaaggtgtggtacatatttattccttcagtgtcataattaactattcattaggtggtttagtttttcctctatcaaaatagagccagcagttactttgtatgttttgttatattactattagtttattctttccttctagctgttcaaaacctttctgataatcattgacctctttaaacaaaatattttcttctgccaaaatttgatgttataagtaaatataactattctggaaatttaactgatgcccagtatataacattgccttttgttgctttgtattttgatgacatggcattggttctgtttgaatatataggtgtgttcaaaaatgtcttctgagatagagtggtcacacacataatgaaattctgttatgaggccctccttatttatagacatatatatcttttgatatttgttcaaggagtgaaatacagaaatattacactatatttgaggagaaatgcattcaagtaaagatgagagtacagagtattaacaggtttttttgggcgtgccttaagatcatgtctttctccagcatctagtccaaggcttgatgtgtaggtctttctagatgcttgtgactgaggtgatctctgtgcctgggtgttggtgtctgcagccttggctgcagctgctggtggaaacacagtgactgcttgtgggaatccacagttgggtaggatttactgtgcaacagctactgtgacaaaggaaatgtttctcacacaaagtttagtacaaagattgatttccttttcgtttctaattttagctgcagactactacttaatggtgtattgataaaatgtatacatttgagatctctattagtcacttggccttagagaagtagttaaaggctctgggtataaaatttgata

SEQ ID NO: 106190 - DNA, 1017 bp, Homo sapiens
aggtgtgtaccactgcacctggctaatttttttttccatttttaatagagtcggtttcaccatgttggccaggctgttcttaaactcctgacctcaagtgatcgtcccgcctcggcctcccaaagtgctgggattacaggcatgagccaccacgcctgggctcaatgtgcattttgtaaattatgtggttggaagttaaacaggaaaatttgcttaaccagtatgttgaaggatttctaaaagatcagaaaacaggaacattaatgctcaattgcttgtgatactcaattccttgggtaggctcttctccacagctcctactgaagataatacaaaattaagtaaataatagcagattatttacttaattatttaaatcttttcattcaaaggtgaagtatgaagtaacagaagatgtgtacacatccagaaagaaacaacaccagaccatgatgcattatttttgtgcattaaatactcttcagtacaagaagaaaatagcattgttagaacctctacttgggtacatgcaagctcaggtaaatactgtactgtatttggattataactgtcctaaaagttttatattaagcttgatatttacattaagtataagggtattataaactattttcaacatccttgtttatgtctgtgttttaagaagttatttttaaaatgtcatcagactattattttaaggaagttaggaagaatggttttccttgcaaatgaagatttcaaatattttaggtaaatgaaaccacttgttcaccatagctggggactgagagaactaaatgaatttcagagttacacctattgctagagcttcaactaaacacttgcttcataatagatctgaaaaagaataaacaagtttgagtttatcccatattccttgcatacttcctgagttaaaaataatagatgaactccaacgtgcccaaagagtacatcaggaagggggctagaaaatttgggtagtataagacaaagtgtcagtctcctaaaaat

SEQ ID NO: 106191 - DNA, 1810 bp, Homo sapiens
aaatggaaggatcccttgagcctaggaggctgaggctgcagtgaggttttattgtgcagtctggatgacagacgagaccctgtctcaaaaaaaaaaaaaaaaattgaatctatttaggtaaaagagtactttactgattattcctcagatagaaaacttatctttgtagtaaacatgaaatactttatataatttattggaaatactttaaaatttattttccaattttaaaagattgttaaccatatgtatatattacttgttccaattcaaaaaatataaaaggatatgcagtggaatttaagtctaacttccttaatggctccctgtgcagtagaagtcacaaactacaatgtatttttacacaaatgggaatattcctttgttttttacttaaccatgtgtcttagagattgtttatatgatttactttaagtattgcttaatctatttttgtattgttcaattccccccactccccactctccagataagtttctttaagatgggttctgaaaatcttaatgaacaactggaagaatttttagctaatattggaacaagcgttcagaagtaagtatttttttccttaaaattgaaaatgaaatgatgtgaatgataacagctcaatgacataatgtaaagatatttatcatttactttcctgagggaatattttccctgccatgagagtttcttatgtggttcatggttacttcttgtttttttttaacctcttttttccacagattgtgaactttgaatttcataatagtgataattttattgattctacactcagttttatgtctgaatataacagacacataatagtaactccccataagtgaaattatctttaaacttgaaattgtgggagtttgatgggagattactaaatattgtttccaagccatgaaagcttagagagaaagcagttcttatcaggttcaaaatgccgagcagtgtatgtggtcagtccacggtatggagagagatgaaagtgattgttgttttaaaggcacagggcagaacagtttgaaaattacgccaaaatcaggcattcggggggcttcatttgttttttgaatttagtattgtttccaaaatatctaagtttcaaataaactgtaaacctgttttaaaatatattcgtgttgttttaaccacccatgccgctcttcctctctttaagaaaacatacccgaaacaaatatgcaggtaaacatgattggtaaggagttctttattggttgtgatttgtagcaaataatctgttctgtgtcagtgttcgcagggaaatggacagtgatatagagaccatgcaacagacaatagaggatttggaagtagccagtgatcccttatatgtgcctgacccagaccccaccaaatttcctgttaatcgaaatttaacccgaaaggctggataccttaatgctaggaagtaagaaaactattgttatttttgtatattgtgtatcatgtaagacaataccaaatgaatatagtaaataattgatgtctgtcatattttgatttttattaaaggttgaaactttttagaggtgttagtatttatgtgaactttttgacagatgaagtacatgaatacttttcagaagtaaaatcctacctagatatttattgaataatgtagaatgataaaagaagtgaaaccagggctgggcatggtggctcacgcctgtgatcccagcactttgggaggctgaggcgggcggatcacctgaggtcaggagttcgagaccagcctggccaacatggtgaaaccccacctctactaaaaata

SEQ ID NO: 106192 - DNA, 1502 bp, Homo sapiens
tcctactttaatatatttgtaattatagcaccaagtcaaatgttagttttcacctgatgataggatgaagcaggttaaccctagaaataaaataaattctgttgttttgaatttactcccttggaaattgaactataacctatattttatggatcattattataacagccacagtttgataatttccagccttgttttggaaactgtatacacattcacaaaagtgagtcaacatacatgaatttattttagagactgaaagcatatttatatttattttcttggcatcttggtgcctcttcgcaagccagttcattgtaacatgctttatcttgtgtctagctgatgatgagatttcaggtatgttgttattaaagagtgaatgtgctttcttcattcagtaaaacaggcttggtgtcatctacctgggacagacagttttacttcacgcagggtggaaatttaatgagtcaggcccgtggggatgtagcaggaggcctggccatggacatagacaactgttcagtgatggctgtggactgtgaagacagacgatattgttttcagatcacctctttcgatggaaaaaagttagtattttttttctactactactaatctatagtatattaaacttctgaaatgtgagataattcctttttgtttagaaattttatggacattttaggttcattatgtattaagataaattgctttttaatcttgtagaaatatattgaatttttgtctctggcttggttaaatggtttcttgatattttgaagttgtcaaagcaatgtcatatagtaaagacctgtgatttcatgttagggaactggaactgaaaatcctgcatagtatcagggaagacagaacaagttaatggaaagagtcctaaacctggggtcagaaggatcaaactctggatccattacttactgtgtggtctcagacagtacagtaatgtctgtaacccctctccgctccatttttcttcatgtaaaatgtgaatgggggggggttgtaatccctatcgtaaattgttgtgaggaacagaaattctaacatatgtaatgtgactgacatatagtaggtgctaacaatagtgttattttaaaatgttaatcaagtatttctgatcagattatttttccattaatgtttataataccatttaaaaaatttctgttacctttttttgaggcggggtcttactgtgtctccctggctgcagtgcagtggtgtaaacatggctcactgtagcctcaacctcctgggctcaagggatcctcctacctcaggatcccaagttgctaggatcacaggtgcatgccactgtgcctggcaattaaaaaaaatttttttgtagagatgtctcatcatgttgcccaggctggtctcgaactcctggacttaagtgatcttcctgctttagcctcccaaagtgctgggatcataggcatgagccagcatgtccaggcttctattacctttgcattaaa

SEQ ID NO: 106193 - DNA, 1064 bp, Homo sapiens
ttgtaacatgtacttacagaacctaaaaagaagtttttacaattccaggacattcttggcatttttctcaagcaactaagattgcagttaaataagtgttcctctgtgctagcttatttaaattcaagaacttttgcaacatggtttattatgttgattttttgttgtgtatgtctaaacttccaattcatctgtgtcttctaaagtgcaccaacattgatcagttagtgtgtgagggcagaggccttcatcatagtaatttagtgatcaatagtgtttcttaataggatggggcattttagagctttttttttttaaatgttaactgtggttttaataattagatttcttctatgtggctcatggtaactgaccatgtgttcatattttcttctaaactttttaggcgtacaaatccatttggagaatctggaggaagtacaaaatctgaaactgaaggtaagacagatgtgcagcattcatatattttagaactgcttctcagcaaactgtgaataatttattgtttatatttgctctgctactaagctcagttttaatgctatctttacttcagaatttcctctacttacttatagtacacttgaagcaacagaacttaatctgacttaagatgttgtgattcatacaaaacgatagactctcatacttttgactttatagtcaaattcagtgcctaagatacctttcaagcttttcctaacagctgatgtttctcttctggtactggagcataaattttgtttttccgccactaactatttatttgaattctaaacttacagaaatgctgtaagaaccaccagttgttgtgtgtttgtgtgtgtgtgtgtgtgttgagacagggctccctatgttgcctaggctggtctcgaactcctgggctcaagggatcctcctgccttagcctcccaaagtgctaggattacaggtgtgaaccaccacgcctggcctcagaactgccagttgttgaagcattacttttagctatttgaatttgaaaccctaattttcctataacttggaatactgtagttaggagt

SEQ ID NO: 106194 - DNA, 1026 bp, Homo sapiens
tagtatcagctatgattggtctttggctgttgtagttaagtctatggccatctccaaaaagttgtcattgaacattttatgtaacttaaaagaattaacacaattctttttgtaatttttttaacacagttctttttgactttgtaaaatgtgttaatgactaataaaacaaatgtaatattcaacaacctttttctgcttgttaattcaaaccaaatatgacattacttgtttctgcattacaagtctgttaaaataattggctttaatatattaaaatatttatatttttagaacttagcatatgagtttgtcacaagtgctgctgtaatgacttgtaagatctcatgtttgcttctgatgttttctgtggcagtttccattaccttgtgtagttttgtatgctacacaccaggaaaataagcgcctttttggatttgttcttcggacatcaagcgggagaagtgaaagtaatctgtcatcagtctgctatatatttgagtcaaacaatgagggggaaaaggtacatggcttttcagaatatctctgtcataaccacttactaattgattcttactaagatttaataataattaaattcttacaaattaaattagttagtaattactgattgaattctttacaatttatacaaatttatgaggcacatgtgaattttgttacatgtatagaatgtacagtaagcaagtcagggtatttagggtgtccatcatccaagtacaatacatttttgtgaagtatagtcaccctactctgctgtcagatattaaatatattctttctatcgtaatttatggttgtaccctttaatcagcttttcttcatcctccccctttcctcatcactcagccttcccagtctctgttgtctgtcattccacactctgcctccacgtgatcaattttttggctcccacatacaagtgagaacatgtgatatttgtctttttgtgcctggcttatttcacgtaagataatgacttctagttccatccacgttgttgtg

SEQ ID NO: 106195 - DNA, 1748 bp, Homo sapiens
caaattttgcctaggcttactgagctgcttgagcaaagcatctctgaatagagccaagctgatggtttgggccttctgactctacagacccatgttttccctgccactgatagctggtgcaatcttttagcctctcatttatgttgggaaccaaacattatgttgggaaccaaaaccagccattttcagatgtcttcagctgagaatagcattagcagctgcatgcttcttcctcgtaggccttactgtgacagtaatgaatttgacataacaagaagtggggtatatatgaaggtgagagtcagcagtggaatcctgtagacttcaaggaaaacatacaaagccttggtttgggggcttgagcattcttaaatatgcttttgcttgaagcaatgtattaggattagttataaaactagttccatcagttatttggatacttgacatttttgctttgttgtgagaactgcctgaatttttcatactttttctctttttagatatgtgattctgttggactggcaaaacagatagctttgcatgctgaactggtaagaatccaagatgtggctgggcacagtggttcacacctgtaatcgcagcacattgggaggccgaggcgggcagatgacttgaggtcaggagttcgagactaacctggccaacatggtgaaaccccatttctactaaaaatacaaaaattagttgggtgtggtgtcgtgcacctgtaatcccagctactgaggaggtctgaggcacgagaatgacttgaatccgggaggcggaggttgcaatgagccgagatcacaccactgcactccagcctgggcaacagagcgagactgtatctcaaaaaaaaaaaaggaatccaagatgcttgattttccaagaatgttaactaaaatagtatattagctctttcatattagcaagtaaataaaatgattttgctaagcaaggttaacagtgatactattaccaacatagcatttagaatttggataattgtttaccattgaatataaactgttgatgtgctttcttatgtataaatgcaaaaaaatattgaaaggttaccatgtgatattaactgaaatgtctaaaatttaaagttatttcatatttaattcattagttttattcatctgttctttaggatcgtagggcatcagaaaaacaaaaagaaatagagagagtaaaagagaagcaacagaaagaactcaataaacaaaaacagattgaaaaggtatacagtcctaatgtctggatctttatgtgttgtttgtgaagacttaattcagcactatgactttcagatttgaatttccaaatgaagggctgtttctgcttgttcagccacttcataaacagatgattcataccatagcagaaaagggtcacatctgttttttgatatgatgtttacattatagttacgttgacatgtaatatgactgtttcaaaaatataccagaactttaatatttcagaggaggttgtctctgtcaaagcagttgagaggctgtgtagacttaactgccattgctgaaagccattttgccttctatgggggggaaataaataaatatatatgttatatgaaatatataatgaaatgtatatttttaatattgccaggagtgtcaaatcattgtccatccaacagaataattttaaaagacaaatttcagagcaaaacttgaagaatgcattaaatgatccatgaaattgtaagagcgtgttatggg

SEQ ID NO: 106196 - DNA, 5398 bp, Homo sapiens
acagatcaataagcattggctgtgggctggctctctggacaaagaagagggaagtggcaaagatgacattgaagtgaggctttcttgataggcgaggctgagggaaggtgacacctgatttagcaaagatgaattggacagggatggagaaaagggctggagaggggaagggaaaggagtgtgggggtgatccctttcgagggttttactataatatatagtgagagatgattgatgatgggctttatttggttgttggtcataaaaaaagaaagataaaatattagattttagtttgaatgctggcttttataggatggtgccaaaattcattttggtgttgtattgtttgggtgtagcttttctttttatcaagttgtcagaagtatgcatacatatttatgacagaagaagtggctctcaagaatgtatcttaactgcataatttgccatttgactgcagacaagtaacttagtttcttttttgtcttttccactaggacttggaagaacaaagtcggttgatagctgcttccagtagaccaaaccaagccagtagtgaggggcagtttgttgtccttagcagtagccagtcagaagagagtgatttgggagaaggaggaaagaagagagaatcagaagcataagcttatacttttggtagatattcccccttggaatttgacagtttctatggtgaaatggcagaaggtaacaactatgttgaaatatcaaggaggagattaagctttatatttgcttatttgttgtagctacattttaaaaaaaagattgaacttgatgacttaggtttgcattgatcttttttcccccttaaacataatgtactatgtattaacatctaaaggaaacctgctcatctccctgaagcagactgctgaggaattacatttgctcaagaattttttccgtcaaattgtgaacttttaattcttgcattgtaattggctgtgtccataagaaatcatttattcttcaggcttagacattcatggatatgcttttctttcattaggaacattttgctggtgatgaggaagcatttagctgaataagtttaaagccctttatacagagaattctacaagtttgcaaatattttaacaatattaaatgtgcaatagaacttttataaaataattagaacagagattttacagttaaggtttcaaattgtggcaggtggtactgttgatctcagggtactttctgggattgctcacatttctctaatgtactgcacttgatgccagtaggaaagaagcttaagtgtcttcagttcaagattgatagagcccttggcattttattatcacattcttagttctcaggttgggacttcaattactgctgcagagcagtagtggttaaaaataagatattggaatttattaaaagatttttgttcaatacattttagattaggattgacaagtaaagatactgctatggaatgatacattgtattttctgcattgtgtgaaatagtttttattgaaagtcaagtgacatttcaaaagaagttctataacaattatgtttcatgcttaaagtaaaaattcccagagtttagtttagaaaatgtaatcttttaaatttcagactgatatattcccagtattttcataatgccatgttttgataaagtactgaatcaccactttatatccacaaaggcaaataactaatgtatgataatagaataatttgcactaattattgtaaatatgtctactcttcaaatgagtaaaaggtccaattttgtgaaagattgaaaatgaattgaatgcctagtagagtataggagaagttgaccaaggaaggatttaacctggtgccaaggttaaaataacatttctctactgcctattgtttatgttaaaccttaattttttttctgtaatcacttttaacactgctaatagaaattatgttttcatgtgtttcacatgaaaaagtatatatatacaaagttaatatagtgggtaaaatactttacatagtcacacatttacaaatttttcaagaggttagccactaagactttaataattttacaagggaaaaagcctttttttttctttgatatacagttttttcttcttagttctgcattagaaatggcatctgttttaggtctcaaaatataactcagctgtttcacactgtatatgtacattgttttctgtaggaataggataatgatatataggatcatgatattccttctatccatgtgccaaatgggtgtaatgtttatttactgatgctttatgttaccaaaacatacagtaaaaaagtagaaatttatgaaatacttttgataaaaagtttattttgtgcttaccaaaaggaatgctttcacaatagtgtatcagttcttttgttttgttaaagttggaatttattctgttgccagcatttaagtagtcatggcaagtcctgtttttaagaccttttggagactggagctttctgttccattaagtcttttgtttatactacaaattgtcacctcacttagttcagatgaaatctgttactctacaaggaaggtgttcatcattaggaggcagctttactaagctggtgctttgcatggtagcaagtgctgccctttatcagcaccctgggtcatagtgtaggctagagttaaggcactggcagacttagggatgctggacagacctgtagttcgttttaagtcatgttcacaggaatttctacaataataaacccatcatctccataggtcagatcgaagtgcattccaatgctaaatagaagttatgagtgggtttaacaattttagatgattcagcttttgttccattactgttgaactatatgaactattccattactgcagagatttaagtatctgttttaataagctctttttgttatttaaaggctgcccatgggtttctgcctagtggtaaagctgattgttaccctcctttgaaatcccttctagttctgagatgctttgagggtaactggattcgattttgggatatcttttctcacattcagacttacacttaatggtgttagaaatcaacaaaactcctttttaaaaagaaaagatattaagcctgcctacttctacaatgcattctgttacctatttgaacagtatgtttgtaactatggcaatgaagtcagtagataggaaaccagttattccttctacctttaaaaattttgagaacttgccaaccagggattaaagctattatcttgaacagagtccctaaagctagtctagtttttgccacatctgcaatgattattgtttaatttcaaaagaatcctcaggctctacaatctaggggtggtaaatgtgtttccactatacttgggaaaaggtcagtaggatgtgcatcctagggaagataaaatcgtatatggtaaaggcatttgagttaattttgcattatatctaggaaccatattatttaaaatttgaatcctattaatgctgagagatcctaagagctagtatgttgtaaaacctgccacctgaataaaatgaaaaaaaaagtgtttttttgagacagagtcttgctctgttgcccaggctggagtgcagtggtgtgatcttgggtcactgcaaactccgcctcccaggttcacgccattctcctgcctcagcctcccgagtagctgggaccacaggggcccaccaccgcgcccggctaattttttgtatttttagtagagacggggtttcaccgtgttagccaggatgttctcgatctcctgacctcatgatccgcccgcctcggcctcccaaagtgctgggattacaggcgtgagccaccgtgcccggccctaaaatgaaattattaatgttggttctgaaacagcctcttagcattcagattgtattttaaatacttaaacacaccaattgtagaaagcaaccctttatttttagcaagtttggtttactcttctcccatgagattttgtctttctacattaactagtaagacataaagatttgaaactggaactatattatactttttaaccaatctctgtggcttcactcatgaaatttacttcagttaatatgagactgggggttaagttgtaactaatatgcaaaattgctttgtatatttggtgattttgtaatgtaagtgaattgattcttatttcactgatactattaatcatgcagtgtacaattcaaaatcatgcaatgtttcactttagaattggatttgaagaactcgactttatgtgatcatggtattggtatacatgtggggtggagaacttattttttcattttgtcacaataggtatatactgacaaggcttcaggaaaaaagttgttagaagattttttaatgtataataaagtccatgatttttgtacagtgttttttaatgaaatatttgatactctgaactttatttctcaaagtaatttcagatgtttgtaaaacaatggacttcttaagctgttatgacattataaattatacagctagcccaactataattccacagcagctaaaatgaaaaaaaaaagtcactttattgggaaaagtttgttatagaagcaaactaatcgatcactggtgactgtttttcttttagcaaaggaaaaagacttcattaattgacgtatacttgctactgtttggtcctacttacagaaattcctctaatttacaggggcaggttattgtgcataccacagtatagcttggatttgtaatttcaatactaatgcatattcatcccatgtgctctttatagtttcttatgtcaattagttactttcttctgggatttagtgttttgtcttggattttatagaaatgtatatatacttttagaaggtacagggaatagatgaaattaactttagaattatataatttatctgatataagtgcatgtatagcctaaatatatttctatattgaaagatataatctaccactcacttaccagtttgatttaaaaaataactattcatgtcagctatataaattttttaatgtaaaaaaactataaaaataatttaaagtctgtgcttactgaaatagtctatatagccattaatccctacactagaaaaaaaatcatatagcttcagtttccctagaatggactatctaattcttttaaaaagtaccaagactaaacatgtaaacatcaaggccatagctgactgggctgtagtgaaaatggacgatatcattctacctgttttccctgttgatatggcttctaaatgtgacacaagtatggttgaatgaatgtctttttcagtttctttcctcactttccacacatagaaatgtatacttacaggcctggcacactggctcatgcctgtaatcccagcact

SEQ ID NO: 106197 - DNA, 1055 bp, Homo sapiens
atagaatcacttatacaaacctagatgggatggtatactacacactaggccatgtgttatatagcctgttgctcccgggctacaagcctgtacagcatgttactgtactgaataggcaattatatagtaaatatatatttaaacatagaaaaggtacagtaaaaataagcattataatctttatgggaccaccattacatatgtagtccaatgatgactgaaacattgtatgatacgtaactgtaggaaaaaatacagtatgtttagggttctgtactaaccccggtttcaggcttccactgagggtcttggaacgtatcctctgaagataagggagactactgtattatatatacttctctataaaaaagatactgcagtgagttatcttgacttgtcagaagtggcatctattcttttgagcacatagacattggatttatacacttaattaaaactggtgtatttcagttaattgaaatttttactatttgggtttttttttttttaactgcctagagaatgctagtcatttatatgttgagaggctatgttcaaagctactttaaaaaattttttttttcttttagagatggggtcttgctccggtcacctaggctggagtgcagtggcgtgatcacagctcactgcagccttgacctcccaaggtgaagcaatcctcctgcctcagcctcccaagcagagctactttttaaaggacttagactgcattgagattttagttggtgggtaaagcaaaaaatatgaatcatacataagtgaaattttaaggaatacagctgcaaaattataccttttccattagaatggtttgattaccaggttcctgtaaaaattccttgtccataaaggtcgtattctttgtaaaggacatatgcttttagacgattgggtaatggaagaaatgacatgaagacagggcagcgcaaatgtaaccgtcccatgcatttccggatctttaggcggcacaaatgttttagggagcgagggtttgctaaaaagaaaaggcacattatccaaagagaaaaagaact

SEQ ID NO: 106198 - DNA, 1029 bp, Homo sapiens
aagactggcatcaatcatggatctggcctgtgagatctgaagttcttaaatctgcatgtggccaggcggggtggctcatgcctgtaatcccagcactctgggaggccgaggcaggtggatcatttgaagccaggagttcgagaccagcctggccaacatggtgaaaccccgtctctattaaaaatacaaaaattagctgggcgtggtgactgcatgcctgtaatctcagctactcgtgagactgaggcaggagaatcgcttgaacccaggaggcagaggttgcagtgagctgtgattgcaccactgcactccagcctggttgacacagactctgtctcaaaaaaaaaaaaaaaaaatctgtgtgttttagccccctcagggacagggtagaaactgaagattaccacccaaagggaaataacatgaaataaattattaatttgtcttacgtgctactttgaaagaatttgctttgaagaaggtcattttgataccctctacagacatggctcttagctttttctcatccttgtttttattgccatatgatattagcttttcattccggtgtccatggtgttgtttccatgatttaggtggattgggatgaaagtattacctatctatataataagtagttacctaacagattttgtctccttggaaaaggtaataaatacaaattaagtgtagttagtaacatttttaaagataggaatagtatttttctggtttaagtcaagcttttaaccagaagagaagggtgttctaattctaaaacaaccaaataagaatacaattagtacttttgtaaaaagtcattctatgagaaggatacttacttaagataaaatgtatttctgaccagatcccctgtttttggagcacagctttcaactttgaacagatccgaacttgatcaacataatcaagcatcactcgaacaacctttccagagagatgttgcagccatgacaaagttattacttcacagaactgagggaaacaaaatcagaattaggaaagtaa

SEQ ID NO: 106199 - DNA, 1007 bp, Homo sapiens
ctaccgggaagaggcagtggctgaggacgtgctcaacgtggatgcctggcaagacggcgcggtgctgcagatcggcgatgttaagtacaaggtggagcgcaacccgcccgccttcaccgaactgcagttgccgcgctacatcatggccgggttccctgtgtgccccaaactcagcctcgaatttggggatcccgccagctcccttttccgctggtataaggaagccaagcccggagcggcggagcccgaggtcggtgtcccctcgtcattgtctccctcctcaccttcttcttcttggactgagactgatgtggaggagcgtgtctacaccccgtccaatgccgacatcgggctaaggctcaagcttcactgcaccccaggcgatgggcagcgctttgggcacagccgggagttggaaagtgtgtgtgtggtagaggctgggcctggcacctgcacttttgaccaccggcatctctacacgaagaaggtgactgaggacgctctcatccgcactgtctcttacaacatcctggcagacacgtacgcgcagactgagttctcgcgaacggttctgtacccatactgtgccccctacgccctggagctcgactaccgccagaaccttatccagaaggaactcaccggctacaacgccgatgtcatctgtttgcaggaggttgaccgcgcagtgttttctgacagcttggtacccgccctagaggccttcgggctcgagggggtgtttcgaatcaagcagcacgaaggcctggccactttctaccgaaagtctaagttcagccttcttagccagcatgacatttcattctacgaagccctcgagtccgacccacttcacaaagaactgctggagaaactagttttgtacccatcagcgcaggagaaggtgctccagagatcttctgttcttcaggtaaagtagttccgcccgtctcttcacatactgtcccacttttaggggccaggaaggcgaggaatgaggtgggggt

SEQ ID NO: 106200 - DNA, 1175 bp, Homo sapiens
aaaaaactcaaaaaaacaaacaaacaaacaaaaacattcaggagatttgcaaatgccaactgaactcttggcactttccgtttattttaggtttcagttcttcagtctacaaaggactcttctaaaaggatatgtgttgctaatacccatctttactggcatcctaaaggtaggttttatttggtatcacaagtgacttaaacacgcttaaagttgtttaaagtgttttacacaaatgcatatcttgaacgtcacccagagactgtaatttgtgtagtttttcttttttaacttaaagacaactttaaaaaatacttacattaatgttttttatattcataggtgggtatattcgcctcattcaaatggcagtagccttggctcacataagacatgtttcatgtgatctgtatcctggcataccagttatattttgtggggactttaatagtacaccatcaacaggaatgtatcattttgtcatcaatggcagcattccagaggatcatgaagactgggcttccaatggggaggaggaaagatgcaatatgtctcttacacatttcttcaagctgaaaagtgcttgtggtgaacctgcttacacaaattatgttggtggctttcatggatgtctagattacattttcattgacttaaatgctttagaggttgaacaggtgattccattacctagtcatgaagaagttaccacccaccaggccttacctagtgtttcccatccctctgatcacatagcacttgtatgtgatttaaaatggaaatagatgtgtgtttaatggaattgaagtctgaaaaggaagtagttattttagcagaaaatttaatatgaatcaaagcttatatgtaaacttcaaggaggaatggtaaaatgttcagccctcctagttatgttcctgatgtcttcgttatgaaactgttgatgtttgcatcatacatcttctctttccttgttttcctctacaattggaggagaaacaaatatatttcttactagcaaaatagaaaattgaattatttttctccaaattgagactctcagaaaaggaagattgaattagcgtgttttttgtttgtttgtttttgtttttgtttttgtttttttgagatggagtttcactcttgttgcccaggctggagtgcaatggcacaatctc

SEQ ID NO: 106201 - DNA, 1786 bp, Homo sapiens
aaagggaaccaaaaaccagcactgaaaagaaagctgaatgaggggggaaaatcttgtctaaatataatgaataggtagaagtagcttgattgattgagacggagtctcactctgtcgcccaggctggagtgcagtggcacagcctcggctcactgcaacctccagaataggtagaagtggctttatttttaaaaaataatttaatctaaaaaagtagagacaaagtctcaccatgttacccaggctggtctcgaactactaagctcaagtgatcctcccatctccgcctcccaaagtgctgggatttataggtgtgagccaccacgcccagccagaagtagctttaaatatgggagagttttgtgagatgcaagaggtgtgaaaagactcttaagtttgattaagaaagtttaaacactggtgttatatattaactttgttaatcaagtattttcttgtcttctctttacagtggtatgttcaagccacttgtgcaacacaaggaactggtctgtatgaaggacttgactggctgtcaaatgagctttcaaaacgttaaatgaaattggatatctaaccaaggacatgtttgataaaattggtctaggcttgttacaacaaaattagtttgtatcttggttattaaacagtatctgggactggtttgggcagaatattaaacttattttgttgccaattattgtttaccgagtataatgttgctatttagcaatgtgcttggttttaaagaaattctccttgggaaaaaagtatcctcttttaattttacttcccataagcgtaaatgcctggacatagctcttgtgcaacctttaaataaattgttttgagtgttttttgagccccagacaaataatgttttaaagttatccccttgctactttactgatacctttatcattcctgagacagtttgctaatttaaaaatgtagcattccatttgtatttatttctctcccttgccaaaaagattttctaatactgcttgtaccagccagagaaagatccaaaacactactcagctctcttgcactgaggaaatttttccccctacattgactcctggcctacatcagccaaacttaaccttggtggggtttggatttgatagccaattagttctgtgctggttgcaaagaattgatatttagatggtttttaatactcagcagattgtcttcctttatattgtgtcttttttatgttgcatgttgcttttgttatcagcctgattttttgctcagtatatgatagttctgctgatgttttgtttattgggcagacatatcttcattaagagtttttggaaaactcatcaaattcgatgaatacattttcttcataacccatttggaattattcctaataaaatgataaaatacgtaattgtgtgtgttctttttgagttttgaaggtatttgaaatgtattttcttatgtagccaactttgcttgcatattttatgtactgtgaacagtaacacagatcccactggtaggttactaattgtataaagtggagatctagattgttttcatgtgtataacagcatggggaacactattaaaaacatagttttctaaagtcagatcaagggtaaaaggagggcctggcatggtggctcacgcctgtaatcctagcactttaggaggttgaggcaggagggtcacttgagaataggagtttgagatcagctttggcaatgtagtaagaccctgtttcccctgtctctacttaaaaaactaaaaacaaaacaacaacaac

SEQ ID NO: 106202 - DNA, 1054 bp, Homo sapiens
atgacctttcgccatgttgcccaggctggtctcaaactcctgagttcaagcaatttcaggcctgatcgtttgcctcagcctcccaaagtgctgggattacaggatgagccaccatgcctggccaaattcacgattctttaggatccttgatttgttatttttctttttgttcctactttgtggctattttggtacctgcacttaaatgtgagagtgcagagggaaggggaaaaatagatacaatttattcttagggtagttgagaaaagtaattaattggtgaagaataaaaattttttagatttgaaatagcactaataaattaaacttacaaatagttctcaaatcagcttttagcattacagccttaagttcttacttttaaagagacattttcttcctaatgtctaaccattggtaccattttgctgcctacactgtttcatatagagagtgtcgtttaactgttaaaatttactgaaacaatttttccccagggtcttatttttgtggtagatagcaacgatcgtgaaagaattcaggaagtagcagatgagctgcagaaaatggtaagaaatatactttaaattcatcattttcaaggtgtgcttttctggattaaactggtggtggtttagtacattttgactatgattagattacacaaatggattgggggggctagaaataaacttaagaaactatattatccacaggttcttaataatgtacttcaaaatctcttatagagcgttttaaaaaacacatggaagagtagctacttcagtaagttgggaggaaggcagagcagtgttgttttttttttttttagaatgcctcatgggtaatcttgatgcctatctctggctgaggatatctgatttagctcagtcccttactttacagatatcaaatctatagtgctgtagtggttttgaccctaggaatcttggttcagatgttttgttcccaaggtcatcggttccattttctctatgctgtgccaataattacttcagaaatgttttttaatagtaaccatttaaggataagg

SEQ ID NO: 106203 - DNA, 1020 bp, Homo sapiens
aaaccttgctaatccttaagcctaataattcttgaccaagggtaaccctgggtttatccctagatttgtttagaatgctttgtaatttactttgcattcttaatttgaaattagacccaattctggcctctttggaccatctgagaattaaaagtctaagtactgcttcctagggagttcatgctagctggggaaagctttatgtgttacctgatagaatcaaagctaagctcttagcttgcattcccagcattactgatcagttctcctagctataaaatttaaaagaaactatagctttaaccatgtttctaacttatactaacaaaccatggcacagtgtgtagtaaattcctcttataattccaactaatttgccattgtaaataagtaaatatttggcttttcaaataatttcatagcagctgggcttatctgtagaatcctagcttttcttcactcttgattctaggctgttccaggaagaaaataattagggattaatacctaaaataattctccttctcaataatgtcactttgggactgatagcattatttgcattttaaaacaaaggctgggtgcagtggcttatgcctgtactctcagcactttgggaggctgaggtgggaggatcgcttgagctcaggagtttgaggccagcctggggaacatagtgagaccctgtctttacatttaaaaaaaaaaaaaaagaataaaaatgggaagttagcagtcaaaataaaattaggtcccttttaggggcattacctcttgtaaagggtaggtttcaggaccgggtgctatggcttatgcctgaaacaccaacactttgggaggccatgatacgaggatcacttgaggccagtccaggcaacagagtgaaaccctgtctctacaaaaaaaaattaaaaaaaaattacctgggcatggtggcatactcctgtagtcccagctacttgagaggctgaggtgggaggatcacctgagcacaggagttggaggctgaagtgagctaca

SEQ ID NO: 106204 - DNA, 1948 bp, Homo sapiens
gctgaggcaggagaattgctcgaacccgggaggtggaggttacagtgagctgagatcatgccacttcactcccgcctggacaacagagcgagaatacgtccccccgctcccctgcccctccaccccccaaaaaatgctggtagttcatagaatttaattggaagagatcttagatgatctgatccagtccctttatttatggctaatttctctggtctcagtgtcctaaagtcactcaactagtttgtcgcaaagctagagattagagcctaagtcagctacatacttgttaccttttactagtacatgctgtctctcttggtctagaaagcagaatggaaaggctttctgtaggaagtgttgcctttgggaatcagaaataaggtcatttcatttctaactcatttagaagttgtcttgaacagtcaacttctagttttgaactataaatttattgtaaaattatttcttggagtgtgcttttggtctggattttaaatctataatgtcttcttctagttggattggatgctgctggcaagacaaccattctgtataaactgaagttaggggagatagtcaccaccattcctaccattggtaagaaagtttacagatgactttatatcatgatatgttgtaaagtgaaatatatacagtctagttttgagattgtctttttgttaagcatgttgattatcttagaagtacttttaaaacaggccgggtgtggtggctcatgcctgtaatcccagcactttgggaggccgaggcgggtggattgcttgagcccaggagttcaagaccagcctgcataacataatgaggccttgtctctgttgatgtttaggcttaaatatattttttaaaaataaaaagaagtactttaaaaacactattctaagaaaattccacaataaaaggttttattttcttaatgacgctgcacagcggtcatttttgtttttctttgtaggttttaatgtggaaacagtagaatataagaacatttgtttcacagtatgggatgttggtggtcaagatagaattaggcctctctggaagcattacttccagaatacccaggtaagggatactgtatgtttttataacttttctttgtgggtttcatgctctaaagtttttattagtatctagtatttacttggatattggtgtttactatgagttggcatttgtcttatcaccacttccacattcttcagtggactctcacttaggccttgaaggctaacttatatagggtggaagagttgtaaagcaattgcggtaagtgtttggaagatggggtgggtgctggtgtagttcacaagaatgaattaggtctcttatccgtagttctttgctttccatcttagtttagaaagtaaggtctgtataaactgtcattgtagtttctgatgaatgtaagacaattgatagtcctttgtttagcccagttacttgtttactttattaaatacagtaaagtcagttcgctgcattgatttgtaagatatttttatattgccacatagtatgtatatataatactggcatggaagagactttagtgatcctgtagaacaggagttctcaaatttgggggtggcacgtaagaatcacatggggacctttgaaaatcccaagacctggatcatcccctagatgacttgaatcagaatatcaggggatataatccaggtacagtagtgtttcttaaactttaatatgcatatcaatcacctgggtatttgttaaaaatacacattgagtccataggtcctagctaaggcctgagattctgtatttctagcaagttctcgggttgtgctgatactactggtctggtatcttacagcacagcactattgacattttgggctgggttattctttgttgttgggtatggggagggctctctatgcattgtaggttgtttagtggc

SEQ ID NO: 106205 - DNA, 1019 bp, Homo sapiens
actatcttgcctgttcttgggctgaagcgatcccgcccacctcggcctcgaaaagtgctagggttacagggcgagccactgagcctggctgcattgtcctattttaagtctggtttctgtatcttgatccatgataagatgtaatgttgttaagtgaatccttaaattatgtatatatccaaaaatactaatgtgttctgcagaggaattactaattctgatctctttactttgaactttccagttcttgcctgttgaaaagctgaaaaagtgttacttttaaaaagtttgctgatatcagtgtagtgtagtatgccagtgtagttctgtattgtcttgaatgtgactgtggttttgggggtctagagatgttcaggagaaaggatcctatatttgtcactttaaaaaatattaccaagctaaagagtggtgttttatatttgtttcttagcatattttgtaaatccatctatttatgtaatttttttatgtttttcctcttgattctaaaagtagtatgtgttccttctgttacatttagaaaacaggtaaaagaataaagtgataattacctatctgtaattccactattctgtcatatttactctcagccttatttttatttttattttttgagacagggttttgctctgtcacccatactctggggcacatacaggtggcatgatcatagctcactgtagccttgaactcctggattcaagcaatccctcctgccttaggctctggagtagctaggactacaggcgccactatgcccggctaatttttaaattattttgtagagaatgggggtcttgctctgttgcccagctgatctcaaactcctgggctcaagaggtcctcctgcctcgacctcccaaagtgctaggatgacaggtgtaagccaccacacctggtacacgctcagccttttaagaggaagtttttgttcctctaaaattgtagttgtgatgtttagttttgtgtcctctctttttgatttagcttattacaag

SEQ ID NO: 106206 - DNA, 1091 bp, Homo sapiens
ctgcaacctccacctcccgggttcaagagattctcctgcctcagcctcccgagtagctgggattacaggcatgcaacaccacgcctggctaattttttgtattattagtagagacgggggtttcaccacgttggccagtctggtctcgaactcctcacctcaggtgatccacccacccaggcttcccagagtgctgggattacaggcgtgagccaccgcgcccggccggaggttttattttagagctgtactaccatcaaaacttgcaaacacaagcttctgtaatatttcaaggtatataaagagtaacagtatatacattggctcatgtttattttcctcttagcgtacttacactttgtgaatcaattgtttatgagtcattcataaagtattttttctttcaaagtttcttagatttcctttgtcaagaggacagaattattttaggagggcaagcatatttaagttttcagtggctgaaagttggcagtctgaaaaaggatcggaagttaatgggaggacttcggactgtgataaatgaatttccagtctgttcgttaaagagatttaacaatatatggttatgttccagaacacatagtatattggtctttttacttaagatttattgtaaatgaattgctatttttcaattccttagtcttttgtgattgatgaaagtatcagaggggcaaggaatatagaagtatgctaccagcattttcatatatttactatattgggaggcatttccctccaccccaaaaaatgattcgaagaaaatgggagagaaaaaatatttaagtttctgcatttgtgtggaggatttaggagttacttgtttttaatgttttattactcaggcatgctatcgttttgcactttaattttgggataatcagttttccttgactaaaaaacacttcagtcacaagatcgacatttatggtaactcatcaaaggaagtatcaacgtacgagggagatatgtgcatgaacagggaaaaaggtggtttggaagtttgataattcttacatttttctgtctggctttatgagtgactgacagcaaaaataatagatcacttt

SEQ ID NO: 106207 - DNA, 1052 bp, Homo sapiens
agtagctgggattacaggtatgtgccaccacgcctggctaattttgtatttttagtagagatggggtttctccatgttggtcaggctggtctcaaactcccgacctcaggtgatccgcccgcctcggcctcccaaagtgctgggattacaggtgtgagccaccgcacctggccagaagccactaactaaaataggcacacatgacacagcatgtggttaatagctgtgtcttgaattatcctctaaataaccaaatttagttgtatgtatttgtaaaggatatggcttcagaagctatcttttgttctctgtcgatataactcttaagggcattcctgacccaagaaagactccttgcgtttgtaactgtggtctaatacccaaatgtgccctgttcttatggatacagtctcttgaagcatacctcaaagtcatagagagaatatggcatttgaaagaaatcgtttgccttggatcatatgagttattttgtgaaacaacagctgacttttcagaaaaggagcaactacttttatatgctaaaagtatttcataactttctgggaaaccttatttaggtataaatggtcatcttattatttttcaaaaaggtatattttaataattgtacaatttatatacagtttgtgaccagaatttgtaagttgttggtgtcatatcaaggatcttttaaattatgccactacaggatgtatcatttcaagtctattttgcacagctaaacagtagcaaaagatgccaattagcatgataatggtgtcttcatttttactgtatttaactgaaacctaacacatgttgaaaaccatatcatacctagtttatctcttaatttcaaactatgtacttgtaaaaatgatgtaaatttgcactgggaacctgggaaagagtgactgataatttttggtgcgtgatttttagatttgtctttttttttttaagaagaatttgttactatgtaaaccctgacattaaatgttttatctctaccagcatcaggaggaatcactgctttaagggtattatgtaat

SEQ ID NO: 106208 - DNA, 1661 bp, Homo sapiens
atgcacctgcaacataagcccaggaagagcatatccgaaaacacgaagtgtacatccagtagtaaattcatgttcagttctcttgatttgttaactaatgttccttataaattagtcactacttagtggaagtgggggttactgttacagtttgagctgcaattttgtttttcttgcttgatctaaaaaagccacctcagtacattttgttttacttccaaatatgagacaattattctggctaatgcagaaaattatctaacagttattagaatattatgagaattattcttgcactataatgctatatctgggttaaatactttgttctccttttccttcttgtctttccttcacagtagccttacctattgaaatagagaggtttgaatattattttgagaacttactgatttgggactttatttattctaggacttacttctctggatccagaaacacacagaagtagaaacagtagaccttgtcttgaagctgaaaaataagctggtatgtagccaaaacagccaaagattaaattgacttttctttgaagacattgtcctctcatgtgagctgacaacccatgatagttcgcagaagtaactttttaaatgagagggcttgaaattggtcaattgatggtagatactgctgaaaatacttggtcactgaaacagaccataatgatgccatattattctaacgttatgtatatagaatctaataagctctataaaaacattgtcacttatatttctaggtattattatgaatttacatagaagccttttattgagctcaataacgaattgtttaaatagaatgctccttgcttttttagtttctgtaatttctggtctaagactgaaagtatctaattgttagacctttaaaatggtttatttagagaatgtaatgtattaatacagattctgaggataatttaaatgttatgaaatgttccttatgtagttgcaggctgatcgagagcacttacctgtgaaacctgacactatggaaaagttacggacacacatagatgccattatcttagcattgccagaggacttgcaaggcatactgctcaaaacgggcatgacatgatatttgccaagattttccagccaaaaaggattatgcatcatgaagcatactgacatttcaaccagacgcacaaaggagatctctcagtggcagcggagtggaaaattgccatgaatgctagttacagggtagaaagactgtattgtataaacagacctttttagtgcattactttttaaagtggatatctgtggtggttccactttaatactgaaacaccgaaaggcatttctatatttttaatcatgttctaaagtgctcttatgagagacttgtgggccatcagtattagtgatttcatactgcagtgctggcattgcagatatttttttaaattggtgctgctttgcccaatcatgttaaaactcagggggatataaaaataacattcacactggctatcttcttaagaacagaaagactgaactgtcctatggttagaaggaattgatgcttatgtagtgccttctgttgtcctacatgtttcacagttcagctgctagtcttgaagcttttccttagcttcattatgatacgtaattttataaggtatt

SEQ ID NO: 106209 - DNA, 1090 bp, Homo sapiens
ccaggcatggtggcacgcacctgtagtcccagctgctctagaggctgaggcaggagaatcacttgaacccgggaggcggaggttgcagtgagctgagatcgcgccactgcactcagcctgggcgaaagagtgagactccgtctcaaaaaaaaaaaaaaaaaggccgggcgcggtggctcacgcctgtaatcccagcactttgggaggccgaggcgggcggatcacgaggtcaggagatcaagaccatcctggctaacacggtgaaaccccgtctctactaaaaatacaaaaaattagccgggcgtggtggtgggcgcctgtaatcccagctactcgggaggctgaggcaggagaatggcatgaacccaagaggcagagcttgcagtgagccgggatagcgccactgcagtccagcttgggcgaaagagtgagactccgtctcaaaaaaaaaaaaaaaaaaaaaaaagagagcagagaccaaagtcaagtagacctcatttcaagtctaaattgtattaccttggtcaggttatttagccttttgaagaagcctcagtttcctaataatacctaccacataggatcattccaaggattacaagagatcatgcatgtaaaatgttgagtgcattatctggcctatagttgctcagtaaggttaactattatcgttaaaaaatggaccgcgttgttgggcgcggtagttcacgcctgtaatcccagcactttgggaggctgaggcaggtggatcatgaggtcaggagttcgagaccagcctgaccaacatggtaaaaccccatctctactaaaaatacaaaattagccaggcgtggtggcgcacgcctgtaatcccagctgcttgggagactgaggcgggagaatcgcttgaacccggggggcagaggttgtagtgagccgagatcatgccattgcactccagcctgcgcaacagaacaaggctctgtctcaaaaaagaaaaaatgtagtccccttggtttatctaagatttagttgaatttttatttgaaatctgacttcccaagtcagtctaaatttagctatatctcttgtggggagtgatggagttgtt

SEQ ID NO: 106210 - DNA, 1071 bp, Homo sapiens
cgcgatcttggctcactgcaacctccacctcctgggttcaagtgattctcctgcctcagcctccccagtagctgggattacaggcgcctgccaccacacctggctaatttttgtatttttagtagagatggggtttcaccgtgttggccaggttggtctcgaactcctgacctcaggtgatctgcccacctcggccttcccaaagggctgggattacaggcgtgagccaccgcgcctggccgattgatctttctaataagtgctttttctttcatgcggcattcctccacttggttatctggtagtttccctttgcctgtaagataacatctaaacttcttagcatactaacatggctctaatgatcgggcaacaatattctcatttctgactattcatcctttctgcttttgctccaggaatgctaaactctgtgtagttctacagacaggccataatgtcacttcattgctttgcacatagtttgttctgcatcactcttccctctctcatccacttggcaaaaaacgcccactcatctttcacgtcttcctgtaaatattacctccttggtgaggctgtcctttaatcccctggtagacataggttctcctttgtgattattatgctttttttttttttttttttttgagacagagtctcactctgctgcccaggctggagtgcagtgatgcaatctcagctcactgcaacctccgcctcctggtttcaagcaattctcctgcctcagcctcctgagtagctgggattacaggtgcccaccagtacgcccagctaattttttgtaattttagtagagatggggtttcaccatgttggccaggttggcctcgaactcctaacctcgtgatctgcccgcctcagcctccgaaagtgctgggattacaggcgtgaatcaccgcgctcggctaattgttgtgcattttaaaccaccttcactgtcttctaattttggcatcataactgggtgtgtatatctttcttcctgtgtgctgctggaaggaccgtgtcctttcgtctttttatgtctagtgtaaaacgtgttgcctg

SEQ ID NO: 106211 - DNA, 1050 bp, Homo sapiens
gtattgggttttaagttaagtatatccaataagtgcccttggaaaattaatttttcttatttccttaaaaatatttaggattgaaattcaaagtatcaaagcaatattgataaaatagatcgatcatatggtacaacaatttgagaattatatgcttttattgtcagttattctgtgtgtcaatatattacatttaattttgtaaaaattaggatgagtcaaattgatagatatttttatgtggataaaagggacttatgtctctatacatcaccatattctaaatgaatttgtgtatcagatcaggatacaaatagcaggaagaatttatatcaatgtggagtttttagaaagattatgtaggaattttaaaaacaggattggctacattaaaaagtatttctactgtgcatcacctttcaggtgtttctgcccagttttccttcatagtcagatgctctgggagctggtgctgttgggggagccccttgtggttatggcgccatcaccatcggaatcatcagagactgtattggcacttgttaagtgagtctatttggttactatttctgggttttttttttggatgctgcagtacttaacctgttggtgatatttgcagcacttcccacctgtcgtatttttccccacccattattgcattgatccatgcaaaaaccctatcagaaggtaatgcttattatagcaccattttatggatgagaaaattgattcaggctccctgagggctggaaccatgcctttgttgttctgagtggcaggcacattgattcattacatgaagttgttccttgataaatattacttgtgtgaatgatcagtgtagagtcaaaggcacatagctagtgaacagtagagccagaatttcaccgcatcttctgccccaaacccagtgtgttctttcagtatgccatttcacattacatatatctgtctttctaattctgtgaaatgagtttaccatttattaaaataaacaaagtatccctttgtgtgtataccgtttgtatagatgttttctagttatag

SEQ ID NO: 106212 - DNA, 1053 bp, Homo sapiens
tttttaatattttttgtagggatgggatttcactctgttacccaggctggtctcgaactcctggcatcaagtgatcctccttcctggattcccaaagtgctaggattacaggcatgagcttgggattaattctttttttttttttgagatggagtctcgctctgtcacctaggctgcagtgcagtggtgcaatctcggctcactgcaagcttcacctcccgggttcacgccattctcctgcctcagcctcccgagtagctgggactacaggcgcctgcccccatgcctggctaattttttgtatttttagtagagatgggatttcaccgtgttagccaggatggtctcgatatcctgaccttgtgatccgcccgccttgtcctaccaaagtgctgggattacaggcatgagctgtcatgcctggccgggattaattctttatccatgttatctgcattatttttgattttctgctatattagggaatattggtaagacccattccctctctggctgttcctaaaggaagagaatcttaaaagttagacagggcagcatggcttattgatcatgagatagatatattttaaaattttccataaattttggtgataccttcttttatttttcttttctatctctcaggtggacacaaatatatctgttattttacctactgttcatgaggtggatattttcaggtaaagaataaaaaattttattaactgacttccttttgctttgtggtggtggtgttaatttatttaaaaaatgaatattatataggatgtggaaaaaattggaagaaaatagttatgttttacatgttataaatcaatggttcatccctgggtacatgttataagctttgacaattagggaaatttaaatatagaatatgtattatatgtaaaaatatttttgtttggtttagtgtgagaattatattgtaataatgttagaaaacatgcttttttaaaaaagagatgcattttatttgggagtgaaatgtcatgatgtttgtgttctattttaaaatacttcagtaagaaa

SEQ ID NO: 106213 - DNA, 1025 bp, Homo sapiens
gagtatgaattaataaaaattaagagaaattgggaaagccattggttcttagtcctaagtgatgttcttaacacgtgatgtcagaccacacatgttcatcccagggttttgttctctgttagatttttcttttaaatgaattagcattttgctctcagactttgtataggttgtaccctaagtgctttgcaagtcactgtcgagtaggacttatttttgacaatgttctctctctgcatttggccatttttgtaggatctgtattgtgtttttccttgggaaatcatcaaaagtaatactgatagttctggattgagtgttctcattgtttcctgtgagatttatccaaaaatttggcaagcttgagagggtgtgtttgggtgtgtgtatattaatgaagcaaagatttgaacaataaacaggaagcagtatgaagctgatgtccattttgtttttcaacatacttgcttctcagggagttagtgattactgtgtgtgtgtgggtatggagaccttgatttacttactttctgctgtgactaaaaataaatatgaccttagtttttaactctgacatagataattttgtttttgtagcttttttggcattactgaccatacctttttagcagcaggatacagcacttctcatcctccattcttttataaccaaaaataatttcctgtctttcttttaggtacggattcccacatgtcatgacaagcctgggacaactcaaatagtgcagttaactcagcaggtagtgtggtactatggtagaatgatccagcacatatatagtctctttaacagaatttttaaactagcaaatgcagagtttcttgagtttattacatatttctgaatattactgaaatgtcccattaaataatttttaatgaattggtaatatattttctaatgtttcttagggtcttttttcttgttatttctccagtagagactggagaactcagaatttatattttaattgtgaggaaaaggggaaagtgaatttttttca

SEQ ID NO: 106214 - DNA, 1699 bp, Homo sapiens
attttagactaatgttatatatatatatttttttgtttgtttgtttgatttgagacggggtcttgctctgtcacccaggctggagtgcagtggcatgatctcggcttactacgatctctgtctcccgggttcaagtgatcctcctgcctcagcctcccgagtaggtgggactacaggtgcatgccaccacacctggctaatttttgtaattttagtagagacggggtttcggcatgttggccaggttggtcttaaacacctgacctcaagtgatccgcctgccttgggctcccaaagtgctgggattaccagcgtgagccaccgtgcctggcctataatatgtttataactaatgtttataatatgtttaacaaaatttaactcttttcttccaggtaatttatcctcagcattccaaacttactgacagagaagtaagtaaaaatactgctctgtatagtttactgttatatttctgtttgtttttattgattatgtatgtgtcagcatacatcacttttgttttctttttcagaaaaccaatatttgctatttgtcttttccagattcaaattcaggtaactgtttttcatacagtgtttctgtttaattttatactaagaatactggttatactgttaatgtatgaaaattgattgaaatagcatattagattgcaaacagatcaatgatttttattcctattttaatgatgcctagtcatgtcatcgttgattttagtagcttcaactcttaaaataactgttatggtgtgatgaggtaaaccatcaaggaacaataaactcttaaaatagtgaagaggttgaaaatcagcgacattggtatatttgggattcgtggagtatgtattaaatagtttatatagtatgtagtttactttcagttcagaatttgggagcttaccaggaactctgtaaaagcagtgaacctaaaaaaagccaggataaatttggttaggaagcaaggccataagttacgtgcagtagtttatatgggttaatataggtaaagccttggcgtagtgcttggtgtatagaaaaaaacatacaagggtctgtttattgttgagcttggttttgttagtctctttcaagctcttccttttgtgtggtcctaatcgttgacatccttcaggttacctcttgtgtttcactttcaaactagcttttcttggcttatagtgaccaaaacatttagcttctcaggccacacacagttataaccctatagcagagacagtctagttttctttccttttgtggttacttcctttttttttttttgagatggagtctcgctctgtcacccaggctggagtgcagtgacgcgatctcagctcactgcaagctccgcctcccgggttcacaccattctctcacctcagcctcccgagtagctgggaccacaggcgcctgccaccagtcccggctaattttttgtttttgtatttttagtagagacggggtttcaccatgttagccaggatggtctcgatctcttgacctcgtgatctgcccacctcggcctcccaaagtcctgggattacaggcgtgagccaccacacccggccggttacttctaatattgtgctagttagttcatttaatctgatttgagagatttgacagttaaacaaaattttttttagcattttctcctttctgtataaatgcttcca

SEQ ID NO: 106215 - DNA, 1014 bp, Homo sapiens
tgccattctcctgccttagcctcccgagtagctgggactacaggtgcccgccaccacgcctggctaatttttatgtttttagtagagacggggtttcactgtgttagccaggatggtgtcgatctcctgacctcgtgatctgcctgccttagcctcccaaagtgctgggattacaggtgtgagccaccgtggcctggctaatttttaaacttttttgaggagacagagtctcactatgttgtccaggcttgtttttactttttggctattatgaataatgctaatatgaaaatttgtgtacgagtttttgtgtgaacatgtgttttcacttttcttggatatatacctagcattgaaattgcagggctatactgtaactctatgttgtaacttcttgagaaacttccataactgttttccactactgatatatgagggttctaagggttctaatttctctgcatccttatcaactcttgttattgtctctccttttgattacagctgtcctagtaggtatgagccatgtcttattgtaattttatttgcatttccctaataactaatgctaaacagtgttttttcagtgcttattggccattttcatttttattttttggagaagtatctattaacatttgtgcccatttgaaaattgggttatttgtctttttattgttatattttaagagttctttatgtattttatatactagacccttattagttatattaattgtgtcttagcctgttcaggcttctcacaaaataccacaaactgggcagcttataaacaatatctgtttatttctcatagctctggaggctcacaagtccaagatcaaggtactggctgatatggggtttggtgagggtactctttctgattcatagatggcaccttctggcagtgtctttgcatggtggagagctagctctcgggtctctttgataagagcattaatctcaatcatgagggctctgccctcacgacttgatcgcctcccaaaggtt

SEQ ID NO: 106216 - DNA, 2032 bp, Homo sapiens
tatgcttagacaatgtgcagtttgtgttaatttaaaattttgggtgggataggggcataggcttgtgaagggcagtccggatccggaggaactcctctttgtccctggtaggagagacacccccagtctatcctcgatgccgtcagccttggccatcttcacttgccgcccgaactcgcacccgtttcaggagcgtcatgtctacctggacgagcccatcaaaatcggccgctcagtggcccgctgtcgaccagcgcagaataatgccacttttgattgcaaagtgctatcaaggaaccacgctctcgtctggtttgatcacaagacgggcaaggtaatgtcaccacattgtccagcggcattgtttaacaaactttttttccccttttgccctccctgagaggactaatgtatgcaggatcccagggtttgcatccagaggaggctttgcgcaaagccacgaatcaactgtttgtgtgcctggttctagtggaaatttgattgaggtggttgaatggaaaacagagaaggtattgtaattaaaagcctcaggagggctatggcatcttgataacgtggtcattcccagtgaaatcccaaactagatagtgaaacttggcgtcttgcttttagtctgtttagaaaggtgaattcacagttcagcgctttattaagcaagcagcagttctcgaagcaattcggggaatccgtggccattattatcccggggctcaagtgtcttagtggtgaaatgtagttaacacatagctttaggtgagttcagatcaggacctttctagtaaggataattgctgatataaacctaagatttttgaaaggtttgatacatacttgcccttggaggagtaatttgcaataatcaaagctaatttaattaagcatgaacaactgtaactttatatattttcagagttttttttacaagttggagaacatacacatattgcgtttgaaaatcactttttgatgttccctgcagcacttattaagtacttaatgcatacttacagaggtgctattcaaaagttagtgttaggaaataaacttactttctgaaattataccctattctgtcaattatagcattacttaaatgtgatacgatgaattcagtgcttttcattttaagcgtaaccaatttagtatttttatgttagtatcgtaagttactatacatgtatgtgcttttattttaagaagtgaagaaagaaattaagatcctttccatttttaaaaactgtttatttatgtttgtggagagtatactaaagagctcatctttgtgcctaaacctcaggtttttagctgagctactgaatcagttccaactttaagttatgtaagactaataggactgtctcaggtttcacctcctgactttttgcccctctttctgagttaaataattaaatctttcttaaaggaagaacttaagtcttcaagaatatgttttgaaatgaaagaaacctgagcctcaaaaggaagagaaaaaaatgatacttcggcagctactgatttaaggaattattttgtaaattattttttaaagaaaggaggaaaagattgtccaagtgctgtgtgctgcataatatctatactttacgtgtaggatgagaactgaagagtatgttaacttttctgtttaacaccagatcctcatttacctgtggaacagacccttcactcgctcctcgcaagctgaagttagggtgcctaaaatacttcatagattactcgtaatcctttttttttttttttgagacagatttttgctcctgtcacccaggctggagtgcagtggcgctatctcagatcactgcaacctctgcctcccgggttcaagtgattctcctgcctcagcctccaaagtagctggtattacaggcacacgccaccatgcctggttaattttgtatttttagtagagacagggtttcaccatgttggccaggcggtcttgaactcctgacctcagttgatccacctgcctcaacctcccaaagtgctggga

SEQ ID NO: 106217 - DNA, 1529 bp, Homo sapiens
ttattctttttggtaagtagggaagagaatgtcatttagagttttaagtgaaaagattgtgaagttaactcttaatatatgtcagttacttcatagttacttgaatcaagaaaaatggtggcatttattagcggctgaaacgttctaagtttacagtccagactctttcctcttctcaggtacatgcttctcttactgacactatataggtagataaatagttacacctttgcttaaaaatctttgacgttgcctcattaatttttagcattaaaatctatatcttattttctttttttctagctctctcttttattactgttttttcttcaccccaaactttgtgtactagctgtatgacagtgttcactgtttctagaacaagtgcctttttttgctgttttgtcttctagaatgacctcttcttgtcatcccttaaggctcagttccaatgtgaaaccttccctgactccctttaactgaagaattaattgcttcttcctctatacttccatttaactttgtgtataatttctttatttcttttttttaaatttatttttatttttatttttgagacagggtccctctctgtcacccaggctagagtgtagtggtgtgatcttggcttactgcagcctccacctcatgggttcaagcagttctcctgcctcagcctctcaagtagctgggatgacaggcaccccccagcacacctggctaatttttgtatttttagtagagatgggatttcaccatgttgcccaggctgatctcgaactcctggcctcaagcaatccacctgcctcagcctcccaaagtgctgggattacaggtgtgagccactgcacccggcctgtatataatttcattatgggacataaacaacaaaataactatgatgcaaatgtactactgtcccatcagatgtgaactcttgagagcaagagaataggcactacattcatgtttgaatgagggaaatgtgaacaatggagcggtttgtatttctgcaaacctgtgcagtgttaaagggcagaaagtcattcaagttagttctcaatttgagatcatggactcaattatcaatatgtagtctttgtataagtcattatttattgagagcttgcagtttgcaaaacattttgctaagtgtttttggatcgtagatccaaatcttgtgattggtgatatgaaattatatatatgaactattacaatttcacacaaaataattttaaaaggttttagaataatcagagtgctttcttgtttcatttggtctatataacactcttagaaggtaagtaaaacagctgcagtctggctcgcttttgtccaaaaagagtttgatgtttagaggttatttgtacaagatcatctagtggtaactatgggagtttttttccccccaaaatgaaagccaactattagacatttattctgaactgtcttcttagggactgagcaattattatgaaaatctgtcttttgctctcttgaaaggtaatctaagctattgctttttg

SEQ ID NO: 106218 - DNA, 1100 bp, Homo sapiens
tgtggaagacattggctttgtgcctagaggcaaggggacttgtagagtgattcagtaaagaggacagttagaggtaaattcttggtgtgtagccaaatcatctggatagagggagatagacttgggagttatcagcccatgtagtgaaggttacaggaaatacactcccagggaagtttgtatatcgctagaaaagtagaggctggggaagaaccctggggatgaccagcatttgaacagctggcagggaaaaaagaaggcagacttaaaagaccatccagagaagtaggaggatgaggagagattagatttgtgaagtacaaagcaggggagagtttttgagaagagagttgtgaatagccctcaaatgctacattataagagttgaaagtagtccttggacttgtcaggtaggggtctgtctcatcaatggcttgagggctggctgttcagtagagtgatgaatgtggaagctcgccggcagttggttaagaaggcagtgagttagggagtgtgacagggagtgtgacagttctgtacatgcattactataagtggatccggagagtaattaagttatttccataagaaaggtagtgtttgtatacttcagtgatgatcatttgtttttctccagttttaattgttgctgctcccaaggagcctgtggtgattctgcccttgtatgtcgggggaaatgtggcattaaaaaagcagtacaggtcaggcactctctgtccagattaatttctcaatagagttatgtgtaaattgaaatcttactgagttgaataagtttgtgcaaatgggatgttggtaaggaaaaaattattcaatgacacttgttaaagcatggtaaggaagatttattcaggaccattgagataggtatagaaaccactgcagtggggtgtggggattgcggggcgagggtagagagagactgggctcactctgaatacagcatgggcaattgggaatctatagccaaggatcagtgtgagggtaagtggttggaaaattactaagaggaaacatcaggggtaagggggattctggctaaatcgacctaacaggattcttggtggagtcaggccagg

SEQ ID NO: 106219 - DNA, 2129 bp, Homo sapiens
ctacagcaataaatattttatacatttgttggttatactaaattaacaaaatcaaattagtgctagtgctagagaggttgtgatgacattaactttgttggtctagtctgtgtgccaagcattgttgcaaagccatctagatccttgtagatgtaaaatgttgaaataactttcatttttgtttccttgaatgtaatttaaatgttttagtactgtataaataaaggaagaaataaaccaaaagataaaacagttttagattctcccatgtgttgaagtcaaatctggtcatgccttcctctccactctctttttgtctgtctgactcaaactctggaggcacaaatccaacatgggtttttttctttttgggccagagagctgcatgcttgctctgctgtgttttgaatcctgcttttctagctcgcctaaatcctgaatccagttgttctttaatccaatgactcacaccttgggagtttccctcaccccactccaagaaaatgcaattaacttttccatttcaagtaaataattctgtcacgtgctttctactctttaccgattttgctttaggtgctcatctgaaaatatgcttcctgttgactttttaaaagttccttgtagagttcttctgtatgggtgggaccaaatatctgtgaatcactcccagttagtatagcatagtacagtcatcttaagagtaagtgattttttaatttgacagattgtctgccaaaaagtgttaaagtagagccaaaagcaagaacagaaattgactcttgctctatttattttcaccttttctcatcttttttcatctaacatcaaagattatttccatttctgatacacttttattgtatttgtattatttttgtctaattactagcctaggtttctacatcatccatgcttaaatgcttttcgttgttacatagggctgtaagacatttatactgtcagtagttgagtttacttgaagtcataggtgagaaggtaatgtgtgatgattaagaagtcaggaatgataaaataaaaattttctatttgttttatcgtgcttgacaataagttttgacttattaaaaatacattggccaggtgtggtggctcacgcctataatcccagcactttgggaggttgaggcaggaggtcacttgagcctaggagtttgagaccagcctgggcaaaatggtgaaaccttatctctacaaaaaatacaaaagattagctgagtgtagtgttgtgcacttgtagtcccagctacctgggaggctgaggtaggaacatcacctgtgtctgggaggtcgaggctgcagtgagccatgatcatgtcactactttccagcctgggcaacagagtgaagccctgaatcaaaaaaataaaaataaaaagtatatagtaccaatttacttacaataatattaataattttcttcactgtagataatctcctatcactgtaaatgatcttctcctataggtagggatacatctgtgtttgatccttttagtcttttgtactctagattgacttcactactttaagacctcagaaagagatgtcccagtaggttctgctaattttcaaaaagttaatacaacagaattagagagtctagattgttatctgatgtgactttttttaatctcttgtgatctctgttggctttttcaagtcattatggtttctctttgtatactggttggaggtattagcccttgactgtttccctggcctcttggatggtacttttcctgattttccttttacctttttgactatgaaattccttcaagcattttttttcccactgggttttcctcaaatgtgtgttcctaaatgttcagtcattgttttccctgttagtgttatttttggatcatcttatatattagaataattttggtgaccattcaaatgtggatactttttagatatattgaaccctggagtctgaattttctgctgtctgcttacctttacttactagatgtccttatagtgaatctaaaagcaacatatccaaaactgaagtgattcattcactatccaccattgctgcagtatttccaaatacagatactggtattatctgtccagtagcccaggctaccaactgc

SEQ ID NO: 106220 - DNA, 1112 bp, Homo sapiens
gagctgcccgccccactgcagcaggcagcatgcctgtgcacagtggtccgaccccatgctcgcttgcttgcacaccccttgccactccatgcctggcttgccgttggcaggcatgggatccaggctggtagcatgaaccgagtgcagcctgccagcccaagtaggcagaatgagcccagcagacccgagcaaaactcaggcaagggcaccaccagccacagaggtttctggccagaaaagcgacaccccaaggatcctgcaacaatttttctcttattagaaaaattctgttgatttcactttctctattagcattgctcatttatttgcttccatttagagcaaaacttcttaaaagatttatctatatatgcggcctctcattcctctgtgtccattttctttggaatcattctggtaaggcattcatcttccgctacgtccgcactgttcttgccaaggtcgtcggtggctttcagattatttccagtggtcagcgtttgtcccttaccttacttgatctatcagcatcatttgactgttgatctctcccacgttcttggaaaacattattcacatagcttccaggacatatcactttctcttggttcttttcataccttactggccattctttacaatttcctttggttggtcctgttttccatgaccttgaaactttgaactgctccatgtccttggacctgttgtctatctgtacttgttcccttggtgatctcattctgtctcttggctttaaattctgtttatatgctgacgacagcttaatttatatctcaagctgagacttcttcccctgaactctaggctcatatatccagctgcctttaaaaaaatttttattgtgataaaataaatgtaacataaaatttatcattgtagccatttttaagtatacagttcagggtattatatacattcataatgttctgtaaccattatcaccattcatctccataactcttttcatcttgtaaagctgaaggtttttaaatattagacagtaactctccattttttcctccctccagtccctgccagactccattctttctgcctccatgattttggacccctgaaactacctcaaa

SEQ ID NO: 106221 - DNA, 1806 bp, Homo sapiens
atttttaaggatttgtaagtgataaataggtaggcttcttgtgcctcctgctatcctttctgtttttaaagagggagggttacccaagtgatgagaagcaaatttggacaaccatcaccactaattttagaatattttcatcatctcaaaaagaaaccttgtacccatcccattcctacctgccacttcagccttttgtaagcactcatgtactttttgtctgtatagctttgcctattctggatgtttcatataaaatgaatcattataatacatcagtcttttgtgactgacttcttttacttcacataatgttttaaacgttcattcatgttatagcatgttatcaatacttcacccctttattgccaaataatattcagttatatgaatgtctaccacatttgtttattcatttatcagttgatggatagttggattattttccctttttggctattatgaataatgccaacatttgtgtagaagtttttatgagaacatgtttttagttctcttggatgtatacctaggagtggaattgctgagttgtatactaactttatgtttaacattttgaggacctgacaaactctttttccaaagaggttgtaccgttttatgtagctgaattttaaatcacctagttttcagattctaatttcatatatattaaaggagaaccttagctgaaatgagtggtttgaattaataggggaaaaattcacttgcaatagttggcaaagctggaagcatttttttaaaaagtacatttggaattattactattaatatttggcccttttttgtttttgtttttttttgcagttttatcttcaagacactaaaagtagtaatggtacttttataaatagccagagattgagtcgaggctctgaagaaagtccaccatgtgaaattctttccggtgacattatccagtttggagtagacgtgacagagaatacacggaaaggtacgggtatggatcactttttttattacttgtcttttaaaggttatttaattttttattatcttacttgacattatgaaacattacatgcttgtgaaagcgatttaaatacagcattatatacagtgaaaagttaaaagtctcatactttccgtattgctcttctaaaattttaaattctgaagtgttatttagtagtttatattcttcatcacagtcagggaccagtcagctgcaatgacagcataccccaccaagacaagcttaaatcacaggatatttattattgatgatgagacttaatgagagatctggaggcagataggttcatttgttcagttgactcaatgagatcatcagggatccagggtcttactgtcttcctgttctactgtcttaaacattttagtttctcatgcttttggttgttgcttcatggtcataagatgatggctgcaagccccaggcatcattttcctcacaccagtatcctaggcaaaaaggatgaggcggggataaaatgccttcttgtgtggctctcttcttatgttgaaagaacaatcttttgcagaatcctcccagcagatttctccttaggtctcactggccacatgggtagatcgcatacatagttacctgcagctacaaagaagtctggtgaagttacttaatctcgtgaaagggagcaagaagatctatgattgacatagatcagttttgatttattccttcaggttgtgtgtacattgttaccccaaacaaaattagagctctcttagcaagaaagaagatggaaaggtagtagaggtaggcagctaatagtagctatc

SEQ ID NO: 106222 - DNA, 1030 bp, Homo sapiens
ttgttttttgagacaaggtctcactctgttggccaggctggagtgcagtggcacgatttcggttcactgcaagctctgcctcctgggttcttgccattctcctgcctcagcctccctagtagctgggactacaggcacccaccaccacgtccggctaatttttttgtatttttagtagagacaaggtttcactgtgttaaccaggatggtctctctctcctgacctcgtgatctgcctacctcggcctcccaaagtactgggattacaggcgtgagccactgtgcctggcccctaaatctcttttaaaccaagcatttcccaaactcatcagaccctcagatccttttttgtaacacttgctagcattttgggaaatgctgctatgtgtagttgattaatataagtattagaacaaaatattttcatcaggttgctttaattacttgcctgttgcaaatcaaaaggataacatgtctatgcatgtgtgtatctggttgtcatgagaatcacattaaaggcatcgttgactggactaaattgtgagcttagtcagacgtgggttatttttgtttttgttttttaaattgccttcaactgtgcagcaactctgtactgcccagtcaatattagcccttggttcatctcatagatttgcgcatcagctcatttgctgaactttcagggtaatgtgtctgaacaacagaattactgatgttgtatatcacaggttgtcacctctggaactagttttattctataacttgttctacctatttttcttttttaaaaaaacaactttctaccaaattaaagtgtaggtattgctggatcttcatgttgtattatgctcctgtatttattataggctatttatagtgaatgtcttgaggagccatcctctagaaactcatttatcataagagagagaaatccatctcttctgtcttttgcctgggaaaggagaaagctaggtggttcctacaaatagagatgaaccctaatgtcttaaaagtaagaaacatctttgca

SEQ ID NO: 106223 - DNA, 1023 bp, Homo sapiens
ttagtagagaggtttcaccatgttggccaggctggtctcaaactcctgacctcaggtgatccatccactttggcctcccaaagtaccgggattacaggcgtgagccaccatgcccggccaacattagctctattcttaaaattcagttttgttgagatataatttacgtataacacaattttacatgtacaattcagtgagttttgacaaatatatatggtctcataaccaccactcccctaatcatgatgtagtgtattctcatcagcctgcattagtttttaatcagagcttagtgaaataaataattctttgaactctggaaaatgtaatacagtatttgaagaataaagagaaataaaaaaccgtcaaccttcaagccagaaaacaattttttaaaattaaacccacatatagagaaactctgtacaagtgctactttcaggagttttgtctcttaaaatcttcaataggaaaaggaggaagtaagatgcaacagtgagaagctgtctacaaagggactgtactgatgtcattttgggggtggaggaagaaacaactatcaagaaaacaaaacaaaattttaaatattgaaatggaaacatgagacactagcaaacaattctgatacttaatagcagagaattgtggaagcagtttcacttgtctgaggtcttggttttctcacccataaaatgggggattgagtggcatttctcaactgtattatgcagaactttagagttttgtgaggtgtggttaggtgtgtaataggttggggaagggaagatttggaataagaactatattttaaatttgggaatagtcagaccttatgtttgatactggcagatggggaaaagtgtatttccccctcacaattttatttccatatattcaactgactttttattgactattattacagaattggagattaagacacttttcaaaatgattctatccttatttctaccttgaaattgtgattcgttatggacaagatgagtttctccagggtaa

SEQ ID NO: 106224 - DNA, 1120 bp, Homo sapiens
ttgaaaatggataattttttttttttttttttttgagacagagtctcactttgtcacccaggctggagtgcagtggcgcaatcttggctcactgcaacctccacctcctgagttcaagcgattcttatgcttcagcctcctgaggagctgggactaatggtgtgcgccaccacgcccagctaatttttttatatttttagtagagacagggtttcatcatgttgaccaggctggtcttgaactccagacctcaggtgatcctcccgcctcagcctcccaaagtgctggaattacaggcatgagccaccatgcctagccgaaaatggataaagagtactccttttctgtatagaaattcgtataatcaagtaattcatcatatccctcaaaaagtagtggctcctcaaagagcatttaatacattttggatttggaatttgtttttagaactatattgatgtgtacaaggtaggtttacatatttttgttttctaagaattttatacatttatgaaggattgaaaaatagttcacctttttttaattacatgaaggcaaatgtataaactttgtggtgtaagatattctggtgctctcatactctgtttcctctattgtccggatattagataaaacttctaaattttacttttcagtgtcatccatgcaccattaccaagtcctgttgacaaagtaagttgctaatgattattttttccaaactgactcagctatgttgctttgaaaatgtttgtttttaatatgctttacctagaaatttatttctcttttataacaaaatatgtagaatgcatatagctatatagttattataatcttctgatcttcaatatctggagaatctaagatggatgtttcttcagaaaaaggctttgttatctcagttaaattattcactgtgtaaactaggagtacctgttttgtgtctagccagggataaggagtattcgctgttactttttattctgagatacaagtctgtctagaaatttgtttaagtttctacctaaatagttcactcaacatttcccaatacagggaggtaatacagaaatacaggcttacaaaaattgttcttttattttctttgaaggttact

SEQ ID NO: 106225 - DNA, 2088 bp, Homo sapiens
cttaaaagcagaattagggccaggcatggtggctaatgcctgtaatcccaggactttgggaggcctaggcagaaggattctttgaggccaagagtttgagaccaacctgggcaataaagtgagacccctttaatttaaaaaaatttttttaattaaccaggtgtgatggcgtgcatctgtagtcccagctacttgggaggtggaggtgagaggattacttgagcccagggggtcgaggctgcagtgaactttgatggcaccactgcactccatcctaggcaacagagcaagaccctgtctgaagaaaagaagggcagaattaaacaacttatattttattttgcaaattcacaaatataggataaaaaaatggctggatgcaaatagaaaagaaatactgtcttttcaaaaaagaacaaaggattaaaagtagatcttatgaagaaagataaaagagtcaacattaaatctagagaaaagcctttgtacaagaggaatttttttgttcaagtatgaggaggttccaaaacagtttttaaaaatctgttttcaaatttttttggagacagggtctcgctctgtctctcaggctgaagtgcagtggcatgatcagaactcactacagcctcgaactcctgggctcaagtctttttcctgcctcaacctcccaaagtgctgggattataggtgtgagccgccatgccgagccccaaaacaattctttatccatagatgacttttgttttgttttattttattttattctgttttatttttgagatggagtctcactctgtagcccaagctggagtgcagtggtacaatctcagctcactacaacctctgcctcctgggcccaagcgattctcctgcctcagcctcctgagtggctgggactacaggcatccaccacccacagctggctaattttttgtattttagtagagacagggttttaccatgttgcccagggtggtctcaaactcctgagctcaggcaatacacccacttcagcctcccaaagtgttgggattacaggcatgagccatggcgcccggcccatagatgacttttaaataaaaaataactgggagagattttgattgcttaataatattaatagcaagtaattatatagcacttattatatgccaagcttcattctagcactttacctatattatttaattctcacaacagtcttacaaggtgcatattttattcctatttttacagatagagtaactgagaggcaggaagatttaataatttatacagtatcacatatcaagtatatggtagagctgggatttgaacctggacagccagacctcagattttctgctttgtgtaactactgtgctgtgctgctggattcacagaataatttcttggtgtagagcagatactgcttcaagttaatgccatatttaaagaaccgtataaatctttaaaaagcaaacaagtgttttgggttgtttttttttttttttctggtttttgtgggtttgggctagattatgtttcttattctggtgagggagcatggttaaagaaaactcctggatcaggagattagagactgaggtattttttgtttttgtttttttttttttgaaatggactttcgctctgtcacccacgctggagtgcactggcgcaatctaggctcattgcaacctccacctcccgggttcaagcagttctcctgccccagtctcccgagtagctggaattaaaagcatgtgccaccacacctggctaattttttgtatttttaatagagtagagtacatttttaggtttcaccatgttggccaggctggccttaaactcctgacctcaagtgatccatccaccttggcctcccaaagtgctgggattacaggtgtgagccaccgcaccaggcaagattgaggtttttatcttagttctgctactcaacccacttttgtgaccttgagtgagtcattttatgtgggtaggccttcagttgtcttttgtttcaaataatagaaccaaacctgtgatcctgggtccctatattcttttttgaggtggagtcttgctctgttgcccaggctggag

SEQ ID NO: 106226 - DNA, 1024 bp, Homo sapiens
agtcttttctgtatatgttcttattgaactgctaaagttctaatgtaaattgtgaacattttaagtaaaaactggaatagatgcattttataccttagaactaactaaaagaccattcctggacatattagatttctgttaggatatagttcatggagttaaactctaaatggaattgaattaaaaaggtgaaattacaccatctagtggaagtagattctaaagatatggttggttgatggttttgtttttcagtaaaactttttgcagcatctgagtgatttcctgaatgttaggaatgttttaggaacttaaacttggcaaatagtctcttaagtgaagctgtgttttaatatggattctgaggtgtatggctttttattagattctttaaccgatagctttattataacctatagcttatattaaaatgtagtacctctaagtagacaaaattttccgtagtcattatttatcaaggatgtggagagcaataaattaatgctttaaacctcaagtactatgtttgaagtgtatacttctctgttgaggtgtctcagaggcgttagggtcataagtgttcctctggataatgacaggaatagaacaaggtgaagaaggtatgccaaaaccacaactaagtgctatgagcatttcaccttgattctgagtaaaggagtctcgcttaacagctattaactgttaacaagccacctaaagtttagactttgtacaccaatgtctttctctgtaaaatatatctttgggctgggcacggtggctatgcctgtaatcccagcactttgggaggctaaggcgggcggatcacctgtggtcaggagttcgagaccagcctgaccgacatggagaaacccccgtctctactaaaaatacaaaaccagctgggcgtggtggcgcatgcctgtaatcccagctactcgggaggctgaggcaggagaatgacttggacccaggaggcggaggctgcggtgagccgagatcatgccactgcactccagcctgg

SEQ ID NO: 106227 - DNA, 1023 bp, Homo sapiens
cctatctgcagggaatatgttccatgacccccagtagatgcctgaaatcacagatagtaccaaaccctatatctactatgttttttcctatatatacacatacctatgataaagtttgacttataaattaagcatagtaagaaattaacaataataataaaatagaacaattacaacagtatactgttatgtgaataaaagttatgtgaatgtcaacattctgtctgtctctctcaaaatatcttgtactgcactataactgaaactgtggaaagggaaaccagagataagcggggactgctgtatgttttacaaagtactatcaagtttcactactttaaaatacatcaagtgggatgtaatatgaaaatattttagaatatgctgaaaattgatcactcctcaaaagaatcatgatgagcttattagaatctgttttgtgatttgtaatactaggaggccttacatcgggaacaaatgttggaacagaagttagccacgcttcagcggctactagccatcacccaagaggcttcagataccagttggcaggtattccagttgttttatatttaagaaacatttaaacatagtttaatattccatacatgttaaataaactaaaatgtagcaaacaaagacaaagttatttcctaactaatgaacaagttgttgaagatttagcattttacagtggatgctggtcagttttacgcttttatatcttttgttgtcagtagcaacctttttttatatacatgtgactttataattactcgggttttacttacatttaatttttcttcaataggctttaatagatgaagatagactcttatcacggttagaagttatgggaaaccaattacaggcatgctccaaagtaggtattaacctcaaatgtgtaaaatgaaatgcatagttttttatgtaacatcatttctttgactatcattttgagtatatgctaaaaacttcatacatttccacaattcttttaaatcttttgtgctgagaaacgtc

SEQ ID NO: 106228 - DNA, 1066 bp, Homo sapiens
tgtgattacagtgagttatgatcgcagaactgcgctccagccttggtgacaaagagagaccctgtctctaaaaaaacgaaaaaaggaaaaacaatggccattgttttttgtaactttggcatcaaaaaccaaataccacatgttctcatttataagtggaagctaagctataggtatgtaaaggcataaagagtgctataatggacattggagactcagaagttgggaaagtgagaggggagtgagggatgaaaaactccctattgaatacaatatacactactcaggtaatgagtgcactaaaaccccagacatcaccactacataattcatccatgtaaccaaaaaccacttgtatctctaaaggtattggaataaaaaaatttaaataaccctgaggtatgttttctacggggaaagcaagataagtgattttctccccttatttattagatttcagaataatgaattggtggtttttcatctaccaaagactggccatgaagtgttttctcactccacttagatttaaacatatttgatgtatttaaatctggtgcagttgtttttcttgttttagagacagggtcttgctatgttgcccaggctggtcttgaactcctgggctcacgcaatcctcccatctcggcctcccaaagtgccacggccagcctatttttcttattgatgctcaaattatcccatctttggtctgtgtaaatgtcttcagagtgatagcttcatgctgtcatttcagacaagatgtttcaggctcattttgtacttttcctgccccagacatgaagtctgcttttcccccatggtactcttattccttttgttttaaccattgtttcagaatgcttggtgcctttgaaggtaattgattatttttgcctacaaatgtgaatatggtggcttgcagaaaatatgacaaatataaaagtaactaattttgtatattttagggaaattctcaattgcctataactttttttttctataggaagtggaaattagtaagtttgtgaaggcataatttacttatgcaacttgtaaatacatc

SEQ ID NO: 106229 - DNA, 1006 bp, Homo sapiens
ttgtattgctacctcatcccatagtgcctgattcactgttgtgtgattaatttgatatataaagaaagttactaagtgtcttttaattttttattaaattgattgctggatattattaaacttgctttcaaggattgataggcttaaaatattttcacagctaaaagtcatacccattggcctttcaaaaatgtaattatataaaggcagcatccttttcctgcccctgctctccctccacttttatttttttgttgtttttgttaattcttagttatgttttctgttttagtgtgaattgaaattcttatgttatttgactcagctttatttaaagtccagggcagatgttgatttagaatagtccatagaattatactttttataaatttcatttagaaggaattctaaataacaaatatacacttattctaattaaattgcctgtaaacttgaatcgcagcgaagtctgagtaatactgaagatgaatgtacccatctgaaagaaatgaatgaaaggactcaggaagaattaagagaattagccaacaaatataatggagcagttaatgagattaaagatttatctgataaattaaaggtatgtatttactctgcctgaaagtatgttaagctaataatccctaacacactagatagcttaagattttaggtattgctttagctgggcgtggggtggcgggcgcctgtaatcccagcttctcaggaggctgaggtaggagaattgcttgaacccaggagacggaggttgcagcgagctgagatcacgtcactgcactccagcctgggcgacagagcgatactccatctcaaaggaaaaacaaacaaacaaacaaacaaaaaacagtttgggccaggcgcagtggctcacgcctgtaatcccagcactttgggaggccgaggcgggcagatcatgaggtcaagagattgagaccatcctggccaacatggtgaaaccccgtctctactaaaaatacaaaaatta

SEQ ID NO: 106230 - DNA, 1009 bp, Homo sapiens
atcaagcctttgtctttatcatctttactggtttagaaatgtcaggttagccgggcgcagtggctcatgcctgtaatcccagcactttgggaggccaaggtgggctgatcatctgaggtcaggcgttcgagaccagcctgaccaacatggagaaaccccgtctcttctaaaaatacaaaattagctgggtatggtggcgcatgcctgtaatcccagctacttgggaggctgaggcaggagaatcactcgaacccgggaggcggaggttgcctaggcaacaagagtgaaactccatctcaaaaaaaaaaagaaagaaagaaatgtcaggtttacagataatgttctgtagaacatttcttttctacagaacaaacttttcttagaagtttaagtgaataaaggcattcctggggctcgctcttaaaacagagttaggtttgttaaataactgaattttcttatttttctaggtagcagagggaaaacaagaggaaatccaacagaagggacaggctgagaaaaaagaattacaacataaaatagatgaaatggaagaaaaagaacaggagctccaggcaaaaatagaagctttgcaagctgataatgatttcaccaatgaaaggctaacagctttacaaggtaagtagctaatccagaaattgattttattttattttttttcttgttatctgtgaaatatcttttttttttttggacttttatttacagtacggttagaacatcttcaggagaaaactcttaaagaatgcagcagcttgggtaggtggcatccatatttcttacttaaacctgaattttatccttaaacttttgaccttgtttactgtctcacactgcattttttaagggatgttttatgtattaggtataaagtatctatattcttttagaaaattttctttaaaaatatgcttgattgccaccagtgggcaccattgttttccttgagatgagtgaaatttctgctctgagatcttctacctcggga

SEQ ID NO: 106231 - DNA, 1024 bp, Homo sapiens
tgtctctacaaaaaatacaaaaattagctgggcgtggtggcacgctactgtaatcccagctactctaggaggctgaggcaggaggatcacttgaacctgggaggcagaggttgcaatgagcccagatcgtgccactgcaccccaacctgggcaacagagtgagactcttgtctcaaaaaacaaaacaaaacaaaacagtcaatcagtcatcaccctcttgattttatattaataatgttagtattaacccaagctgggaacctgctattcattccttcagttaagagaatcgttttatgtacatggaaccatctttatactatttagagttgtaaaattactgattcatttttttccagttccagttggttcagatgaaaataatagtagactgttttcatattgtattaatataattgttaaagactccttgattttaagaataaatattttagatacttaaaggtaactccttgccataattattttttccttatttgtgtgcttgcttttttggtggtgatatattgagttacggtatgatagtgactaatagaatattttaaaagaaactaagcaataaatttctagatgtacacgaaaacttagttaagggtggactttggaataagatgcgtcacttaattccattccaaatcacttataataatgaaccaattttcaagtatcccagtattaccaatgtccatacccatattatataattttaactaaattattctttaaatagtagagagccaaatatagttgtaagagaatatttttaaatatctgaagatgttaaaattaataatactaatactttcagtgaatcccattttaaaaattaaatataatgtagctactaaaagcacaggttttgtactgtaaattttttgtgtgtcttatctaataagcataagctgaatgtatcttagagagtaaaggacagtgttgtccgaaataaacataaggctgggtgtggtggctcacacctataatcccagcactttgggaggccaag

SEQ ID NO: 106232 - DNA, 1593 bp, Homo sapiens
agtggttctctatctttttatattaatatcagattttatctaaaccagtttagtaaatattttaatgtagagttcagataaaagtgtgattgttagctttgtaagtaatggtaggatgtccctctttaataaatgtcatcttaagttctttgatattagtctgaaatatgtttcaaatatgttttgtaaagtcctttagttaagttaaaatatcattccaaatgagtttatatatatataacatgatgatgtagtttgagtttttaaagtgttaccatagctaaaatgggatttatgaaaaacaactttttatcctggcaattactattatactgagggctcccgttttgcttttcctggatccagttgtcaaattcttatttattagattttttttaaatttcaaatttctgttgctgttagtatttttttctttttgaggctatattgtatcactatatagtattctaggtatgtagtgcattggtctctccaaaacacaagttttatcaacctttttcctccatgtttttgtcttatactgatggtgatgatagatgagaggctctgcacaccatgtaacttattaaagcataatgataaattttagtatagaattaaagaaggtagccaacaggaaggatgtaaagagaggtaaggcatgatctaagtaggtagtgtctgcctctcatgcaaagttgagacgactgaggagtaacgtggcctgaggtggacgagaggggaaggaggtttttatagagagaatggtgccaactcatgtgtcccctttgacagattctaatgctttcacactttccaagtagtcattatgtcagaatatgtttttaacacttcaacttccaaaatagatttggtcattttgaaagatataaatacacgttaaaggacattatccagattcagaagtaactctttaaatcacaataaagattattgtaagaaaagaactgaaacttttatttaaccactatgttacatttttattgtctccattcatttctttaaatgaaaaataaattctgtttgacttgagcaaaaccatttaccaagctcttactttgaaatgaataggcactgattttggtcatttgggcagagataaacaatttaatgttttaatactgtatgaggtacagattaagtgactcaaaagggaagattatgaaatgaatatgtaaaacttattacatcaatttcttaaaaatcttatggtattactttatgatattcttaaagtatttaccttttgcctcttaactaagatgaatagctttgaagagggagtatgatagaacaatcacttgaaaattaatttaatttaataatgacaaacttaaattatttaagggtatttgttgagttctagtggacaaaaggtggaagaaccattttaaagcaatatatttatgtgattttcttgagctctttggataaaaactacacctttaaaagctaaccattcagtgtacaaattaataataattttcagtcatttaactccaaaatatgtctgctttagtatcaaaatatattaagcctttattagtcttacttagtacccatgttaatact

SEQ ID NO: 106233 - DNA, 1023 bp, Homo sapiens
atctgtttccatattcttgaaattggtccctttcactttgttttcagtctatctttgaattctaaatgcttttttccttcttttttttttttttttttttttaaacagagtctcgctccgttgcccaggctggagtgcaatggcgtgatctcgactcactgcaacctccacctcctgggttcgagcaattctcctgcctcagcctcccaagtagctaggattacaggcacccgctaccatacccggctaattttttttttaatgtatttttagtaaagatggggtttcaccatgttggccaggctggtctcaaactcctgacctcaggtgatccacctgccttggcctctcaaagggctgggattacaggcatgagccactgcacccggcctccttcttaaattttaggacaaatagcttctggaactgtttttatgaaaaggcacaacatcttctatagcaagagttactttaactgattaaattttgctgcagaaatgagtaaccttatgaaagtctgtattattaaaactgggaacctcacagagcctctcctatgaggttctatgtctctatttctgttttgttaattatttcagaagggaaataattttctggtttgaataccgattataacaatttgtgtattgatattctaatctcagtttcttcatcatattttctcttggtgatcttttaggtaatgttaactcatttctgtttatgatgtttagaattcaatcagagggatcttgatgtgaattctgatgcactctctcactggcagtatgattgtggacaatactgggcaaatttacctctttaaaccttgatttcctcatttataaagtgggatggcagtatctctcatagaattatgaaaattaattgagatcgtatttactaagtgctctaagtaatgcatgacacactgaaatgtacattagttagcaggcagaaaacatgttggagaggtgtagaagctgtgcataattaccagtatgcatgctatttaaaaaattt

SEQ ID NO: 106234 - DNA, 1035 bp, Homo sapiens
ccaactgacatacaggagtaaataaggggacacagaatagatatatcctcttcaatgaaacgtggaatatgaaaatatgactttaaattataaaaaagtagcattatacatttacagaaaatcccccataaaacaaaacaaaatttttttatttctttgaatagcttttctaaaatgattcatttactgaaatacattatataggcatctctgctgaattatgtcagcagagaacagtaaactatcgatataacttaatttttattacttcttcatttgaataaataccttttcataaatcttttattttaacttaatagccttgatctaaagaggattgctttatttcttctgagccctttttataaaaatatctaggcttttaaaataaggtgaaaataaaaggcaaattgtctgcctgcccctagttttctgcattaacgtgattgctccgtcatagttccagttctcttagttccccttccagattcaagtttttattcaagcttggtcataggagtaatgttatcatctttaaatttggtcatggaatgtgttacactgcccagctcagggaaatgctgctcagtttgggcttggatggtaacgtttattttccttggcagagaagctgatcgtcgaagggcatctaaccaaagcggtagaagaaacaaagctttcaaaaggtttgttttctgtttttctatgttttttgacagttcttttggataatgaaggttagtgtatattttcaaggttatagtattttaaccatcagtttacttcttatagctcacaaaatagcaagccagtaacagtatcagataatatataaaataatcagacttctgttttaagaagggtatcgtaactggaatgtgtctttttaagtggatgtatatttatggttttttgaatgttagtacttgatataggtttctttaggtattaaagatttgttgcaatctctgtcattcccagcattaatttcagctttgatctcaaattttaatcaaacacaatgtaagtcgtttg

SEQ ID NO: 106235 - DNA, 1019 bp, Homo sapiens
tgaaattcatcacccatttcacaagttaagccacaaattctgggggtattcttatatggaatagccataacaagttatattttaatgttgtattaaatattttgacagtaatggttttagatgtgtttctaatttctttcaaaatagaaaatatattttaatttccttgattttaaaacaatatatatatatatctacaaatttttcagtgtatgactatgtgaagttaaaaagtaaatgtccaccatgtccctatccccaaaaataactaatgatgtctctgttgtagatccttccagaccttgaataaatatatgcaattaaaaattcatagataaatgtataactatttttaatctacatggggtcatattatacatactgctctttattaggctttttacttagtagtaaatatatcttgaatagttttcattccataatatatgtatttcattttcccataatgaacaatacttcagtgagcattatgtatcgcatatgtgctgtgttacttcctttaggaaaagtactagaagtgggcatgcatgtacaaacagtgaaatcaggtctgtaacattataaaaatatatgctttataaatttataatctcactaaggaaagaagatatatacatatacacagaataatacaaaataaagtatgattaattgaggaaacaaaagacacaaagatacaattaaaaggagcaccatggtggagaaatgaagacttccttagagttgatgggacttaaactgtatattacagaatgaataggccaagtagagaaaatggctcttttgaggttagggaaatattgaatcaaacaaataattgcaggacataatgcaggcatgtattagccctataatgaagctagcatgaccagagcagagctcctgtgggaaataatgtagggaccagattacggctaaattctgctatgtaaagcttgactgaggccttgtggagaatggggagataggatttccatataggatttcattcagagaaa

SEQ ID NO: 106236 - DNA, 1521 bp, Homo sapiens
ttattttaagtggcacttttttataagaactgatcgtggtttttttttaagagttttattatttgagtacaaatcttactaaagcagccttcttactagtgtttttatgtaacagagccttctcctttaatcatctttatacagtgtctgcattgtcctgggaattgtactatatttgttgcagttctttgaatactttagcaaagcttgcttcgtttttgtttccagttggcaagtggacagccttgaacaaaagccccagccctcagcaaagcagacatgatccacattataatttaatatgagctacgtgtaataaccagcattccattttggacaagggtggtgaagaagtaagagattcagtgacctgacctattttaaaagtactttgcgtacctgtagattttgagcattcatagcctgaagcagttttattgatataagatatttaactgtaataagattttacttttatttttttcttggtagaaaatcagacaagagcaaaagaatctgatttttcagatactctgagtccaagcaaggaaaaaagcagtgacgacactacaggtgagttttaacctaatgtttacagacctgcagctgttaatggcagtttagttatataggtcaatgtgagtggagatttcaaagtatgtgtttggggaaaaaaaaaacgcttccatttatcaagtcatcccctttgaatgctggatattttgttaaaactactttcaactacccgaatataatagctgtatcaattccaattgtttgttttgataacaatagcttgctgatagatctgaatactgtctgtaattatatatgtatttttttcctctctgtagacgcccaaatggatgagcaagacctaaatgagcctcttgccaaagtgtcccttttaaaaggtactttaacatgtttttatgacatcgtaaaccagggtatcaaatcaccctttgccataaaatctgttctagatattatgtgaagttttaatttttagttaagagattaagataggttctgtaaagtagcagggactaaaaatttaaagttttggtgtttatacccaatatttcaaactattgttgaataatttggatcagtcaagattacgagggacaaagtgttaagtggtagaatatgaaatgcagctgtgttttttgtttacccttgtgtctctaataggaatttattagcgcttttaacataattagaataaggtgaaaatcttaactttcttgaaagactcaccggtttactctgttatcatatggtagcagttgtaaatttccttattttctggtcttcttcatcttctaataaatatccccaggttcttatgacactcttctagaaattttgggctaagaaactttaggtggatggccaggcatggtggctcacgcctgtaatctcagcactttgggaggctgaggcaggtggatcatctgaggtcaggagtttgagaccagcctgaccaacatggagaaaccctgtctctactaaaag

SEQ ID NO: 106237 - DNA, 1171 bp, Homo sapiens
gcggcctgatcacttgagcccaggagtttgagaccagcctgggcaacatggcaaaaccccatctctacaaaaattagccaggcatggtggtgcatgcctatagtctcagccactcagaaggctaaggtgggaggatcacttgagcccagacggcagaggttgcagtcagcccagatcgtgccactacactctagcctcggtgacagagcaagactctgtctcaaaaacaaaagcaaaaatctatcctctggatttaaggaatttcaaggcaaattagtgatagtacattttttaaaactttgtattttccttgtgcctcaacatccccacaaacaggccgtgaacactctgccctggcaaccagatgcaccagtatgataaggctggtccctgccacaagttccccttcataaccttccctggcagtgccctagtgaaatttaacgaaatcacctcatgccttttgtttgtgtatcctgacccccaatacaagcatttgcctacaggtcctcactctatcagttatacctatttggctgaacccattctttgggcttctcccatatggttccctgcatggtgtaccttgcctccctctctaggacctttgagtataataaatcctttaatttcatttacctctccaagtataattcccacagctatgttggagtgatccttgaggaccccacagggagacttactccctcccccatttaccacacagagagttatagatgataagctgattattggtggttgttgccatcagcagtcaaagaaaagagaatgcccagggtttttttgtttgtttgtttgtttcagaggatagagaagaaaggcattttgagtttcatgggacaagagtcatttgaaatgactctataaatagtgtgtcttaccatatgtgatatattcagtgattaagaaaaactaaacctaaatctgatcaagactctagctccaactgccagtttgcaggacatacaaagaactaggcacatattctaaatgatgtgatggggatacaaccagcaaaatccagaatgtggaagattctacaggacatacaacccagtttctttagcaattaaattagaaggggaaaaaaaggaaaggggatgggggaaatcctataaattaaaagagatttaagagttatgtcggccag

SEQ ID NO: 106238 - DNA, 1056 bp, Homo sapiens
tgtgctaaaatttagctgttacttgaagaaaagtttctttttgttttccatatccagttaagttccaagtgaaatttttctgactggttatcaagaaatttcaaaattgatgaagaagtatagcattttgctcatctcactgaatttcaagtcttaataagcaatgagttataatctgtcactgtctgtttattttgatgctagaattgtgaatatataatttatgttaatatatttttataatgtcatcaccatgattactaatatatataactgtatttgtattttctcccaactactaaaatgcttactataatttgcttctaagttttatttaactcagttgttctatgttgtttatgcatgtgcaaacatgagagagattaccagtcttttattgtagattatagtgtgatactaactcttgcttttaaaataaacatgtttttgtcagatgacttgcagggtgcacagtcagaaattgaggcaaagcaagaaatacagcatcttcgaaaggaattgatcgaagcccaggagctagctagaacaagtaaacaaaaatgctttgaacttcaaggtgagatcaagattactttggttctttagggatgtgtggaggcagcacaatataattgggtggccccaaacttggagtccggaggcatgttccagattcacaactttatgagatatgtgatcttggtatatttacttgacctctctaaacttgtgtttcaggtcagtaaaatgaggagagttacagttgctctaccttcacactgttgatgtgaaaatcaagtaagatctttactaactgaaagatcttaatagttaattgcatattaagtacaacagaaggaaaactcaaatttctaaatttttattatgcctaatgttagctaatgtcctggccacattcttttctagtagctcacttatctataggtcataagccagtggagtctgtgcagttccctagagcttacatttctgtatcattcatagtaactacctggttgcagacaattagtatctcaaagagtcttaaaatgagaa

SEQ ID NO: 106239 - DNA, 1061 bp, Homo sapiens
tatatatactataactatttttttgttgaaagagtttcatcaacagaaggatagggaacactgcatttattgtgatcactccctatttaatgtttgtttttacatgtttataaatgcataggaaaaaatccagaaggaatatcagaagtaattttctgtgtgttggggagatgaagatcactttggtttttttttcctctttgctatctgtattttgacgctttctgcatcaaacgtggattgtttatacactttaatcaaaagcaacagctctgacaacccaggttatgcattagctacaatcctgtatggattattcttttattctaatgggccaagaaaatgatggatatacttttgcagcccaattgcagaggttacacatcgatactgagaatctccgggaggagaaggacagtgaaatcacaagtactagagatgaattgcttagtgcccgagatgaaattttgctccttcatcaagcagcagcaaaggttgcctctgagcgggacactgacattgcttctttacaagaagagcttaagaaggtgagagctgagcttgagcggtggcggaaagcagcgtctgaatatgagaaagaaatcacaagtctgcaaaacagttttcagcttagatgtcaacagtgtgaggaccagcagagagaagaagcaacaaggttgcaaggtgaataaatgtattttacataaagctgttaacttttgacaatgataacttcttaacttgtttaaaaaagaaacatgcaggctttttttttctttgttagctatcagttgtataaaccaatgtttttaaatcggagctaaaaatgtattttcaggtctgcaagttctacttaaatttatatttttttacggttttatattttattttaaaattgttaaaaattgcttgtcttataaaagtgaagtggaaaaaaatactattgttcaagtacaagctgatagcagtccttgaggtatacatgcaaagtaacaggaatcatataattaaccatgtaaaatctacttgcttttaagggggcaaaaagtatgttctcctct

SEQ ID NO: 106240 - DNA, 2058 bp, Homo sapiens
aaattcacctcatagccaggcagccagccaaacacatgttctgtggccttttactttcttcctcccacccccttttcaccttattcataaatgtgcatgctcacttttcatgtcattctgcttaaaaccttgagttgagtggctttttaaaaatttgtgttgaagtcataacagttgattttggaacagaaaccctacccagtttcttcctgagcaagagaggtgcatttcacttcccaaagccttgaagttgacagcagggcagtaagagctgtcttcagtcctgctggcctcataccactccctgcattgactcctggccagctcggggaatggagaagcctgatacaacttgatctacagattagggaccaccccagttgtagactttcttaaaaggattctttatgaattagaaggaagttgaagacaactctttgtctttaataatgaactttcccaaagttgtttctagaagatctgcttaatcaatgcagtttttctttgcacttttctttccttgtagtgtcctgaatttggcaatgattgttcttctgtcttcatgtttgttcctaatgaaaaaatactgtaacattttttattttcttgcggacatactgattttgtgatgtgttcgtttttaccttactaaagatatgtgttttagaagaaatctcattttatttggttggaacacaaattttgtgccaaagtaaatatcttagtatttaatactgtaagcactttgtgtccttccagtccatatgccataattctttcaaactctgggaagaatgctgtggttggaagattattctgttgtatgttactatgaacgcattagtcattttgttgcattacttgtttgcctgtttttggtcactgagtaatcggtgcaagatgctttaactgtttccacaaatggcagtggcatgttgtcacagcatctaaattgttgatagtcttggattgcattaaatgcagcacatttaaaaatatgtctgatcttgtcagtatgtttcttttctattttcttgttcactgttttccattgtgaaatgatgtgtagtcatcacactcctttgtaatgtgaaattgctctctttctgtttgtccagatgttaacatgttggatactatatactatagtttagttatagctatatactataactaaaatgttctttaatgaggttcttatctctgtgtaatccactgcaaatgaattattgccttttattgatgcacatatattccccttcagcatttcccctttgttctcctctctgtcatagaatcatgcttaatatgcacagtgtctaattatgtattttcagcactgtaacagactaaaatattacaagctaagcaagcccacatatgattctttttatgaagaagaaccaaaggtgttggtaatattgtgtggtatttccctcttaatcaggaccaagctcatttgtcacctcagagttagaaagcaagatggagcaaaaatgatagccaagcaaggctgcaataggtcacctttgttgcacaaattaaaatttatatatgtggcagcttttatgtgaatatttaacaaagaaaaagtacatgcaaaaagtaaatcttggctgggcgccgtggctcacgcctgtaatcccagcacttttagaggccaaggcgggcagctcacctgaggtcaggagttcaagcccagcctgaccaatatgatgaaaccccgtctatactaaaaatacaaaaattagccaggcatgatggcatgcgcctgtaatcccagctactcaggaggctgagacaggagaatcgcttgaacccgggaggcggaggttgtggtgagctgagatcaggccattgcactccagcctgggcaacaagagcaaaactccatctcagaaaaaaaaaaaagtaaatcttaatcctcagtattaaaagaaaataatgatatatcatctttatatttgactttagaaagcatcactatattttaatttagtaggaatatctgtaatttaagaatttataggccaggtgcagtggctcactcctgtaatc

SEQ ID NO: 106241 - DNA, 4397 bp, Homo sapiens
catgagccactgcattcggcctgctctgtcttcatgtgctatatttcattagaatgttaggtacacccacattgcccattgccttcagctgtttctttctctttttttttttttttcaacggagtctctctctgtcacccagcttggagtgcagtggcactctcagctcactgcaacctctgcctcctggttcaagcaattctcctgccttaacctccagagtagctgggattacaggcatgcaccaccatgcctggctaacttttgtatttttagtagagacagcatttcaccatgttggccaggctggtctcaaactcctgacctcaggtgatccacctgcctcagcctcccaaagtgctgggattacaggcattgagcctaacggttcctagctattccttttaaactgatagtttcccaacttgcataccacagtctatcagattgtgttagatgtctttaaaatgtttgaatctgtgtaaaacctgagtggtatacttctattatttcattctttcttcctacctcccaccctactggggtctgaatcctcttatctgattactttcatagcataaaatgattttaatatgccttcccttctttagccttccatattacaacccgtcccagccgtattcatcggcctattcctggctttcctgttttggtgtttcggtccattgtggtagagaaaggtacaagcactattgttgagtccttgtctgtttgtccccgtcacctttttgtgccatatttgtaatatagtgcatggcaagaacacacaggtattttgttacctgaagcaaacccttcatttagtatgccgtgtatttgtgtcataccaatgaactgaacagtcaactaatcccataactttttgtcttgtttactttgtagtaatgctaaccatgagttaattccaacctaaccagttgttaatatgcttccattaactgagtctttatctctagcaaactggagtgcactatgaatttctgcaatattagtaccctctttccaattatgtgtttaatcagatttgaatgagaaatgaagagtttgcctccttgaagttttcagccagccttcttccccttcctccttatcctcttccttttcatagtgtagattttctttgtttcaaccctttgcctgtttatactatggctatgaagatgaaaaataatgagattaacataatgaaccattggctcacaatctcaaccctattgtgtacttgcaaggatataaatgtatcccatttctttctgagccctgacctgcaacatcagaatatttctttaaaaaccagtttttctcaataacacttctggaatacaagtaaaaataaaagtgtcaaccaaagcaagttgatcttataaagccctctaaaagctagcaggcaacagcccatccatgcttgtttctaactggcatgcatgttagtagagcatatgcggtgatcatgtggctttattacactgaacagagtctataccagaattatcagacaggcaggatccctaatgttacttttccatcttgaaccctgtttgattttgtcttctgtggtttcaagttggacgaccaaagcctagaccattatcaccttagccactatccccttgcataaaatatcccaacatgtgagtctggttcttatcaagaaataaacattttaggcagaaacatactacaggtgtctatatacatcagttatattggaatatatggataccagagtaaataaagcaggcagagcccacaaattttcttagaagtcactattaggtttcaactgtaacaaagttgaaaacttcccaggactttcttgggacgtgttagacttccaaattggtgttcctgctattatgactcttcttatacctgcactccctcacttttttttttcttttcaaactttatatttatgatgcagaaataagatttttccaatattctgttaagtattcaggactctctggaaccaaggggttaataggtatgaaaagagaggggagaatgtgatattgactcttggtttctttccacacagaaaccctggccctggatgcccatgttggctgccctggttgcagtaacagccatcgtgctgtacgtgccaggtctggccagagcttctccatgagagcgttccttgagtccgtacaccgtcctccctctagaagctggcatcacactcatgctggggacaaacagaaccattttcttcctctttacctcttaaaacagcagaagtacaagaatacagctgtagggtcattgctttaaattatataaaatgtatctgtctataaagaagatataaaattgtgactttattctactgtaagcaataatttgcttgcaatttttcatgtaatttttaaattagtatgttaagattctgaatattatggtggcctaaagtaggcttcttggtacaccagattatttataacattaaatttatgagtattttactctgaattctgatcaccagataattcatttttctgatttgataactacccaaaccaaacaaccaatacatacatgggaagagaggccctgtgtgctcagtgcctatcagtttgaaatatatacacatatatatattttttacatatttacgccatttttacttgttatgaaaccactgagctattgggaacaagacttagagacaactatttgcgtggatttttttttttttaaggaaaaatacgtttggaaaataaactgttatggtgataatttggggaatatgtgcacgcttgttcagccttaatgtgacttgaagatgtggaggacatcaactttgaaaaactttccatgagagtgtattttcttgagcaaactgaagtatttctgggagcaaaaacatagtaattacacaatttcagtgcagtcaaccaaaatgttgagtcaattggaatgtaatttattaaaccatgtatttaaagagatatttttctttaaaagccaagttactttctcatatacagcattttaggaagcatgattttttttttctatcatctattcctccaagcatgtttaattgaagaaagtattaatatctctttagataagcttgtattgacctaatttggtttatgatgtgtcagagctaattcatgttcagggtgagcgttgtacctaccaacaaatttcctggttgggtatgcaaatggttattttctttttattgttgttaattgggactttctgttaatgaaaagcactattcccaagattaatagtgttctatgcacaatgaagcacctaaaaacactgcttgatattataaatttaaaacacaagtgaaagtttagccatggttttgtgcggcatcatagttatgtcaataaagtttatttaggtcatagaatatcctaaagtatcacatagttaaatttttcagtcagtgaagaccgggagggaatgtcagtgaattggcttgaatgttctgtggcaatccacaggtctagccaaatattgaaataggagtttagggtataatttgccttgtgatgtttggcagtcactgtttatactttaaaggttatattttaagctatttgagattgcttttgggaagatcactagatttatggaggaattagtcacaaatgacttgtagaaaatactgtcatatagttcatttcatcattttctgttgcaggaagccactccaccacagaatgctaatatgccagtggtacccagtacctcttgtatataggttattgcaaatattgttctgaaatgcttaacttcagaattacattttttaaagtaaataattgttttaaatctattttgtaaagatataaagtacaatagaatttctggagtacagattaaactatttgcactaacacacgtgacgtgcatgatttaataaaataactttactctccctacgcatgtttgagttgaatatcattgaagttcttaatgctgactctactattgggttgttaatagtcttctcttgacatgactctttatgcaacataacatacatttggtattcttcagggtttaaaagaaaacactgagctgtttcctccaagttttattaaccttttatttaacttactgctttatttttttctcttttaatatggttattgttaaaatgagagtcacttgctagactggtctctttaaatgtaaggtctagtatcaatatttacttcattcaagtggaataaatggctttttgtagttacttccagttttcctcaagaatagaaataagtctgttcataagcaataccttcagttttgttcagttcacttccacgttaaataaagaataggattattcactggtaataatagagtcattaagaaatattaagcattgcagctaaaaattg

SEQ ID NO: 106242 - DNA, 1002 bp, Homo sapiens
ttatgagattctgtaagcacctcggtttcagatgtctgactctgaggggatgggtcagtaaatgacattctgtatagcaagggcctggccacagctaggagcagtgacacagataagtagcttctggtctcatgaaaaagtaagatgtcaaatgacaataaaatcgagtgcagagtacataatcatttcaattaggtggaagttatctttcaggagaggctgcaggaaactgtaaatcactgagataaagtggaaggcctgtgagtagcatgttttgttacatgtaaaagaaaaactaaaagatgagactgtgagcttttgggaatgcagtttccaggatcctgaagccaaccacatataggtggcaaagaccccgtcgccctttcctggtcagggagggaagggccgtttgactttctagaattgtctccctggattgagggtgtttgcagttaattgttttgtggaaataagagcagagcaaacaccccacccagggcagggacaggatgtagattcctcaggcctgaactgtcaggctcgaggccacacacttgtggatgccccacaccctggtgctactcacagcctgcaggatgaacgctgtccctcagcctggtacctgtctgtccgtccgtccatccatccatccatccatccatccatccatccatccatccactagcttatttcctttattcactcagcgtttattgtgtgcctgagcttgtggcaggtgcagggatatggctgtggttgagatggatacagatcctctgcatggagtggaaggtctggtacagaactaaccaggtgtggggcatgcatctgtgctccagcaatgccctgagatctccatgtacttccccaccctggggagcagggcagctttgtggaggaggcaaagaccaagctaagcaggagtgagctaggcttggggggctcaggggaaaaaaggggacactccaggtgaatggggacaagaaaaggctcacagaccag

SEQ ID NO: 106243 - DNA, 1065 bp, Homo sapiens
agtcccactgaggcccgacccattctgtccggctcccagcccccgcgggtccccccaccccggggctgaccgggtgattcaggcagccctacatcctgctggggtggtgggcttcgagcgcgggtcccaggacgcagtggggcgcagtgcctgcggcaggcggcaggaggcgagcgtggcccaggaactcccgcgggagggtcgggacggggcggggcttgggggcggggcggctcagcgcgcaggcgcggggccaggcgcctcgcgcggccaggggcgggcggccgcagagcagcaccggccgtggctccggtagcagcaagttcgaaccccgctcccgctccgcttcggttctcgctccttcggcccttgggcctccaaacaccagtccccggcagctcgttgcgcattgcgctctccccgccaccaggatgccggtaaccgagaaggatctagctgaggacgcgccttggaagaagatccagcagaacacgttcacacgctggtgcaacgagcacctcaagtgcgtgaacaaacgcatcggcaacctgcagaccgacctgagcgacgggctgcggctcatcgcgctgctcgaggtgctcagccagaagcgcatgtaccgcaagtaccatcagcggcccacctttcgccagatgcagctcgagaatgtgtccgtggcgctcgagttcctggaccgtgagagcatcaagctcgtgtccatcggtgagttctctggccgggcccaggcgcccactgtggtgccgacccgcccccgcgcgtgcacccctgcggagggcgaggatttcccgcagcgcgcccccacctcggagataagggggagtcgtccccaggggtgggttatagggggcctagaccccctccccggtgtcttcccctgggatgggacctgttgtgatcgctccccgccatccgccccagcagtgcacctttggctggctaagggttgagggtttgggctggggtcacaggaggagaggtggagttgttgcatttctctacacctggggcgcccctatgggagctaggggactagaaaccctcgtt

SEQ ID NO: 106244 - DNA, 2165 bp, Homo sapiens
gagcccaactagcgtccactgtgtaccgtcagccttctaagttatctccgtccctacgcatcctgccatctggggtgaggctagacccattttacagataagggggtccggagggttaattgacctgtccaaggtcagcaagtagggcccagctgagaactgaaggaagtgggcaacagttagaaggaggctttgttttcctctcctctcccaaacctacaccagggtcttcctgaaaggagggagggaattggtgtctcttgctggactgggccttctggtctggggaggaagaataaggatgaagtctcccttgtggtctgagatagttggaggcttcccagagggccacaaggctactgatagtgtgggctgtgatggtaggggctgtgatgtgtgtgtgcatgtgggcgtttgtgcagagaacgtgtgtacacacatagcatgtgtgtatagcatgtgcatatgcaaagagtttgcatgtacacggaatgtatgcagagaatgtgtatccacctacacgtgtgtatgggtgtgtgtatgtgtgtgtgtgtatgtgggtgggtgggtgtgggttggggcagaggagggttctgggtctggatctcttcctaaggagaaccagggactggccctggcctgtgatttgggtctcttcctgaggaaaccaggtcactatagtgaccctagtgacaggaagaaagggagatgggtgtggctgccaggactttctccagtggaaaagggattccctctaggctgagcctcccctgggccttagggcctcacccttcccttcccccacacctgtcctggcaggtaaggctgcttcctgcttcctgggcccagatggcagccgcaccacccagctgatctccagcagccctccccctccccaagggtggcttccctgcagaagaatctgcatggcacgctgttgtcttctttctggggtccatctcctgtactggggagggagaacctcagaatctcctggaattctttaccattcagaaaccagcctcccctctgaagaatcccaaggcccagctgggctcaatttggatctgttctttgttttaaaaatgtgtatttatttaattaactgaataaagaaacttaaagtaaaccagaagtatccaaatacgacatgaaatctctaaaacaacaacaaaaccaaaccaaaccgcagcactagcaaatcacagactgcctgatctacccactgtttacagaggcagcagctacttccagcactgtctctcatcagtgcccggggctgtgggtctcattctagattttgtctacatttttttacatggttctcctgattccctgctccccctccccaccaccgccccgcctggagatggagccttgctctgtctccaggctggagtacaatggtgccatctctgctcactgcaacctccacctcccgggttcaagcgattcttctgcctcagcctcctgagtagctagaattacaggcacatgccaccacgcccggctaatttttgtattcttagtagagatggggtttcaccatgttggccaggctggtctcgaactcttgacctcatgatatgcccgcctcggcctcccaagtgcgggggttacagccctgagccaccgcgcccagcccggtcctccttttattttcgaatccactcaggccctagctactcccattgtcccgacgttccagggttagttagcttcccttcctctgtgctgggcctgtgggctgttggcagcttcttcctgttcctaccacaacttgcattctatttttttcctttttaatgatttcttggatcatattccccagagtgacattcctgggttaaagggtgtgaccacatttatgacttgtatcattggctgcctaattgctctcccgagagatcttgcaacaaacaggttttccagcctctggagaccacagagagccctggcaagtgccaggactgctgtggggataaagcaggaggcttcttccctaagctcttgaggctgttgtgggtaatggtccttcatccttcaaggcaaagttacctccagcttggactaaggttcatatattcactgcttaggttgtgttacattgtgctgacaatgacactagcttcaatttgggggcacctactgggtgttaagtgtgt

SEQ ID NO: 106245 - DNA, 1048 bp, Homo sapiens
ggcatgtgttgcttagaaaatggcgcctgttaattaaataaggtgctgtctaataattatctcaaaagtaatgccagggctggatgccgtggctcacgcctgtaatcccagcactttaggaggccaaggtgggtggatcacctgaggtcaggagttcgagaccagcctggacaacatggtgaaaccctagctctactaaaaatacaaaaattagctgggcatggtggtgcacacctgtagtcccagctactcgggaggctgaggcaggagaattgcttgaacccgggaggtggaggttgcagtgagccgaggtctttgtgtaactgcactccagcctgggagagcgagactctgactcaaaaaaaaaaaaaaaaaaaaaagtcatgcccgaatggtttgcacaccgaagggacgttcaaaattaggggagaacagcctggttgtttgtttctgtttggttgatcatactcttgccatggttagtattattatctttatttaaagatgggaaacaggagtgaagccacttgtggaggtgacccagctagctagtaaatggtgtctgaaacccaggtctgcccagctgttgaattggagccttaactgacttgccttccagtttcagagatgagtaaaatacagcttttctctccacatcagagggtccctgcaacactaggtttgcaagtcttaggtgttagggtggtggctggatacccacactctgaacctctgaccttggacaaaatagggatgtcagggccttccatgattggcaggatgaatcctctgggctgtgatgaaggtctcacaagttgagagtcagccgggaattaagtgggatcagtttgcctcttgtgttttcctcattgtgttttggttggttggttgagatttcctactacccaatggatgatgttttattccatcgtcagggaaggtatcattgaatgaatacagggttttgtatgctttggataagaccagacagttgtggagtcattagaattgtgtacatgcctccagctctgagataggtggtgtttca

SEQ ID NO: 106246 - DNA, 1034 bp, Homo sapiens
tggagtgcagtggcgctatctcagctcactgcaacctccgcctcccgggttcaagagattctcctgcctcagcctcccaagtagctgggattacaggcatgcgccatcacacctggataatttttttgcatttttagtagagatgaggtttctccatgttggtcaggctggtctcgaactcccgatctcaggtgatccgcccgctttggcctctcaaagtgctgggattgcaggtgtgagccatcgcgcctggccagtgtcaggatttattctgtgggaggggaggaggacaaagaaaaatactgagctatgtttgaagctcctgccctctaagagccttagagcagctgacttaaatgtgttcctttgataaactgtagatggttgttgtaactcttctgcaaactgtttatttttaaaaacaatttgatgagattttacttatgcccattgtttgagtacagcatttaccaaagaacaattttggccagatcccatgcagtagaatgcccttggccaaaattttcttgtactataagcaaagaagcagtttggtttttcacttaggcaagactgcctatcagactgagttattgtgacagagccgctgactctctccctttccccattatcaaaatctggcttttctaagcagcgcatgtaaaaagcttggcaaggaggacccttgtcctcctacatattattctttggctcttcttggtaccaagaatacatacaaataatgctggctgtgtactgaatgttgaggtgtgcactgttgaggatattcatcctctaatataacatctagtatttctcacaccttccgtctgctgagcattggtctatcttacttatactacttctaatcctcgtgaactctgcaaaactagtggctttacatctatgagaaaagaaaagaacttttatcggaagaaggtgagtccttttaaagtatcaggcctggaaagacattaaatgagacagcgaacacatcctgctaccctctttgagctatgtattcattgactttt

SEQ ID NO: 106247 - DNA, 1049 bp, Homo sapiens
tgggttgtgtttgctggtgagcccagcaactgcacccttctttccaggcctagcacccagcctttatcagtctcatggccctggcacaagtgggcagcctgcttccaatccaagcaggcagctttccgctcatctgcaggtagcctcgtgctgtggcagcacaaagttgtgtgagccagagctgaacttgtgatccccacgggcatctcctgaggcgcacctctcctgagagagaaagctggtccgtccagcccattcagggctcagcctccccagccgtcgcagggctggcttgctgaaaggtctgggtgttaacacagcactcctgttctctctctctgaaggccctttatgctggcatgaattccttttctcatagagatctgaaagctcttttgactaaatgggtcacctttctgagtattttcataaggctgtcagcctttaccatgccagacaagttttctggaatttcctttccagaaaaaaaaaaaaaaaaggctactaaagaggttggagttatttggaacacagggtggaattctggcattcgaactatagggaaacgggtggggatttgtggcaggcactatgtaaatttgccgcaagcccataaattcagactttaagatgaaagatggcaagcagcagtcagctttccttcaacaggcaggaacggtgctaccttccgcctgtgctgagtgtgactgagggagaggcaggcctcctagggaggccggggcaggaaaggtttcttggtggctaaaataggatttctcagtttcccccgtgtcccaagaaaataagttcttatcatgcttgtaccacacttcttgtgcgtatcaccctggtttccctgcacctccttgaagtggtttatcagattccagggacacaagaatggtttggcatctacagcctattgtgggagcaggggcccggcctggtgcttcttgcccaggaacaaactgattgttcccttggtgtggggtaaagcaggccagagtatgggaccaggccctgcctcccaggggacctgaggtgcaagg

SEQ ID NO: 106248 - DNA, 1031 bp, Homo sapiens
cctcccaaagtgctgggattacaggagtgagcccctgtgcccagcctgaaattcaattctaataaatttttattggagcattaaaaagttacatctgtagttgttactctttgcaaaaaattgcaagaacacagaaaaatataaagaaaaaaatcacctgtgaagaattttaatgaatctttttctacttttaggggattttgcttacagctgccttttaatcagaatagggaagaaagagattcctttctcaggaaaaaagtgactgtggactggaaatgctttgtgaaataattttggtcatactgatggttataacaagattcgtcttcaattgagttattgctgagctttgtccaacattaaaatgaaaggtctcatttgagtctcattgtggtttgcaagtctcccttggtctagaaatatgtttggtcaaccacggcatggaggtgttccagccactttctgtctcttaaaagtttttaggacctacttttattgggactgccagggtctcttaataatagttattatacttggtaactattgtgaccttgtctcataggcagcccagcatagaaactcatttagcttttagttgctcagctccattagctgtttaaacatgtttcagatgtgagcctgacaatgtacttgggcagcttggttcacccttgactgcctgggaactttgagaagtctgaaaattatatgtagccctaaggtcttcatggtattgtttttttggaggcaccatttcccaatagccctgaggacaccaggcccatgaagccatcctgtctcagccaggaggcagaggagatggaatggaaaccacttctggatacagatccagccacttccggagtgcttcagagcatgggtcagatagaccttgctgctttctagctggcagacttggggaaggttgtttgacctctctgagtttgtgtcccagactatagcagtacccccttactggcgttatcgaagataaaatgatataatcctgataaatcacttgacccagt

SEQ ID NO: 106249 - DNA, 1009 bp, Homo sapiens
aagttttcagatttatttttactttgcctggtgtgttttttcctggaaagccaacttctacatttggagattaaaagacaaactttctcaaactccctgtacctaagtggttgctgcttttcttaaatgttttgacaccaaagagaaaaattggtttctggaagaaagtgtgttttcttttattgccaagaaaattagtgcatgttaattaatatagatgctcaggacccagagttgtaatgaacttttttcttatatttattttctagatgtttgacttattttaacagttttcattttagcaataatgtttccttcccactcccaaatttattggaaaccctcaatcaaccctatttatttatttattttagagatgggatctcactatgttgtccaggctggtctggaaaccctcactcttatagatagtatgaaagaagattatagccaactcttatataaccttccccagagcctccaattgttaatgttttgccatatttgcttgctctatcacttgctctaaagatgcatatcacacactttttttttttttaatttatttttgagacagagtctggctctgtcgcccaggctgtagtgcagtggcatgatcttggcttactgcatcctctgcctcctgggttcaagcgattctcctgccttagtctcctgagtagctgggattacaggcacgggccaccatgcccagctaatttttgtatttttagtagagatggggttggccaagctggtcgtgaactattgacctcaagtgatcctcctgcctcagcctcccaaagtgctaggattacaggagtgagccaccatgcctggccacatgcgtgttttttattgaatcatttgaaagtactcagctcgtatcatgacccttcacccccacatactccaacaagcatctctaagaaaaaggacattctcctaaccacagtgtctctgcattcccaggacattcttctaaccacagcgtcactgcatacccaag

SEQ ID NO: 106250 - DNA, 1063 bp, Homo sapiens
tgggatgcagtcactcctttttgttgtgtatatttgtgaaatgatttctttcaatttttgagacagggtctcactctgttgcccaggctggagtgcagtggcgtgacgtcagctctctgcaactttcacttcccgggctcaagcgatcctccaacctcagtctcctgagtagctgggactacaggagtgagccaccatgctcggctaattttttttttttttttgggtagagagggagttttgccatgttgcccaggctggtcttgaactcctaagctcaaagcaatcctcctgcctcggcctcccaaaagtgctggggttacaggagtgtgccactgcacctggccattattatggaaaattttaggcgtatacaaaagtagagacagtggtgtcttacatgctcatgaacccatgatccagtgacatccgttaatggcattttggaatcatatttcatctgtttttgtcctcaaatgttttgaagcaaatttcagcattacatcatttcactcttaaatatctcagtatggttctctaatagttgaagactccatttacatttatataaggagcataatttacacttgtgtaacccaaaggaatgaccaagcctgtgcttctctccccagatagcaaagccattgtggatgggaacctgaagctcatcttgggtctggtgtggacgctgatcctccactactccatctccatgcccgtgtgggaggatgaaggggatgatgatgccaagaagcagacgccaaagcagaggctgctggggtggattcagaacaagatcccctacttgcccatcaccaactttaaccagaactggcaagacggcaaagccctgggagccctggtagacagctgtgctccaggtaagtggccagggctgcctaaaccatctgtccaggatgggggtgtgtgggtcccaaacattctggttttcaacgggaatgctatctttgctttgattagcgtatttctccaggtcttagcccattataagcccattataaggaaactaaaactggctctgtgtacccttccaagggcagat

SEQ ID NO: 106251 - DNA, 1043 bp, Homo sapiens
atttacatgttatttcttttttatttaccttttttaattagtagagttaatacagatacagaccatgagtatacaagcaaaggaaaaagctggttaacctgtgcacttttttgtaacatgctctaatcccatgtgtgcttgtttcttcattttcctgccttgctatagcttatccttttatcatttttgaaattttgaccagaggagtaaatggacttttggggaatggggaggacaatgaacttttggaagttacatgcagaattttttggagaggggcccctagctttcaaaggggtctgcaatttctcaaaaatggttaaaaacactgatattggtgtgttggtttaaagtaatttcacttaattgagaagctgactcagtttcttaatatttgtagtgcttggtttaagaggcatttgcaaacacttcaatagttgcaaagtgatgtgttctgggtgttcatccaccatgtcattatcctaggtcatcactcctgaagaaatcattcacccggatgtggacgagcactcagttatgacttacctgtcccagttccccaaagccaagctcaagccgggggctcctctcaaacccaaactcaacccgaagaaagccagggcctatggcagaggtgagtgctggtcctctggtgttgtattggagacatgtcctctggtgttggagatgatttcatggcttcaagagtgatgttcttagaatcaaaaatagataggtgtaatcctcaaagagaccccaagcctcctttgtaacacattttatgactgttttattctgccttgtttttctaaggctttaagaaatgtttctgcttagatggaaagggcaagtttgctgcttggtgattttagtgcagtagcccattgctcccatttttcagaagaggaatcgcggggtagggagtcgggggagtttggtcttgccccagatcaccacagtcagtgatgggggtgggccatctggctgctgattcatttctccttctgttacactaagcctgcctcagatttccagccggagtg

SEQ ID NO: 106252 - DNA, 1083 bp, Homo sapiens
tatatcacattttgcttatacattcgtctgctgatagacatttgggttgttacattcttttggctattgtgaataatgctgctatgaaaacatgggtgtacaagtgctgtttgagaccctgctttcaattcttttagggatatacccagaagtggaattggtggatcatatggtaattctatatgcagcttatttttcaggaggaagtggcctcactctgctttttaaagtaggagacaaaatggtcatattaggtgacagggtcacaaggccacatgggtggggctgtgagatatgtccctgtcatgtggttagatgaaagccggggtcagttttggtcttctctgtgtgaccacattgcttcatttctgccacctgagcccaggaagagagaccgtttcatcttctagtttctaaaagatttgaaagtgttgttttattttttatttcctgattgtttaatagatgccagttgccagccagttagcatttgttgatccattcactgagtcccaccttgcttagttctagtgggttgaaaggagagagggctggggtgaggtggacctccagccacaaacagatctttgtggtgggcttccttgcagggttagctatgtgaaaagcattcgtccatgagctaatcagaaatctttgtaaaaatctagttctctatgaagcatttactgtagagcaatccttaagcacccttctatctgagtaatcagaggggtaccagttgtctcctttcatggtaagcaaagctccgcagaagtttacagagttggggtgtggttcaactttctaaccagccatggttagccacgggtgaccaacccaagcccagacctttgacaagctgcagagtacgttgtttcttaggctgctggagtcacacgaagtggaacttttagtattttaggtgcatgtttatttacttacttatttttgttgttgtcgttttcagatagagtctcactctctctctctgtgtgtggagtgtcgtgatgccatcacggctaactgcagccttgaccttctgggctcaagtgattctccctcctcagcttccctagtagttcg

SEQ ID NO: 106253 - DNA, 1026 bp, Homo sapiens
aaaatctgtctcgatgaatttgctcgatcatcttaaaataaaaaggttaattaaaaaaatgattgaatataatttttaaaaatgtcaggcaatacaataaatgctgtttaatgagaaataagcttcgctcctccctgctgtgttgcttccatcaaggcaagctctgctactacttattaaccacattatttccacaattttatatagactcctgactgaggttctctgaatatcaaaattggatattacttcaataacatgggcaaaattaaggctttcgacctgcctgattttccttgtcaaggcagtttgtccccatttcccacatgggatctgcagggctgggtcccatctctcagttccctgaaagagatgcagtgggcgatggctcatgacacaccctcgcctggcttctaacatgtctgtgtaaacctgtggcaggaatcgagcccactggaaacatggtgaagcagccagccaagttcactgtggacaccatcagcgccgggcaaggagacgtgatggtgtttgttgaggacccagaagggaacaaagaggaggtatgttggaggatgctgcctctcctttccagcacctcatggagcttttggggcttgtaatgcggccagggactgtgcctccattttcatttcagctcacaaccaaaagtgttttttaccaaaaggatactgaggcttatagctgttaaagtaacctgcccaagaggtgagccttgaaatcaaatttaaattgattgccagggacacagtgtttaatgaaataaaggatactttggatttagcaaaggtgccttgtcagttgaggtttatgtatgtatttatttatttatttatttatttattgagacagagtttcactcctgttgcccgggttggagtgcagtggcacaatcttggctcacggcaacattcacctactgggttcaggcgattctcctgcctcagcccggctaatttttgtaacccaagtaactgggattacagggacctgccaccacgcctggct

SEQ ID NO: 106254 - DNA, 1020 bp, Homo sapiens
tattcttggcatttagcataatttgcaattctaagtttacagatggatggtccatttcccccaccggggcagggattgtatctgacttgctcatgttttatttttagtacctaacactgggccctgcatttcataagctttcaatgaactattgagtggataaaggtttaagtttcttgcttcatattctctcttacctagagagtgccagcctgacactggacactggagagtcctgactctgttatgcctctgtgctgcatggttttgtttctgtgacttcaagcagtttctctctaggggcgttgtgcaagagggacaggagctcgccagcaccttcagtgtttccgacctggcagctcctgcagaacccctgctgacacagcatgctccttactcacacccggcaccttttctaactgttgcccaccttccctcctaggcacaagtgacccctgacagtgacaagaacaagacatactctgtggagtatctgcccaaggtcaccgggctacacaaagtaagatgaagcagcatggctgtggcttgggctgctctggggctaggagaagaaagatagcccaggaagaagagtgtttttcttaagtgaatttctgattttcctttctgattatagaaggatctatgctcatgatagaaaattggaatcactaggattccctctactagctaggatgagttgtttgcaatgtcgtaagatttttccaactccatctaggtaactaatggttgcagctgtgtgtctggagtgtagatgctgtggtgactacactatagatgggttctttgtccttgattctttttttggagacagggtcttgctctgtcacccaagctggagtgcagtggtgtggtctcagctcactgcaacccccgcctcctgggctcaagcgatcctctcacctcagcctcccaagtaggtgggattataggcacccacaaccactcccagctaatttttgcatttttagtagagaccaggtttcaccaggtcaccta

SEQ ID NO: 106255 - DNA, 1038 bp, Homo sapiens
tcaagtataggttcacatgaaacccaacccaattaccccccaaaaatttcagagatgagaacagtgactcaagttttagatggaaatcattctactttgtcccaaatccatgtatctaagaatgattttcgtcccttgaaaaaacagtttggctgtggatttgaaatcctggaactgcatattttattctgagggatagtggcccattcagcccccgaaaggactcaatgtccagagattgaaatgtgtttgtttcctattaaagagactaagtgtatataaggtcagcatttttattttgctaaaggtgtgatgtcccagacccagctgtatggctgaaggggccaggtgggagtcccattcaggctgttaaacttggttccagggctccttattctagacaccttgtgtgtgccatcatgggagggtaggagaggtgatcatcaatgtatgtggcttgatgtcagtcttgctgggcacagagaagtgattatgtatttctcacctatctgtcacctataggtcacagtcctctttgcaggacagcacatctccaagagcccatttgaagtgagtgttgacaaggcccagggagatgccagtaaagtcactgcaaaaggtccagggttggaagctgtagggaacatcgccaataagcccacctactttgacatctatacggcaggtaacgtgcctctcctccatggatctgacctttgcgctttcttccagaggctgaaatataatcctcggggacttgaaggcctgaccttttgtcttttaaatcaaataaataatcacaaagacaattttttcaaatgtgttatattagatttttcaaaaccagcttttcttctctaaaatactcaggcttcacttgaataagacatacttcttgaattgttggcttcttttccatgtagtaaatagaaaatgcagaagaaggaaacattcaaccataaacccttcaacccctagaaaatagttgttaacatcttggtgtggacctctctgagggcctgtctcctgtttacttgt

SEQ ID NO: 106256 - DNA, 1018 bp, Homo sapiens
aaatgttagactctctccctctgactttgttgcccctttttttctgttttgttttgttttgttttgttttccaactgtactaccttttctaacccacacttgcctttccctgttctgtcctctgaatctgcgtctgcagacgtggcttcctcttccgaatcctacctctgggccagcctggaccctgaagctgttggcttcctagttgagaccactgggccagaggcctcttgcttggtaagggctggttgggtgggacttccttgccagttctttgtgctgcttgtgaatgttagctgggcccgtgttctgtgtgattttaggaaactctgtgcaggtgttattattacagcctgtccagccggaacccaaacccactgtctaattgcctttaaacacatctagggcttttttagatggtgaaggagctggtggtgcccttcagactctagccccatttaatgtttatatgaactcagcaattactcttttgatgttgagactgttgcacatgttcataatttccatgagtgtgtgtgtgtttcttaagacacattaaagccctccgaggaagtcctgtcattgtattgtgactgacttctggtatgaccaacttttctccccttgacaaagaaaaaacaggcaaaaaaaattctaacatattcctaagcaaagctcttttttacataagagagcattttgaatagctttcctaattctactattgttttccaacctttcctcactcgtggacttcctttttcttttctggcctgtacatcctatactatttagcatttaatgaataacctttttcttttaatttactaacatcctctctcccacctaaatgattttacatatgtaaaaaaaaaatatatatatatttgcaggggcgcggtgggaaggatacagggtctcactctgtcttttgggctggagtgcagtggtaccatcatggctcacttgtagcctcgacctcccaggctcaaatgatcctcccacttcagcctcttga

SEQ ID NO: 106257 - DNA, 1046 bp, Homo sapiens
acccggaaatgaaatcagcaatggtgtttactgctaattattgcctttatagccacccacattctgaaggccttgtaacagacagcacgaaaagattggtctgcctcagccaaggtggggctgaactggtctctttccaagctgtgttggttgtttttgcctggttgttcaggcggaagacaacaacatttagacacttaaaaatggctgacccaggttttggaacccagacaggcattttcaagtactgcattttccaagaagacttgaaaaagtccagtctatccaattactgagcccttgagtatggcagtgaggtttgaataatgtccagcactcggccttaactccctttcacaaatgaaaggttaaatgctggaagcaggagcacagcatggatttgctgtgctctcctgttttctttgccaaagtcacttttctccagtccttctgtggtgtcactggacaaagttatattgtgtctgtatttgctagcctggtgtgctccctgagtgggacccctggtcttgggcaactactgcatactatttgtgcaaagcaaatattttcttggcgggtggctccaggttaccttggctttcacgactctgactaaagaatgaaagattgaattgatgtcaaaactgtgcttgcagcctgcaatccaaatgcctgccgggccagtggccgaggcctacaacccaaaggcgtccgtatccgggagaccacagatttcaaggttgacaccaaagctgcaggaagtggggagctcggtgtaaccatgaagggtcctagtaagtgttcctttgtttctctatctcaggtgtggttttggctaactttgcagccatggcatatggatttcatcccacggccagttgtcctcaataatcccagaaggctatgtcaaggatttgaggctatctgggctccttggggaagacggcagtgattgattagtaatgtctgccctggatgcggccagtgggtggcttgacagctttacattacatcaagacttctgggagtagaaaaagcagtgatgt

SEQ ID NO: 106258 - DNA, 1050 bp, Homo sapiens
ttaaactccgaataaattcagttagccttgagaaatatttgggcattattgggttccgaatacctaccacgcttttttttttaagcctcccatgccaaggttacagcacattcattcatgtatgagataaagcccattcaaccaagttttctggttatagcataagcaggatatagtgtgtggactctctcactttccagggtcatagtctggggaggcctgcacacaaaggtaaagggccaggaggctggtgcaaagcagcgtggcttgagtgccaacccagtggccacctgagctcccagaagcagtcacattacattatattgttgacataacagtagctatgggtgagaggcctgcaggaggaagggcttggctgcagtttgggatgccagatgaaaggatcaggcaagtggaaagaatgtgcaaaggaactgcagcttatggctatagtgacaccttactttactcttctttgatgcttcttctattcctttccctgtagcccctttgaagttcaagttggccctgaagcgggtatgcagaaagtccgtgcttggggccctgggctccatggtgggattgtcgggcggtcagcggacttcgtggtagaatccattggctctgaagtggggtctctgggtaagtggacacagctgaccagcatcttctggaggactgaggattacagggcttccgggctgtgtcaggctggatgttggggccttgcctagcctcaatacctttagcttcctggcctcctggccaccctaagccatctctgcgtgctgctgtacatttgcagttgcctctgataccagcattgattcattcaggagaccttgagggcagaaaccttatgtgggtattgtgcctaaaacaatgcttggaacgtagtaaacacttagcaaatagtgttgactgacctttatagtttagatgaatgaatgaatgaattttgctgaaatttggatttggaagataaatatttcctttggagcacagctgaagtatattttaaatacatgtctaatgtatatatgatcattt

SEQ ID NO: 106259 - DNA, 1156 bp, Homo sapiens
acccttctgtttacctgtggtaatagaagtctgctcaccactcgctaagtcagagtgatgctaaggttcaccctttgttgaaggctccctgagctctggctgttgcttcaggggctttcctactaagactgtgtctctgctacaggaaatccccgccagccctttcagagtcaaagttgacccttcccacgatgccagcaaagtgaaggcagaaggcccagggctcagcaaagcaggtaagatggcacgtctaggttgtcctgggcccctctgccagccggtggcactgggcgtgtttcatccacggccttgaggaacttcatctccaccaacaccaacaccaagctggcaggttttctgtgcagctctgatgcagcagtggctggccaggcccgttgctggctgtcataatagacctggtgctgttgaacctgtctgacgggttctcaaagtgaaactactccagctggtctgtctcctcacttcacagtatatctttccaggtgtggaaaatgggaaaccgacccacttcactgtctacaccaagggggctgggaaagccccgctcaacgtgcagttcaacagccctcttcctggcgatgcagtgaaggatttggatatcatcgataattatgactactctcacacggttaaatatacacccacccaacaggtagggtccttctcccctctgctcccctggcccccagccaggcccctttctatgcagtcggtgctgggtcactgtggacaccaaggggtgtgagaggtgctctgccaaagtgctccctgatgggaggcagctcctggcactttgaacccctctgggagcacctataggaagcccaatgggttctatcaggtgaactgcagaattccccaaaagcaagcaggaagctggtcccatatctccacctttggtttgcattttatcagagaaatgctcagttcttgatattcaggccctaatatctatctttctgttacacatgtgcacacatgtgcacacacacacacatacacacacacacgtgcattccctcgcggcctcaccagctgccttttagtcttttcattaattacccacagaaaaagagctgctacacctttgtgtttccttcctggtccttttagcttagtttaccctttttatgag

SEQ ID NO: 106260 - DNA, 2967 bp, Homo sapiens
tctggatattagttccttatcagataaatgatttgcaaatatattctctcactccttggtttgccttttcacgccgttaacagttctcgtgtgcaggttataaacgcggcttcttatctccagacttgctcttcctgtgctttaaaataaaaaatccaaaacaaaacattcattattagtaatgataaaactaacacttttatagatagagcattcttttctcatcaggccactcaatagtaagtaggtaattattttcctgctgatggttctgagggttggtgggagccttactactgggtgcaccacgctgaatcttctttgttgccaaattctccatattctttaggagaaagcaccagaaagccatagctgtctgcgtacaatgactgggatcacaaggccatgacgtcttctaaaaacattttgtgacttctgctttattctatgtctatatgccttttagtgttttggctgagccgttagaaagtaagttgcagatatcaggacagggtcagggtttgacctgcatccttggaaaggactgcagaacccagtaccccagacgtcccctgctgctggttgaggcagaagtggagattaggagcctaggtccggttttgtcccctttgaagtaatgctggagtgggaggctccttacttcagagtcaccccaaggtcacattcatccagttctctgatagcagcaggtttgagaactgctgccatgctgagtactcacttagggctttgtgtccggatgctcccaggatgcattcaaggagccgggtgggccttggtggcggtcgttgccaccaagtggcaacatccaagctgcttgaagccacccacaaccccacaaccaagagaagagaagaccaaagtcctcaggtaaatcacaagtgtgaatgacttgcagggtggcactggggtccttcttgttgtttgttgcttggagctgggtttattgtttcattatttgggcaacttgcaattctgcctatttttctatggcaaagaacacattaaatctctccttagattgaatttccttcccacccccacccccagcacagagcctggccctataagtgctctgtgtggattaatggctgtgagtgagcgaataaatgacatggcgcctggattcacaagcggagatggcctaagaacgttgtaatctggtagaggagtgatgccaacacctcctcattctcctttgaactctgttttctgaagagcagctaaaagctcaagactgggctaaggaagtgtgcccttggatgtggttaagagacctgggtcagcccagaaagccaccccctgacacgggggagggagcatactttgagggctgacacccacaggcacaccttctcatggtagttttagggtataacaggctggaaatccccagaaaggtggctgcttgggcatgggtgtgtcctggcctggtgtgggcgcttccccctcagaacacaggctgtgccacgtggggagccgaggtcctgcctgagtaacccaggtccctgattgctggttttgctccctgacacctgcaggcctgccactccacctcgcaaagtccctgagtgacagcttgcaggtgcttgcctgcctggggtggatgagtgatgtggatggctgtaggatcctgtgagtcccttgaggatgcaaaagtagagcgcgttttgccttagaggaatggacttgttggcttggggcttgaggaccctcccagaggtcaaagactcggttttatagaagggaagtgatttccctgaggactttggtcttctcttctcttggttgtgggtggcttcaagcagcttaaatttctcaccgcacgttcccctgcgcagagcagtttgagaagctggtggcaatgtctccattacgtgctgtgctgggagccactaggattggggaccactccatgtagtactctggcacctttagaaatccctgtgagctcacagaccctcacagagtaacagcttctaccttgaaatgttcttaacgtggtggtcctggctgctcctggagggccctaaaagggatggtgctgagggtggctctctcagtcccatcctcttctgagctgtctggtcagtgtcttgtgtatgtatattttgaagaataagattcaggtttcagaagcatgtagaggagagtgaaactgtcttgcagcctgcgaagtcgtggcgaaatgcactggccatcactacccagacatccctcacttcatagccctgttggggaataaacacagtccattccttagttggggcctcaggggacactttaaaatgctgtaggcattgtaggtgtaaatctccgagattttttccctcccccttcttaggttatttaaggtacagttcattttctatctgagtttttgttttgtttttgactggtaacaagagcatactttcttttatgggatgggtgggcttaactggaagagggtttttccctctcttttttagcacttcagagaagaggccagaaaactttatgcgggtgagggaggaggtatccccaagacctctggttagcctgaggtctgcttagtgagcccctgaattgttaggggctgtggggaaacggaagctcgggaagagttggcacgttgggaatgccacgttggctgaagtagcgagtcagtcctgccttaaacagtacaaaaaggagacctttcctgccccttggctggctcccagctctgttgaatttgacctgtacacattttaccaggaaatgttgttcacatgaggcagggggccaattggttttgtgtgcagtgcttaaaaatgctggaaaattaatcctctcttcattgatgcaaccagtttttttttttttttcttggcctttacccccttccttattacaaaaggaatgtgacaaaatatacataggccaaatgctacacccttttaacacttgatcagcaacagcttt

SEQ ID NO: 106261 - DNA, 1050 bp, Homo sapiens
agcagctaggacacagatttgggggccatgggtatgaggcccagctcgcacccttaccaaggtgtgtgacttggggcacgttcctttaccagtctgagccacagtttcctctcctgaaaaaatgagatgacagtaggaactaccccttaggactgttttgatcttgaattgaggaaatgcataaaagcacatagcatggtgcttggtgtgtagaaaatgctcattaagttgcttctgttattattagctgctcttatttgatctaatttttctgttattcttgccttgtggtcaaaagctagaagaaatagatctaagatactttctacattgattggaatcaagtctcccctgtccgtgagaagaatgagggatcttgaggggattttaaatgccaagttagctttttggtacccaaaggtaaactgagttttctctcttgttccagggcaacatgcaggttctggtgacttacggtggcgatcccatccctaaaagccctttcactgtgggtgttgctgcaccgctggatctgagcaagataaaactcaatgggctggaaaacagtaagtgcctgaatggagagcagatgggttgttgatgaccccccaacgtggctgctggttagattttcttcaaaaggtgaaatttgcagagaagcaaattctatgttaagagactttgcagttgcacagactttggttcgaattaaggccgtggtgtgaagtaactgtgactgtgtctgccccttagccacaccgagactcagctttctcatttgtacagtggggggtggtcggcggggagaggttgagaacacccatgggaatattttgaaaattatatgagctaatggttcagaggctggcacgtagtcagccccctggcattgcagtaggaagttttcattaaaaagagaatttgggctatgttgctttctgatgagtttctaactgtgccagctatccttggcaactgaatccgcactaaggttgcgagtcaagcataaatgccaaatccctggcactcagaagtcactaccaccacacc

SEQ ID NO: 106262 - DNA, 1603 bp, Homo sapiens
gctcccagttgcagagatccaaagtgagagctcactgttggcttttgtggctggagcagccagctctgagtgtgtaaacgtccactgcccaaccctgtcatgtgtccccttgtcactcctttccccaagacactgagagctttgactccagaacaggaaaagcagggtgccaattaggaaagcctcttttccggtgggaagtagcgatccgggacctccttgcctgtggttcggcagtgtccatcttgccaggccctatgttccttcagagtcaaggttctctgggttgtggcaggggccctgtgttcccagtgcttttgttttgggtaaagtcctttccctgttcttgtctaatctaacacttgggcttcctgcagccctgctttgcagagaccttttggaaaccatcacggtacagtcagttctcagcacttgcttcaatcggctcgcatttggcagctctgtgacttctgctttcttgagggggaggggtgcctataagatggagttggctgccaagaattagtaaataaaacattgacttatgagggtgtttggatatcaagttaacaccaaaagtaagtaaataagagacgacagtgtcagattacaactttctggtcagcaaagattgtggggtcaggtaaatttcactttgagtcccagcttggcaggctgctgcatatgtcaccctggacaagttacttaacctctctgagcatcagtttccccatctgtgaaagccattggttaataataaataccccataggattgtggtgaaaattaagacaataacctatttgtgcttggcatataaaatgcattcagtaaatgatagccgttattgctgtcatcactaattgattattgtgccgacacttgttgttactgaggctgagatgctgatgatacttactcagctttgctgcttgtcctctgcagcagctgttgcttacagtggaggctgagataagtccccgtgtccaaagaaccattgcttctgtgctctggattgttcctgctgctgaaaagggtcagctcttcacctcagcttgtgtttcttttccaggggtggaagttgggaaggatcaggagttcaccgttgataccaggggggcaggaggccaggggaagctggacgtgacaatcctcagcccctctcggaaggtcgtgccatgcctagtgacacctgtgacaggccgggagaacagcacggccaagttcatccctcgggaggaggggctgtatgctgtagacgtgacctacgatggacaccctgtgcccgggagcccctacacagtggaggcctcgctgccaccagatcccagcaaggtcagcctttgcttttgtcccagaacttgtctcattgctgtcaaacatgacaccatagtccttctctggttcttcctggcaaagaccttctgaaaatcgttttgtgatgaaagttagcacaattcactgtgaaaggtcccctgggtaggtgggtcacaaccctgctcctcctcttgctctctgactacaagactttggtgaggggctccctgtcccagagtcttctttcttcgcttgttagcataatcacagtcctcactacaaagcca

SEQ ID NO: 106263 - DNA, 2278 bp, Homo sapiens
acctggccaacatggtgaaaccccatctctactaaaaatacaaagattagctgggtgtggtgacgcatgcctgtaatcccagctactcgggaggctgaggtgggataatcgcttgaacctgggaggcagaggttgcagtgagctgagattgtgccactgcactccagcctgggcaacagagtgagattccgtcccctccaaaaaaaaaaaaaaaagttcatcgtcatttcttcatagtaaccctgactcaaggggttttggaagatttccagtggtctcaatggtgtgaatcctatgaaggtgtcttatttgttgaattagaggtgaaagcctccttcctcactcttttttagaaacagtttagttttattattatgcagaatttgttgagcaaattgcaacagcccaagccacagctagctccacaagagcccttccatgagccctcaacctgggatctcgtgtatctttgttggaatggacattaggtttccaagtccaggcctgtgatttagaagggtcaggttgggtaggagagaggagagtcttggaggggctgctccatgggggtcacacctctctcctgtgggttttcgctggtgattgagttctgaggcatttgctgcattgactgttgtagctttaactcgtgtgcacgtgtgacacataaagccccaagagaagggctgcctggctcagatgcacttccatgctgattatatgcatgggtgttgaaagcagtgctggctgagcagcgatcccagtgcagtttgactttattctttgctcaaataggtgaaggcccacggtcccggcctcgaaggtggtctcgtgggcaagcctgccgagttcaccatcgataccaaaggagctggtactggaggtctgggcttaacggtggaaggtccgtgcgaggccaaaatcgagtgctccgacaatggtgatgggacctgctccgtctcttaccttcccacaaaacccggggagtacttcgtcaacatcctctttgaagaagtccacatacctgggtctcccttcaaagctgacattgaaatgccctttgacccctctaaagtcgtggcatcggggccaggtctcgagcacgggaaggtgggtgaagctggcctccttagcgtcgactgctcggaagcgggaccgggggccctgggcctggaagctgtctcggactcgggaacaaaagccgaagtcagtattcagaacaacaaagatggcacctacgcggtgacctacgtgcccctgacggccggcatgtacacgttgaccatgaagtatggtggcgaactcgtgccacacttccccgcccgggtcaaggtggagcccgccgtggacaccagcaggatcaaagtctttggaccaggaatagaagggaaaggtgggtttcatttaaaaaaaaaaaaaaaaaaaaaaagacaagctgggacttaagggctacctgaaacttggagctgcaaactcagccacctgcaggagccaggtgacatataaggcggtgctcacctgttccctctgcctcggggagtagttggggggccctggtgaaggttaagcacattgcatttctggggaccgtgctactcaacccctgttttctgtttctccatggggaacaggacctagcattgtcagcagaatctctagttttttggcaaaggcagaaatcttgatttttctctggaaactcaacatacaacatgttggcatttaattggaaaaaagtttaaaatgtagtgttgtctaacacctgcatgccacacagcaggttagtcttcaacctttaacctgtcctcgagcccggtgtgagcagtcgtgttgtcacttagccgtggctactctagaaaggccttctttgggatggagggggttaatattcttgatttgagagttagaaaaaccagttttccagttactgaaattggacttcatgtgtcctgaagtgccaagaaccttggttctggggtttgcttttgggtctggggtactggtggcagtgttagctatgtgcttgctctgcagatgtgttccgggaagctaccaccgactttacagttgactctcggccgctgacccaggttgggggtgaccacatcaaggcccacattgccaacccctcaggggcctccaccgagtgctttgtcacagacaatgcggatgggacctaccaggtggaatacacaccctttgagaaaggtgagccgccctgtcctcggactggaccctcgttcagagctgcccttggtcattgcctcctggtggctgg

SEQ ID NO: 106264 - DNA, 1022 bp, Homo sapiens
cacttcaggtggccgagacgggacaattgcttgaggccaggagtttgagaccagcctggccaacatggcaaaaccccatccctacaagaaatataaaaattagctgggcttggtagtacacgcctgtaatcccagctactacttgggaggctgaggcatgtgaattgcttgaacccaagagacataggttgcagtgagccgagaccgcgccactgcactccagcctgggcaatggagtgagactctgtctcaggaaaaagaaaaataaatgaagcataagcattgaaaatgaggggtcagagtgtctttacttacattatactaatgtgaaattccctatgtgagaggtgtagtaattgagttggggtggctacgtggaatagtttataaagggaatttgcatgaattttggcaataagcagaccagcataaataaatggtgcacatttcactttcttttccactctttccagaggcgcaggaattggtgggcttggcataactgttgagggaccatcagagtcgaagataaattgcagagacaacaaggatggcagctgcagtgctgagtacattcctttcgcaccgggggattacgatgttaatatcacatatggaggagcccacatccccggtgagctattcctcagagaggaccccagagaataattgattttgcaggaaaatgggtttgattttggttatctctctgagtggggaaaacaatctgatatttgtaatagctgcaaaaggagagtttttcttagggctacatctccaagattatctcaactcccagtagaaccggtaacatggcaaaaagcatcggcttagaattttgactggaaacagttgtgcgtgtgttggaggacctagttcttgattcaggggaaagctggttctttacaaagttgaaaatcacagtggctcacacctgtaatccccaaactttgggaggccaaggcatgcagattgcttcaggtcaggagtttgagaccagcccaggcaacatggggaatccc

SEQ ID NO: 106265 - DNA, 1022 bp, Homo sapiens
attagattctcataggagtgcgaaccctattgtgaactgcacatgagaaggatctagattgcacactccttgtgagaatctaactagtgcctgatgatctgaggtggaacagttttatcctgaaagcattcccccaccaggccccctggtcttctacgaaaccagtccctagtgccaaaaaggttggggaccgctgccttggaacacactcaggacaaaaccagtctgtcatatgatggttactacctcatagttgtaaatttctgctagacttaggcaccttgactaactcactgtcttatctgctgtagaaatccccttttccatcccactcttatgtgtaagaaaagtcagatgcagctgggttgacatgtatctttattgactagggtgtgtgtgtgtgtgtctatcaagtcccttcaaggtcaaggtccttcccacatatgatgccagcaaagtgactgccagtggccccggccttagttcctatggtgtgcctgccagtctacctgtggactttgcaattgatgcccgagatgccggggaaggcctgcttgctgttcaaataacggtaacttggagttattttctgagccaaaccttaatcctaagacttaatttctgggccagatttaagaacaagggtttcaataaccgatttctgactcaatgcaagttgtttgttagattttcccaccaaagagtcagtaaatgtgcagaagcagaagcagctcacctgagagatttgagggtgtagctccaagaaccactttttggtgaattttcatgtttttttactacatctattcctatgtttttatttttattttttttaaagatggggtttcaccatgttgcccaatctggtcttgaactctcttgggttcaagcagtctgcctgcctcaacctcccaaagtgctgggattgcagacatgagacactgtgcccgtcccctatgtttttatttttaaatgttttaaattactctttggttcatttaagactaagttatgctgcatat

SEQ ID NO: 106266 - DNA, 1343 bp, Homo sapiens
cacaattcacattacctagtggcaaggatgctaggaagtggattcccatcttctgggagcggtgcacctagctaagagttatggtcctgttaataaagagaaaagggagactggatgtggtggtgtgtgagcagaagcctctgcctcctcccctccctacatttcagaggatttcgagctaaaacactcttggttcacctgacaacaaaattactaaaaattggccatgtctgtcatggtgttaaagggatctgtgaccctctactctccctaccaaaaaacaaaacaaaactagattgtattaagccatcaattctgtctgtttccactagaggcactaattggaaaatatgtcagggttttccatgaatgttttctacatcttgacaacatcctaaatagcatttctctatgatccacaggaccaagaaggaaaacccaaaagagccattgtccatgacaataaagatggcacgtatgctgtcacctacatccccgacaagactgggcgctatatgattggagtcacctacgggggtgacgacatcccactttctccttatcgcatccgagccacacagacgggtgatgccagcaagtgcctggccacgggtgagtacagggcatctcaaggtcaggggcacaggctttgcaatcagaaagccgggccgtagcccttctctgtgacttacaagctacatgatctgggcacgttgctcaacctcactgaacttcagtttgacatagattgaagctctttgtttttatttggagaacatttagatccaagaagctcttctaaggaacagagactgttttacagggttactgcaaagattagatgaggtcaggcatgaaaaatgcttagcacagtgctaggtacatgataactattattatatgcttttgaaatgttgagaacccaactctgatggcggctcccatgaaaagcagcacatttctgccttttatgagtagatagttactcaggattcattcaagagcatttcaggtcagcattagagaaacacatttaaggatctaggtttttttcatcatgcatatgtaaacctctcaggaattctccatgaatatttgagcatcacagtttctttggtttctttctttttttttcccctcctttttccttcagtttctaagacacaactattgactgtcacaggccattctttttttttttttttttttttttgagatggagtcttgctctgttgcccaggctggagtgcagtgacgcaatctcagctcactgcagcctcagcctcctgagtagctgggaccacaggtgcccacgaccatgcccggctaagttttgtattttt

SEQ ID NO: 106267 - DNA, 2110 bp, Homo sapiens
gaccccatctctaccaaaaaaaaaaaataataattagcctggtgtggtggtgcacgcctctagtcccaactgctcaggaggctgaggtgggaggatcacctgggcccagaaggttgaggctgtagtaagctgagattgcgccactgcactccagcctggatgacagagcaaaactctgcctcaaaaaaaattaaataattaaccacagtagacatttatcaagtaaaaaaagaactttttcctgattctgtgctgcagagatgccttgtgttagtttttacctacttacacttcacacacctcactttcatgcctggggtcacaccgtacatactgctttcgcaccttgcttccttccctcaatgtgtcataggtacccttacatattgattcattggacctgactgccatgttccactggacagactcaccagaatttatttgaccaaatcccttccagatggacattgggttgctttagttttgcacgaccacagacagcaccagtcaaggtccttacacacatcaattaactatggagtctcccgccagcttaggtctgcgtgctacaagtggggttgtgggctcacagggcatgcgcatctgacagttgaagagaggacaccaactgccttccaaaagggcagtaagaaagtgtccttcgctagagtgagtggctcactgcagttcaagatggagcagtgggggaagcagctctgtggtggtagtctactgagtgtatccttccagtatggttcccaactaatctccatttgccactgaccaggccacagatggggaagtcacagccgtggaggaggcaccggtaaatgcatgtccccctggattcaggccctgggtacaattttggttttttcctttttgtgtttctgtgtttactcagccttcatttcagaaaatctgccatctgcttctgggattgcttaagccctgtgggtgtcctggtcattggtgtgcccctcactgatcagcccatcacgatgatccctgctttttctgtaataagatcacctttgcgtcaccatccgtgctccacgaatcgccagccgtcgtgtctgtgatcacgctcggtgcagtttgtctctgtgtttaaagagaaagacagacagctgtctgcagccctcctgctgcctctcaaagccgccacttgcacattcagtttctgttcagggggaaagccacccactgctactctctgccacttaaaatgcaccttcttttccaggccacaagcaactaaacctttccagatggagcctcttgggactcatagacattgctgtctctcacttttccactttcccgtgggtgctgctgggaattttacaaacagactcccgagtgattgctaacagttggtcagcatgacctctccagtccctcaggttctaccctgggtctggagccacttagacaaagcccataccacaatgggcagccgcattcccaaatcccggcctcactggcttgtagaattcccagcagctctaacccctgtagcttcaccagctcccgctgttgtctgctttacccagtgaccactgccttctgtttttaggtgaccgaagaggcctatgtcccagtgagtgacatgaacggcctgggatttaagccttttgacctggtcattccgtttgctgtcaggaaaggagaaatcactggtaagcacttgccataaaggccgtctcattctcacttgctctcacgagcttcccagaatggtgctggggaggtgtgtccactgtcccccagacccaggctccttaacccagggtcacgagttcttggtctccggtgttgggccgtgggctcctgaaactacagaatatgccacgtgtgtgtttctctgaagaagtggctcactgacaacttgcattactttcttgagcagtcccatgattctctctaggttaaaaactgctgtgtttagatacctcatgactgtcgggttcttgtttgcccctttttcctgccttctcttatttgacttttccagatgtgactttgacactgagtctgtcatacaggagttcctttctcccctcagcctcttttcaatggcccacttctctttggtttgatgctctat

SEQ ID NO: 106268 - DNA, 1020 bp, Homo sapiens
tgagtggctctttttgataaagctgtgtgcccattcccgtggtattcatggataatcccaaatctgtggttctaatgggatttccgtgatggcagccagtgcctgatgggcagggacaatccacctctgccctccaccacccaccgtctcctatgtgtaattgatgtacacggctccttccttttctcatcccatgcatcctgagagtagagagagctccagggttacttgcagtgaagaactcagatgtttggggtttcttctcagtgggtgtttttactgcgtggactgcttcattctgacagatgtccctttgcccacagctcacgtggagtgcgtcaatccattgtccccagcatcagggctgccctggatgagttgttaaaaggaaactcttaaaacaaggcaactctctccctaacacccctgcatccctgttcccacttgtaggtggtctggacttggctattgagggcccctcaaaagcagaaatcagctgcattgacaataaagatgggacatgcacagtgacctacctgccgactctgccaggcgactacagcattctggtcaagtacaatgacaagcacatccctggcagccccttcacagccaagatcacaggtagggttgtctggcttctggggtcttcctcgtgggaagtatggctgcctctgactgccaccctccttatcagacccctggcagcaggctagacgtctctttgagtttaggtttcacagagacttgttgaggaggagcaggggatggaatgcaattttggattagctaaatccttctcttgctgataatccaggaaaatgcgagagctagtatttggagcacacttttattgtgccagtgtgactctagggtgcaaagagaaagctctcagatggagtgttcgaatcatacttactgcaatagtgcatgaagtgcatgagcttagacatgcccttcagcgtcactactaggtaaattttctgctatcccttttacagatgggaaaactgaggcttg

SEQ ID NO: 106269 - DNA, 1334 bp, Homo sapiens
ggaagatgcacaaggcagatcctgtttccccaccgtatttagacctgtctgtgaagcagccagtagtactgtgtggaatgtggtcattgtttacctagaaatgcccacagccatgccaggcaggtatgaggtgccttcaactaacaaaaattcctatattttattttatttttgagacagagtctcactctatcacccaggctggagttttagtggcatgatctcggctcactgtgacctctacctcctgggttcaagcgattctcctgcctcagcctcctgaatagctgggattacagcacccaccaccacacccagcttatttttgtatttttaatagagatgaagtttcaccatgttggacaggctggtcttgaactcctgacctcaagtgattcgtctgcctcagcctctcaaagtgttgggattaggcacctggcccaaagattcctttaaaatgtggtccatgaggactcaagtctctaggtcctgccagcttcttgtctttgctgcaagcaggcatgaatcccatcattcttcattggttgggtctactcagtgttcaaggctcatttttttttcacttaactttgtgtaattagttcttgcgtgttcatccgtgaacagcatatggcatggcagctctgtgaagccagggtaaccacatgtaacgggagtcctttttgggggatgtttcccagatgacagcaggcggtgctcccaggtgaagttgggctcagccgctgacttcctgctcgacatcagtgagactgacctcagcagcctgacggccagcattaaggccccatctggccgagacgagccctgtctcctgaagaggctgcccaacaaccacattggtgagctaggctacccttcctggctggagccaggacatcttgggtgggagatggggactcttgcagtcctttcttgggaatgggtagcacaatggagtgtgatgtgataaacctgctgggtcacacgcacgataaatgcccaagcgtatttgtgcattgtgatatcgacactctggattgttgggtgtcaggaaagaggacatatttctatttctgagagtgtgtctctctcctgcttcctctccgccatccccttacaagccccaatctgtgttctggtccaggcatctccttcatcccccgggaagtgggcgaacatctggtcagcatcaagaaaaatggcaaccatgtggccaacagccccgtgtctatcatggtggtccagtcggagattggtgacgcccgccgagccaaagtctatggccgcggcctgtcagaaggccggactttcgagatgtctgacttcatcgtgga

SEQ ID NO: 106270 - DNA, 2001 bp, Homo sapiens
tcttatctgctctcccacccttgttctcagcttcccagcgtctctccaagcaaagaatgttgggttgattggccaagaccatggtcatctgagcagagcttttgtggaaatgaagcatctctttctgttttctctttgagatggtttgagttagattgtgtctcttccaagcttgccacaccccagtgcctccagtcatctgctttcttgaaggatggccacgctggtgaattctagacaaattctaacccggggagagggctggagaatttctggtcctggttgggagatactccctgttaaaccttcggatatgctgacctagctgaggtagccaggggctatttaaaaattcaaaatctcagatctggctgtggataaacccccaaggtggtacgtgcagtacttggaggcgtgagggcagaaggtcctccccagcagtttgtacgggacacatcatctatgggatattagtaaatatccttaaggaaaggcttctgtggtcaaaaccaggttcagcaggttatttcactatggggcttctcaggacgcttaacctactcatccccctctgggctttgcaaacgaggccgccattgctttctttctgctatgtagaaatagattgaggcgtaagggtcggatgtcctttctccattcatcaggctccctcttcctgaggagctgctgtcagaacagcctggggctgctgtgttgcaggttatggtggcatatccttggcggtggaaggccccagcaaagtggacatccagacggaggacctggaagatggcacctgcaaagtctcctacttccctaccgtgcctggggtttatatcgtctccaccaaattcgctgacgagcacgtgcctggtatgtgcattccattcccctccaggtgggatgcttgggttttctgtaaatgctgtgccttggcctctggcctgctcacaggagccttcttgggtcttgcagggagcccatttaccgtgaagatcagtggggagggaagagtcaaagagagcatcacccgcaccagtcgggccccgtccgtggccactgtcgggagcatttgtgacctgaacctgaaaatcccaggtgggcgtcggggactagtagggtggggaagccttggctccagccttcagggcagtgggtgcctttgggaaccaagtttaggcatggcccagaacacagtatccaagtcggctgtgctgaccttttcatttcacttcatttcattatgttcttctatgtttattttcacagagtctcatccaagaaaaacaaatgtttaccttgctacctttttcctcttccaaataaaaatagctttattgtgtcacatgggggaaacgtagatatgcttttagatttttagattaactatctgtcaaatagaatcatgtcagtgaaagaactggccctgccgatgccagggtctggaagtatttaagaggtggcagcccagcggcatccttctagtatttctctttcattcctgaaattagaacgagggctgtgctgcagaactcgctgggccacatctagccctttggtggtgaattgttcttcttgggccccgattagccagtcaacaggtcacacagtctgtctgaaatgtgttccaagttctttctataaagaatccttccagagggaagccactgtgagtgaaaattttgaggctcctctgcccagaagttggcatgtcctgtggaattgcacaaattctacagagaagggaaatctaaatcgtcttcagatggagcttgtgttgcgagctctggagagggggttgtctttctacactgcatctcccatccttcctaacgagtcacggagctgtcgactccgccttcttggctttagttaacaggttcttcttgtgtagtcacatcaacgtcgggtcacatgggaatgtggtaaagcctcattactgtagagttcagacatgatcacttaaaaagagctttattgggccgggcgcggtggcttact

SEQ ID NO: 106271 - DNA, 1964 bp, Homo sapiens
ggcagagattgtgcccatggggaagaactcacactgcgtccggtttgtgccccaggagatgggcgtgcacacggtcagcgtcaagtaccgtgggcagcacgtcaccggcagccccttccagttcaccgtggggccacttggtgaaggaggcgcccacaaggtgcgggcaggaggccctggcctggagagaggagaagcgggagtcccaggtgagcattgcgggcaggattttcacttgggaagaatagagttgagcccaggcagtgtgggcacccacatacttttttgccccatttgaaagagaagacttctgataggtggcattaagggcattatttaaaacaaggcatcatgactaagtctggcacagtttgtaactaagctttgctcacttacgtaaagccaaacaggtttcttactgggagcctccttggagcccgtatcttattagtgtgcacctgagtctctaattggggagcagagtaatacggtttccagagcatctttcagggctgatgttctgtggaacatactagaaagctacaaaactgactgtaagcatcctttcctgtggttgccgctggtgggaagatctgtagggaaaaaatggaacattctcatctttctctggcttggttaaggtgtattcattttttaaattttttatttaatatctttttctctcttgtttgttagagatggggtcccactatcttgctcagactggtcttgaactcctgggctcaagtgatcctcctgccttggcctcctaaagtgctgggattataggcatgagccactgtgcctggccggttaagatgtattcagggctgggcgtggtggctcacacctgtaactctagcactttgcaaggccgaggcaggcagactgcctgagctcaggagttcaagaccagcctgggcaacacggtgaaaccccatctttactaaaatataaaagaaattagctgggcatggcggcatgagcctgtagtctcagctactcgggaggctgagacaggagaattgcttgaacacaggagatggagcttgcagtgagctgagattgcaccactgcactccagcctgggcagcagagcaagactccgtctcaaaaaaaaaaaaaaaaagacatgtcttcagaggactccagatgtcctgtgaatttagttatcactagtgatgcttaggaaacttcagcaatggaccttggaccttgcttgggttctgcttggggttggagaaagaggaaagggctagcaacagacgaaacctagcactgcaggtttgaacaaggatggaagagggacaggggctctgtggggctcagtcactaaccaggtttctctttgctctcagctgagttcagcatttggacccgggaagcaggcgctggaggcctctccatcgctgttgagggccccagtaaggccgagattacattcgatgaccataaaaatgggtcgtgcggtgtatcttatattgcccaagagcctggtatgtattcagggttcacaagaggacattttccttgtttgaacatgattaggttgcaaggaacagaaatccatcaagtttgctgaagtcaatgaggaatctatgtgtatgggcacatgggacagcctcctagaaatccagttgcaagatacatggccagacctcttaagggtgggaacgcttgttctggttgccttttgcctttctccattagcctctctgcttcttgctttcattcaattgctccattctttccaccaaccagcctctgtctgcccacccatggctaccctggctggctgccccagaagagtggccttggcatctgagctccctctagcaggagctcttaaccttttgtgtgccattgactcttgccatctggcgaagcctatggggactgttcttgggataatgttttaaagcacataaaatgaaatatgtcacattataaaagaaatcattgat

SEQ ID NO: 106272 - DNA, 1107 bp, Homo sapiens
aggctgtttcttaagcttttgtaaccagctgctgccgcaggagaagtgtgttcatcagcatcgccccctgttcttcccgggtcatttgatgccgagtgatatgtaaattattgatcagagattttgcggaggcccacgcaagcaacatctggtgctggttagcaaagagaggcatgtatcgttttgtcttgcttttgagactttttaggaaattggagtaggctggcacttggggtgggggtgggatgggagtgatctggtgatcaaagaccctctaattctgtgttctgtcctccctcctcagtctatatcccctagggcagcacagtccaatagtaggttctgcagtgatcaaaatgcttcaagtctatgctatgcagcatgatagccactaaccatatgtgactattgaacatctgaaatgtggccagaggaaccaaggagctggatgtttagttttatttaagtgcattaagttgaaatatatgtatatatggcctcgtggctggtgactaccaaattagccagtgcagctttaggaccttgccatgaagatgtggttcttgggccagttcttggacctcagcatcacctgagaacttcagtcccagacccactggaaaagaatctgtattttaataagatccccagatggtttgcttacacattaagtgtgagccatgctgcttcagagttattgcctgaggagtggctgtccgaccaagtctaaatcaaaattactgacttgtaaaatgctgctgttcaggattggctagtcttaaaatatctcaaatgttgttgctcagctttgttcttaaccatctgaacttctaatcccctcctcccagaagaggagatagtttccaagacaaagtatggggagtgaaactgatccagggaagagcaaaagctatgtctttctatggcttcttgtggggatacaacctctaaatgcatattaatatttaataataagctgacgttttcgagcctctctgtgtatgggctaggccctgtgataaatgttttgcatgcacagcttcatttgatctttatagtagccctcgagatagatcgttattatgcccattttacagatgaggaaac

SEQ ID NO: 106273 - DNA, 1662 bp, Homo sapiens
gctacatgctgtgacccaaacgcacagccacaaacctgccctgtgggggcagttcctagctttgagcttaattaaggagcattaatgccagttggaaccgttttttttccccttcaagtggccaaatagagaaacatagaagaagtgaggttttcttttttcccttcatatatattcctttttatttcttgttatgccttcccaaaacagagacattgaacagtagttagaatggccatctcccaatgtttaaaaacaaactgaactccccaatgggtgaacaaagtaaagagtagtaacctggagttcagctgagtaagccgctgcggagccttaagtggtgaggtcttccaatttcagagtgctgtgtcttcaacttgtatcatcattttagtggaaaaacataatttaattttggtgaaatgagattcatctcgtgacaggattagtaacagcattcacagaatttcacactgaagaagtgaggttttctaaagaaaggaagtgttcttctgaggcaggggtcagagtcttgtcctgtgtttataggatttgcaatgtggatgcgtttcccttggggctgatgagggatacccagggggtctgtctggttctgaaatccaggatgctgagtgccaggctccctgtagaactgttgattttaaatgggccatctcagcttggcctccatcctttatcctcactgaactcaggggtgtccatttgcttgatttcaccctgtgcctttgctcattctcctagataagtatgctgttcgcttcatccctcatgagaatggtgtccacaccatcgatgtcaagttcaatgggagccacgtggttggaagccccttcaaagtgcgcgttggggagcctggacaagcggggaaccctgccctggtgtccgcctatggcacgggactcgaagggggcaccacaggtaacccactcttctgcttcttgaagccttaactgaaccagctccagggaccaagccagatggaaatcctcaagccccatgaaagctttttacacgtactccccgtggaaactggggtcatgcacacttcggaggcgcttgctgtccaaagctgttttgggagttgcggtttgacccacgataaatccagagtgagagctcgatggccgtgttatcacacctcattactgttagttgtgattcagattccttcctctgccaagtttcttgactttcagaacaggatgctgatagtcagggaacacagcacagtgtcattaattttgagggtttctttgcctgcacagaattcatgatgcgtccaagtgggctcctacccgtctgttctttcatggtaccaggctcccagaaatgcactgaagcagcaataagacctgtcccagcctatctcctcctctttttactctcagatcttaatggaggaggagaaaagactgaaatgttcaaagaattctgaagctttttagacccgttacaatttacttttattctttgccacagatgggacatgtttgattatgaaagatacaggcagtgaagaagtaaataaagtgagactcactccatcttctctcctcctcccccacctgggtctggaagcaaacggctctgggaagggaggaccttcaccctgtctgtcatctcattgtctgtcttcattct

SEQ ID NO: 106274 - DNA, 1859 bp, Homo sapiens
ctttggaggctgaggcaggaggatggcttgagcctggaagattgacgctgtggtgagctgtgatcatgccaccgtactccagcctgggcaacagaggaagactttatctaaaaaaaaaaatattagtaataaggccgggtgcgttggctcatgcctgtaatcctagcactttgggagaccaaggtgggcagatcacttgaggtcaggagctcaagaccagcctggccaacatggtgagaccccatctctactaaagaaatacaaaaattagctgggcatggtggcgagtgcctgtaatcccagctaatcaggaagctgaagcaggagaatcgcttgaacctgggaggcggaggttgcaataagccaagatcatggtactgcactccagcctgggcaacagagcgagactctatctcaatcaatcaatcaataaaatatctttccttatcatcaccttacagctgcttcctggatggacacactgtctccttgttgctcacctcccgcttcttccctacgtagccccaggcctcagagctgctgcttgaggggcttcttggctgcacagattagataccatgatgaggttgagatagtgttgggggtggaccttggggcaggagcctcaagagcttccaggaacagctgggttgtgtttgagagttgcacgatagcagctcttttgtttttattgatatccagaacaataattctttctctggactaggagctataattaaaccaaaatatttcccagctggggcagtgtctagggctctggcagaagcatagccctgcatggggatgctatgccaggcatgccccatagagggcactgtagcaggcatgcgccagacctgatgactgaaggaggctctccctgggccagctaagttgtctcagggctgcagttaggggatctgaggcagctccactgcccatccaggggtcaagagatgagcctggcaccagagccatgcagacatggttcaaacccggctctaccactttctggttgtgtagcgtgactggccccctccctgagccgcagagtcatttgtgaagcaggaatcacggaaaggattccataccacatgcgtaaatggtgctgtgcacaggacctggagccggagtggggtacgcatgccccgtcagcgggagctgctgttctgttcctgtgcttgttgctggaattcacggcaaagtgggtgggctggcaggtcacagtggctgcacccggtctgcagcacagtgcctggggtgagggctgaggaggaagggaggagatgcttggcctccctggcttctccaagtctacccggagaagaaaggacagtcagaggggcccacgcctcccccacacccctggagggagagctggactctggtggctgaagcagcacttcaggctcacagtgtgactcaggcttcttgccctcagccacaatggctcatgcccagaggagagaacagggtgtccaggctgttggtgcttgtgggcgaaatgtcagccatgctcctcctgccttggcctagaaaagggagcccccaccccgcagggcctgaggttctctctgccagaagttcagagctagtgccagtgggttcccatgccaccagggtgagccctctgtaaggggatctatgtgtgtccctcaccacggcctcagtgctcccaggaaagccctccaagtcatcaacacagcattttctattcctttctcccaggtatccagtcggaattctttattaacaccacccgagcaggtccagggacattatccgtcaccatcgaaggcccatccaaggttaaaatggattgccaggaaacacctgaagggtacaaagtcatgtacacc

SEQ ID NO: 106275 - DNA, 2158 bp, Homo sapiens
ctgtgcctgtcctgatgcatccgggtggagtaaccaccttttgcctcctaggctccaacatgctgctgatcggggtccatgggcccaccaccccctgcgaggaggtctccatgaagcatgtaggcaaccagcaatacaacgtcacatacgtcgtcaaggagaggggcgattatgtgctggctgtgaagtggggggaggaacacatccctggcagcccttttcatgtcacagtgccttaaaacagttttctcaaatcctggagagagttcttgtggttgcttttgttgcttgtttgtaattcattttatacaaagccctccagcctgtttgtggggctgaaaccccatccctaaaatattgctgttgtaaaatgccttcagaaataagtcctagactggactcttgagggacatattggagaatcttaagaaatgcaagcttgttcagggggctgagaagatcctgagtacactaggtgcaaaccagaactcttggtggaacagaccagccactgcagcagacagaccaggaacacaatgagactgacatttcaaaaaaacaaaactggctagcctgagctgctggttcactcttcagcatttatgaaacaaggctaggggaagatgggcagagaaaaaggggacacctagtttggttgtcatttggcaaaggagatgacttaaaatccgcttaatctcttccagtgtccgtgttaatgtatttggctattagatcactagcactgctttaccgctcctcatcgccaacacccccatgctctgtggccttcttacacttctcagagggcagagtggcagccgggcaccctacagaaactcagagggcagagtggcagccaggcccacatgtctctcaagtacctgtcccctcgctctggtgattatttcttgcagaatcaccacacgagaccatcccggcagtcatggttttgctttagttttccaagtccgtttcagtcccttccttggtctgaagaaattctgcagtggcgagcagtttcccacttgccaaagatcccttttaaccaacactagcccttgtttttaacacacgctccagcccttcatcagcctgggcagtcttaccaaaatgtttaaagtgatctcagaggggcccatggattaacgccctcatcccaaggtccgtcccatgacataacactccacacccgccccagccaacttcatgggtcactttttctggaaaataatgatctgtacagacaggacagaatgaaactcctgcgggtctttggcctgaaagttgggaatggttgggggagagaagggcagcagcttattggtggtcttttcaccattggcagaaacagtgagagctgtgtggtgcagaaatccagaaatgaggtgtagggaattttgcctgccttcctgcagacctgagctggctttggaatgaggttaaagtgtcagggacgttgcctgagcccaaatgtgtagtgtggtctgggcaggcagacctttaggttttgctgcttagtcctgaggaagtggccactcttgtggcaggtgtagtatctggggcgagtgttgggggtaaaagcccaccctacagaaagtggaacagcccggagcctgatgtgaaaggaccacgggtgttgtaagctgggacacggaagccaaactggaatcaaacgccgactgtaaattgtatcttataacttattaaataaaacatttgctccgtaaagttgccttggtgttcttggatgatgtcgcttctgaataaattgtttaatcctaggagttcaacaccctcagcctgggtaacagcaagacccagcctctacaaaaaattaaaaaattagccagcatggtgatgcatgcctgcagtcccagctactcaggaggcggaggcaggaggattgcttgagcctgagaggccaaggttgcagtgagctgtgtttgcaaccctgcactctagcctgggcaacagagcaagacagtgtaacacacacacacacacacacacacacacacacacacacacaggcacatcgttggagccccagatcagctctcccaaccccttaagggacacaaaactagcaacttgttttgacaatgaacctgggctccttttgtgggggtggggtggggctggtaaacaagctgtcacc

SEQ ID NO: 106276 - DNA, 1044 bp, Homo sapiens
tctgacacctggctgtcaattgggatcaattgtttgcctctgagaggagggaggaagagagtggaggaaaggtcctctcctcccggagggagcagccttatctgtggcctgcaccaggaagcactgcttcctggactcctatctgagaaggtccgtgggcttcgggattctgcagtggcgggcagttcccccacttgccaaagagtccattcaggctctgcccggtggggtctggccgggccacagtatcatgctagtttgcccacagaggagcacagggcgcagccattggtctctccactgtgaagcctggcggctttctgttgggggaggcagcatttgtaaattaacagcatgggctttggtgtcaggcaccccagagcttcaacgctggctctgccgttcattagctgtgtggccctggggaagtcgccttgcctcacctctctgggtggtcgtgaggatcaaataagagcccacagggagctgtaaggaacaattccctgccagagtctcagccactgctgtctgtgaccaacacctgctggaagtgatgttcctggcagaaggccgccccctggctgcttgttggcatctggggctacacttggttgtcccctgcatgggagcgatggtgatgttaccctggggtaaatttccccactagaagccactgcctcctgttacatcaaagacatcccagggtgggatgcacctctttatcagtcaatggctaggaccacagggcaacccttacctgcacctgggcttggctgctatggaaaccagctgtttgtgcaaataccttgaaaactttgaaacttgaccccggacaggcctggtgccaggtcctttccgacttttgtgttttctttccacctttcactactgactttgcctctttcctaccaggaatggacagggccgatggaggtgaagcggacagcagctgcactgccctgtagagattcccaggccctgcccacttcaaagcacacaagcccacctcttcctcatcacatttccctttgcaacccagggagg

SEQ ID NO: 106277 - DNA, 1058 bp, Homo sapiens
gagacctactccacagccctcacaccctttttctctcttcctcaagagctctcaagagcaggcaggaaatggagaatctacgagcctgacttgtggcacggatccacatatccaagggtgttttgtattttggactcgcttatctccccgggacaaagtacaaagatgaaagaatctgcaagccttttgttgcccatgtttctccctctgccctgactgccttgccaagataccaaaacacctctccctgtcgggggctgccctccctttctaggaagtggacgtgcttagggcaaagctggtgctgaaccccggcagggtgtattcagaggaggagaaaacctcagcagaagcaccaagtcctggaaatgccagcttcaggcccagctacaagcagcctgctccatagcagcagaataacctcgtgtagcagcagcattcagagaacagcgggtcacatgctgcaggttcaaaccggattccaagcccagcgctgctgcttaccaaccgagatacctcaggcggtcaccttctctgtgcctcactgctctcatctgtaaaatacggaaataatgggaaacttccattctaaaatcagatgaactccagaaaggcatctccccctgcctccctcccgctcagcacatccaccccgcaactggcctgggcaaactttcctcaacccaaagctgttgagagagggactgcctgagtgttgcagagattcggctccccaaggcagactggaaggggcaccccagctagggaaagggaggcttatggagaagccattaagcgtggtggctctaaggttgggctggggattcaaatcctggccctgccatgacctctggcaggcaggtcactgatccttcacagaaaactgtgcctcagttttctttccaatgaaatggggtaacaggacccaccccatagagtgttctgagaactcactgacaaaatatacgtaaagagcatttcaggccaggcatggtggctcactcctgcaatcccagcactttgggaggccaagatgggtggatcacttgaggtcagga

SEQ ID NO: 106278 - DNA, 1048 bp, Homo sapiens
ccagccctcatcggctgcatgtatccttggagatgaggctctgggagcccaaacacaggccgcagagctgtgggaagagccattcttccctcctccacctctccctgcccctggggagctgtggacctcccagaaccaggcctgctggaaggaatgcatccaaaaggaggccaccacccaagttgcctggaagatcaacgatggccacaagtacctaagggaggggaccgtgcccaggaagcagctccagcaggccccatccaggtcagccttggtagcgggcccagtgcctgccaccagctcccgtgatagcaaggaggtacaggttggatggccagagaccaagggggcccagaaccagctgtccaagggagtgggtgtccaggactccccacccaagggagacagagtctggaaggccagaaaagcaactcaggggccagcaggtcagaccaggccggagagtttagaaatgaggcaggtctccccaagaatcctgcagctgctcttcccaggcatctcccacgatggccaaggccacgccctggacctccaggcacggcatcggctgaagcccgaggagaagttccagtacccagtcatgtcatcctaggagtacagctggcacgtgggtaagggccaccaccatcttgccattccaggcctctggcaggcaggcctggcctccctccccagcctcatccttcaccacccctcaccccggctcatggacctggatcaccttcctctgagcacatagaccttggggatgtgcttaggcaccttcacacttccaggccttttcatgctctggtctctccacttgggatgctcctcctgctgccccaccctgatgaaatttcacacatcacctcctctgggaagtcttctgagatgcctccaagcagattagttgagcccaccttcatgcttctgcaggtttttgagtccacagaagcactgggcacacggaatcaccattccttatatatccatctggcctggggagccctttgggttccaagacttcttagttaactttattcat

SEQ ID NO: 106279 - DNA, 1037 bp, Homo sapiens
ggtctctggtggtctgtctcttagcctgaactgtcagagaggagctagaccacttaaaactgcgaatgcaactatcttgtctggttttccctgggcagtcttgggaatgtgagtgagcatcaatgtgggaatggattcccttgagatgcacacagcagccttgcacaacagagctgctggaaaaacacctgccaggttgaatcaaacaccaaatgacccccgggttctctagagttacttgattgaatgcaacaaatattgatccagcagctcctgtgggccgggcctaggctgagctcccggggaatgaggggtcagatcttggagctcacaggacatagtgaaaagggctgtatgggggacagtggacacctttggtgcacagaggagccttcctgagggaggccattgtcatttctgtcattgaaacaatgctcagaaagaccttagcacagtgcctggctctatacatgtgatttatattaataataattatctccatcagcagcaagtcttcaagctccttagaaaaggaatggctgcagcatttctcaactgggattctgtgaataaatgaaaccctacagaaaatgacaccagtgacttttctcagtcctcccaggaatgacaccattctacaggcatgggaaagaagttgattcattacaaacaggggctgtccccgaatgttagggcttaattctttctggaagtcagttaagaaaggctggtggggagtttatttaggtatttaatgaatacctgtttgatatctgcgggcattgttctaagccctacactgtccagttcggtagtcatgatccaaccacatgtccattgagcatttgcaatgagtcttatccaaattgtgatgtactctaagtataaaacacacactgaatttcaaagatttagtataatgaaatgtaaaatttctcattaataatttttatattgaattttatgttgaaatgaccatacttggatagattgggctaaatcagaggttgacaaactttccctctgaaagactggat

SEQ ID NO: 106280 - DNA, 1039 bp, Homo sapiens
cttcttgttctttgccagtacaataaaggaagatcaccatcaccctgtagatttaatttgcatatctcttattataaatgagattgagcatctttttatatgtttaagagtcatttgtatttccctcctggtaaattatctgttcagatcatttgctcatttttctattaggttttgttgttattggtcttgatttgtaggaaccctttatacattaaggaaattactatgttgtctctattatgtatttacaaattttaatcttatttatggtatctctttccatgtggagatttaaaaacttttttatgcaactaatactctttgttatggcctctggatgttagacattacttagaaagccctttcctatggagatacttttaaaatagaattctcatgtttcctcctagaacttagatggttttattttttatatttaattctttgattcatctgaaacaattcaggggtttttctggtttcatttcctttgctcatctcattctcttgctgctgagcagtttgtagcgcctccctgcttctgcccaacccagttttggagcggtgcagcccccctgacagtaccagtgccatcactctggtaacaatattatcctcacttgcccattggttgctgccttgcttccattcctttctgaacacactgtttaggtaagccctaaccccgatggaggagagctttaactatcgttccatgcttgactacttaccagatttcttctttgacctctgtcaattcttcctagtcctggctcattatctgagacgccctgccctttgtgcacgtttgccttattgcctcactgggggaggtgacctgaacaagaggcatagtataaagccacaagctgtttgtactttgcctgtgctgaggaaaagagtgctccaccttcactgaagccagcaatttggccggctgttagcacttcattcatattccctagtatgagttaattctttgtcattttatttcttgtgattccagaatctcattttcagcttctgccagagccag

SEQ ID NO: 106281 - DNA, 1035 bp, Homo sapiens
ggcaggtcctcctaagacttgagggaatagatcccattcagaagttgtgaacatggctcagttaatagatacggcctgtccctcaggaaacacccagaatctgatgctgtggcatgttccacccctgaaatccctttttagccatgaagtagcattcctttctcccagcactgatctcttcccagaatagagtggccaaatgatgttttagaaaactccatgttttgggttgtcagggatatgaaaacaccaagagaaaaataaatggcagctccaaaagtctttccttcctaggagagaaggagcacctgcacactcagcccaccatgtcatattgtgttgtgattgcacgtctgtgtcttccactagggactttgtcttaattggctgttctatccccagactttagcacagtgcttgcatgaagtaggtcctaggtatagattggatggattgatggatgagaggatgcctggataatgcagggatggacaatggatgggtgggtagatgcaggatagatttttgcatgaattgattgatgtgccagtgcacagatgatttaggtctgcaggatggatagatggctgaatggttggatggatggatggatgggaggatatctggttaatgcagagatggaggttggatggattgatgaatacaggatagataggtagacaaatgcatatgtggttcaggatggatggctgcattgagcagaggtggaggatggatggacacaagatgaatagatatgtgggtacaggtggatagctgaacaaagaaaatctctgatgctgagcacaatgttgttattcaacaaattgtcattgtcctcatgtccaggctgaatgagttagagtctagtgatgctccagagggttggtttagtccatagcagccatggctggttcttccccactttcagtcagtgcacaggactcctgagagagtgtaattaaagggttcagacctgtttgcaggtagaggagaggagtagaggagtacagccactaatgtgaaccctgtact

SEQ ID NO: 106282 - DNA, 1049 bp, Homo sapiens
acagagtgcacacgtgggtgtctgaatctttgtgtatcatccagctccctttcttgcccagcaggtgctggatgtgtctggggcagacatgttggccaagtcaattgccaactgccaggtggagcttctggaaaactgtgggcactcagtagtgatggaaagacccaggaagacagccaagctcataatcgactttttagcttctgtgcacaacacagacaacaacaagaagctggactgaggccccgactgcagcctgcattctgcacacagcatctgctcccatcccccaagtctgacgcagccaccactctcagggatcctgccccaaatgcggtcggagcgccagtgaccctgaggaagcccgtcccttatccctggtatccacggttccccagagctttggggaccacgcgaaaacctccaagatatttttcacaaaatagaaactcatatggaacaaaataagaaaccccagccatgaaatctaccatgaagtcttcaagttcatgtcactgagaagcttgtgcaaagcagccaccttggaccataattaaatcaaggacattttctttgagacattccttatagttggagactcaagatatttttgttgcatcaggtgtattcccttgcatgggcagtggcttttataggagcattagtcctcattcgctgaaccctgttgtttaggtctaatttaagttttacatagagacccatgtatgactgcagcccattggctgcaagaccagggaggaaagtggcaagctgtagaaaatgtttacacgcatggaggggcattgctctagccctcagagcgtccggagcagcagggtacatgggtgggaggttcattcagcacccaccagtcaggtatgttctgagtgaacccacagcagtcgcagaatgagcacctggcagggtgggtttcctaggaataatttattatttttaaaaataggcctaataaagcaataatgttctagacatctgtctaagtaatcagactcaggttccacacacaagcaacaactcgtgggcctctt

SEQ ID NO: 106283 - DNA, 2023 bp, Homo sapiens
tctgtttatgtaaaatggtaattgtaaacattgaaaaaataacttagagatcagtgctttagctaggtggcgaaagatgtaataggattctgtttttattgtaagggtgtgtgtgtgtgtgtgtgtgtgtgtgtgtctgtgtgtgtgtgtgtgtgtgtgtgtgtagagacagcgtctcaccatgttgtccaggctggtgtgtgtgtgtgtgtgtgtgtgtgtgtgtgtgtgtgtgtggagacagcgtctcaccatgttgtccaggctggtctggaacgcctgggctcaggccgttctcctgcctcagccccacaaagtgctggtatacagatgtgagccaccacacctggccctgcagatcttttctttaaaaaataaaataatttagggtagaaaatggcagttcttgtagggatgactgaccacaaaagacagtgactcacaggagacccatagaggcagatgtggtagagtaaaaaactgtagcattgtcttgcgtaattttttgactgttctgtgttcttgtcattttagctgtaaagtttgactgagaaatgttgcatcagccctgaagtttattgagaaaatcttacgctgatgcaaactttttggactgttagtgtcttatgagtaagtcttttttaaaacaggaactgttggaaattattttggaaagaagtagttgttaagaggggtatgtagaagagaaaggcactgttttttcttggggagattgaagttggctttccagcttggtagctgaagggagatggtgttccagaagtcagagctctactctcgctttgaaatgctgaatctctaggaagttactccttggctgtagacagaaacatacggagttagagacagacttggggttggaagaggcaagaccttaatacaggtctgagctgatacttgctagtcatgtgatataggctgggcaagtcacttaaacctttttgaagtttagttttgtcatctgtaaatgggagtaataaatgcctgccctgcctgcctcccaaggttgttaggaagatcaaatgaaatcatcttgatgaagtatttgtaaaatgtattccttcctccctccatctcttcactccctgacaacatttgtgcaaagcgttaaacacattagagggcgttattgcaagcaagctcatttctgtccatagttcctttcatttatcaagtttgtttaaccttgggaaacatatatatatatatatatatatatatatatatattttttttttttttttttaataccaatggggttcttgctgtgttgcccaggctggtcttgaactcctgacctcaagtgatcctcccacctcagcctcccaaagtgctgggattataggtgtgaaccactgcacccagctgggaaaccacctataacagaaatgatttaggatttgtgaacttggtagggaaaaattctgtggtttggaaaactgagtcaccagaaggatgaagggaacacaaggtcaccaccagaaaggcatatttggatgagcaactggcagaaaggacatgtgttggtaggtgattctgtgctttgctgatgctgatgcatcatttttatggagcaaaatgaatttagcattaagagctagaccagccctctgctgcaaggaaatgaagcttctataaaatcagaaaggctagtatttagggggaggatgctttcaggttaggtttggaggaagaaggaagattttccagacaaaaggaattctggtgaaaagccacacaggtgagttgtgagaaaatttaggaggaccaagagaggacaagggaaaggtaagttcttggctatataaaagggaaaactttttaaagttagtagactaaaaaaatgcttacatagctgaaatagaaaccagaggaaacaaagttttggaaagcgctgttatcaaatgtgcacatccaatttttgctggtgggtaggctgtgtgtgatagcttttcatctcagttttctcctttttttggggggtgggggacagagtctcgct

SEQ ID NO: 106284 - DNA, 1048 bp, Homo sapiens
tgtgataaaccaactgagttatgagcatactcatgacttccacaactcatcccatgcttcctgtgtgcccatttggaagctcctactctattctaggttaaagggaaaaaatatttatgttattgttttatcgatatttaagttattatttttgaaaagtagaaacagaagccttatagcctttaacgtatatatcctgaaacaccttctggggcacctcgttgttcatcctcttccagactcttagtaacccaccataaggatctcagtttaaaaatctgaagaatgattcttctctgaggtcaaggttgcatttgtagacttcaggagttcattagttcattcagcagatactgctgtgagtatgccctgtgttcctggcatggcctaggcacttggggtacaggtctaagcaagacagacttggttcctgccttctttgttcattcattccaactgggtttattggtgaagattctggggtggggtaaaagatggaaaagaaaggttagagccaattgtggggcctcttggatgccaggctaaggaatctgaacaacagtgagggggggtttgggtggaggtgtggctcataaaagtggcattttaggaagcttaatttgctgtctgtgtgcaaggtgcagtggaaagggtgaaggaaggagagaagagagtcaaggatgctaatggaacagtgaagttagagaggccacagctcaggtctatggcagggagaggggaggaacacaatagaggaaaagtctgccaagtagaggccacaagggaaacagaggcatcaggaaattattagagaagtagtacaaggtagatgaagggtagctggttttcccaggaagatgatgagtctgtttggttttagacaccttgagtaatactgaaaagggagtgttacttgtcataatagatgacattgtttaagctttcactatgtgccaagccaagtgctttatagtaattctataattatttttcttttttcttttctttttttttttgaaacagagtctcactctgtcaccaagctgga

SEQ ID NO: 106285 - DNA, 1068 bp, Homo sapiens
tgtgtgtgtgtgtgtgtgtgtgtgtgtgtgtgtattttttgtagagacagggtttcaccatgttgcccaggctggtcttgaactcctgggctcatgcaatccacctgcctcatcctcccaaagtgctgagattacaggtgtgagccaccgtgcctggccaggatttcttattttaaagtatcatgttttaaattacatgtgtagcaaactgagaaacttttccaaaaattgtttttcctgattgtaaaaataatttatgctcattgaggataacctgaaaaacgtaggaaaaaaaaaatagccaaaagtgggcatagaatctaggacaacagaggctggagtcatggtactccttcttagaaatcagagactgatacaattgtttctcatatttaaagagaatggctgctttttgttttttctgggtgctcttcacagtgctgccaccgtcttctgtgcttgctgattagagtcgtgatatactcacctgcagacactttgtgtttgctattttcttagcagggaagaaaacagttacaaagctggccattgtgctggctgctctaaatatactgtcttctttcatattcaccatgactctgaaggtgtgatttagcaggtgaggaaactgaagcacagagaagttaggctgcaaagctaataagcagtcgttgggcttcgttccagatctctgtgactggaaaatgtgtgccctcccctgctggggacttgtggctgtgctatggaggagggatggcacattgtggctgatcatgacacagtgaccagctcctccttcaggttccagaagggctcccagggggcctgtctttgaggcagtggaaaagggggaaggtagaggagacatggcccaggagggagcgcttcagtctccagcaggtactcaggtcagtgccagtgaagggcgtgagggatgaggagctggccacctcagataccagagcccaaagaaaaagcatcatttccagcggatccgagtttctatgttgttgtctattctagcctactaaacatgtagtgggtagttctctgagatcatgttcactt

SEQ ID NO: 106286 - DNA, 1112 bp, Homo sapiens
gagagagaaagaactcagtctctgttccttagacttgagaaggaacccaggccctgccccttccagtgttgagaccttgagtccgtcatttctttttttttttttttgagacgtagtcgctctgtcgcccaggctggagtgcagtggtgcatctctgctcactgcaagctccacctcccaggttcacgccattctcctgcctcagcctcctgagtagctaagactacaaggcgcccgccaccatgcccggctaattttttgtattttaagtagagatgggatttcactgtgttagccaggatggtgatctcctgacctcgtgatccgcccaccttggcctcccaaagtgctgggattacaggcgtgagccacagcgcctggccgagtccatcatttcttctcttgggtttcactttcgccgctgaaataaaggggttgaactagatgacttctgaggtctcttatagcacaaatgttttgtaattagaattttactgcccattgttgaccttggagagacttactgtactccaggggacagcagggggttgagacaaattgagggtctgttgaaagcttagaactccctaggatactgactggaatatggttgaaggcaatttacagatcatgaagatctgatgttggaagtaaagagcaatgaacagattgaggttgaaagtttttcattcctgtcttagcccagggcctttgtatgttctgtttcctctgcctggaagttgctgtaagcttgtggccagtgccatctcatcccctgacgtggtggctcacgcctgtaatcccagcactttgggaggccgaggtgggtggatcacgaggtcaggagatcgagaccatcctggctaacatggtgaaaccccgtctctactaaaaatacaaaaaattagcagggcgtggtggccggcgcctgtagtcccagctactcgggaggctgaggcaggagaatggcgtgaacccaggaggtggagcttgcagtgagccgagatcgcacactgcactccagccatggcgacagagcgagactccgtctcaaaaaaaaaaaaaaaaagttttccctccagataaaagctagttttctgaaactgtaatat

SEQ ID NO: 106287 - DNA, 1242 bp, Homo sapiens
ccttctaccgatcttatttttcacaattcaggaaaatcaatgtaagttgctaaagtaatgaaatagcaggttcatttttaggtgtcagttatccccatgatctgcccatgtaggaaatatgcaccaagtagtgaaaggtatagttgggacaggccttgcccgtcagcccttgcagcgttgctgtatctctgggaggctgagttgaaatggcgggtggggtaaggagggaggtggactcactgattggaaaactgtggagggtcggaccaagacctttgggatacctcatgaggttttacagaaggctttggagttgcatttacgttaccaattaggaacggggctatccctgggctttgtttctcagagaagccttggggcaggagcgcgagggtccacaaagccaaagtgaagggtgaacacgctgctactctttcttccacagacattggaaagtgtggatgtccactgctttggccacttactgtatgaaatgacttatggacgaccgccagactcggtgcctgtggactccttccctcctgccccgtccatggctgtgggtcagtatggggttgggaagggtcttctgggccctagtagtgtgcagagccactcatcccctttccagagtccaggaaagacccagaggaagttgctgtcctccacagccagaaattcttacaaaatttaaaagtagaccaaatttgagtagtttacttaaatacacttctgtgaaaattcaggtggcttgtccatttgccaggctatctgaaatttctgggaactttttgcaaaatgctttagagctttggaagcaggaggatgtaaagagaagtatggcctgcatgagtgtgatgcagaagctagagccaggcaacttgaagccagtcttgaggacccaggcaggtgtcagacgtcagatcaagactgaagtgagacttgtaagaaacaagagaggccaggcatggtggctcacacctgtaatcccagcactttggaaggccgaggtgggtggatcacatgaggtcaggagtttgagaccagcctggccaacataatgaaaccccatctgtactaaaattacaaaaattagctgggcgtggaggtgcatgcctgtaatcccagctttttgggaggctgaggcacgagaattgcttgaacccgcctcttgggaggtggaggttgcagtgagccgagattgcgccactgcactccagcctgggcgacacagtaagactc

SEQ ID NO: 106288 - DNA, 1221 bp, Homo sapiens
ctcctcactcagcgttagcattgtgtgtacgtacattagcattgggtgtgcgtatgtgtcgcagcccccagcttaggaaatactgaaggagggccctctcaagtggctcctttctgaccctgcatcagcaaaccagttggcccccagctgtgcatagttcacaagtcacagggccttgaagggtctgccctccaggaagagggcaacgtgtttctgagcacccatgcttctgcttgtgaatttactcactgggtactatttattaaactctagcatgtaccaggcactgttctagggtcttggagctcagaagacattttctctgaaactggattatgagtagataaccagggcagctgaaatagtgctgtggggccttcccttcaggtgcattttctgttctttcatggaaaggcagcagagtggttaagaagggtgtgcctggggtgggacagacctggaggtggattccagcttcaccacttctacctgggtgaccttagacaaatttcctaacctctggaagtagagttttgtgaactgtgaaatgggaatgataataagttcccacctcagaaggtagttgggaggatttaatgaggtgattcctagtagggacccggcacttaatatgtgctcattaagtgttagttatgcttactactgaatcagctgatcttttttgaatatcacacaccatgcagtgtatctggtgctttgtctgcaccagcgtattatataacagatatactctgaaaacaataatatggggaaacgaggcaggggacagcttgaagggcatgtagccagagttcagagaaggtagagataacttccggttcctggttctttctttccacaagtgtttagagagggccttctggaggccagctgctgtcctaggcactgtaatgaaaagaggaaaccaagcccctgccccgtggatgtgacattctactgttccacagacactgaagcgtctgtcgccaaaccagcaaccattaataataatgtaataatgtgggccgggcagtggctcatgcctataatcccagcactttgggaggctgaggcgggtggatcacttgaggtcaggagttcaagaccatcctggccaacgtgtggtgaaaccctgtctctactaagaaaatataaaaaattagctgggcatggtggcacactcctgtaatcccagctactcaggaggctgaggcagaagaa

SEQ ID NO: 106289 - DNA, 1038 bp, Homo sapiens
ctccttgaaagctaagactatttccagatgactggggtgcagtttttttggggaaaaaaaaagagtcatatgataatcagccgagaaatagcccatgtagtttcctagcttgctgggcagattatggcgtaatgtaattggaggaaacgattggcctgagatagtaaagtcagcattttttgttttatttctgcctttagttttggctgtgacttcttcactgtgttaagttatggggctgaatattaccttgtctgcagctagtttaatggtatgcctggaaaatatttttattctaactcccagcttcactgtgtttattctttgctttcctctccctccctcccccttttcttttattcttaaagaagtcaaaacgatctgctcttgaaaatagtgaagagcattcagcgaagtacagcaactccaataattcaggtaactggttatagatggtagtggggcccaggacacagagatcaggatcaggagtctctagttggtcaagaggtcttgagttctgctggccagaaactgggcaatgtagtaatgactacagagaacaaaataactccgtctctaatgaaagattgcaacagtattcgtaggcttacagcactcaaatgctagaagggacttctgaggtaattgggtagctcaccttcttcactgatggcagcacttgatcatctaaagacacaggagcattagtcatggaaggaaaacagacctgacttaaaatgtaaggcctcctgttttttagtagagcctgcatgaacagaaatgaccttaaatcctgcccactgctctggaccccatgtgatgggaggatgtgctctcctgtgtgaattaaggaaaggactcgatggtgtgtggggatggcaagaaaccgagatggtacaaagagcactgtcctgagttggcagtccttgctgccactcccagctgcccttcacccagctctgctggctttgggccataatgtcccatctttggaaatcagagccagattgaatgatccctgggggccttccagtt

SEQ ID NO: 106290 - DNA, 1015 bp, Homo sapiens
taattctaatagcattctctttaaaattatggcaaagtttatatcagttgtttttcccatttccaaagatcagatattctgtcaaatactgccctccagaagctgagatggaaaagatgggtttaaattagttagagaagcatataggtggtacctaatttaagtagcaaggcaggatttttagttcttagaggaaaagtgagacacaaaagaataagagacaggataggtaggaaggaaaccttagactgtgtgaatctattctttgctaacaacagacgctacaaaaagttctcatttgaaatatcttgtcaagctacagacaacacgttttcttgacatgattttaataaaaaatacagctgacataacagattacatgaaactatacacaatgacattctctgcatagtaaccaacactgatgtgtgtacttgaatttttaaatggattatttataatcctttaaagtgcaatttattgaaaggtttaagcaaatcaggataaaggatctttctaataaatgactaacattaaagagatgctatattgatatatttagataaatctttcaaaaatcataattgatttctatagatgccaaatttacttctgttgtaacaatgacctgcccccctcaaaccccaaacttaattgctgaggattaagaagatcctctaattggcaagagctttttctgatgttaatatttttgtctgtttcaatacatctaactaaaaagaactatgggtctagagtagttgctttagcagccctgagttctataaccacaatggtattcctgttagaacttaagagaatgttgtgaacgttccccattctatttgaggagaaaacaaagaactcagttgctttctgatttagcaaagtaactatgctttgggctatagtgttaatgtctaagataaaggtagcaaaaattggagttatctaagaatcagaaaatgctttagagaaatgaactgtaagaggaatgtttctaggagctgtctga

SEQ ID NO: 106291 - DNA, 2437 bp, Homo sapiens
ctgtgggccactgcttagaagctgcagcagtgctatctaaagaaggagttgaatgtgaggtgagtggacatttacttgttcttaaagaattagaagggctccttttagatttaagacccagaagagttctgtaacaggttaattagatgtaaaaccttgctttgtcactcatttctgtctctgcttaaagctgggaacctgcctgcagttcacatacttagctttttaccactcaggtcacttaggttctggatctttttttttgagagacagtgggagctctctgaacctcttctggttctcagtgataccccccgagagagaaaaaaacaggcttttgttctgttgcccaggctgaagtgcagtggctggatcatggctcactgtaaccgtgaactcctgggcccaagtgatgctcccacctcacccttctgaggttctggatcttttagaaactcaccatgtgctagttatacttgggcaagttatatactctaaatctgtttcatcagctataaaacagggataatataaatactgtcccgtcatagggctgttgtgagaattacacttagtgtagtgcttggtacatgatgggcactcagctgttaactgttaactcattttgatgagggaatttaaagtgaaggaggattggctgggcgtggtggatcacctgaggtcaggagttcaagaccagtctggccaacatgttgaaaccccatctctactaaaaatacaaaaattagctaggcgtggtggtctatgcctgtaatcccagctactccagaggctgaggcaggaaaatggcttgaactgggaaggcgggggtggcagtgagccgagatcacgccactgcactccagcctggacaacaagagcaaaactccatcccaaaagaaataaaaaagtgaaggaagataaatgaatcctataactgcacagagctgcttgtggtagacatacagatctttgttttaattaaaatttttccttttacagtttgtacattcatgaataggtattcataggcagattagattttcctagatacaaagattaacaggaaacaaaaaaggaaatggtattatggggataaggctctatttgtgctgcaatagctctgtaaacttgattatattacctgtttaggtgataaatatgcgtaccattagaccaatggacatggaaaccatagaagccagtgtcatgaagacaaatcatcttgtaactgtggaaggaggctggccacagtttggagtaggagctgaaatctgtgccaggatcatggaaggtatttcaaagaaactggttctagaatacagtcaagctatagtaaacatcatgtacctgaatacgtacaggataaagagattgaaagctaggagtggccaaacgacttcaactttaaacttgtaagtttggcatttctcttcaggcagatatttttaaaagcaaatccagaaagcggttccccataattagcattccttacattttctcttcctggtcagccacacctctgtgccaaggtggtagtgcccagctggcatttgcactctctcagttgagccttccttctcctaggtcctgcgttcaatttcctggatgctcctgctgttcgtgtcactggtgctgatgtccctatgccttatgcaaagattctagaggacaactctatacctcaggtcaaagacatcatatttgcaataaagaaaacattaaatatttagtttggacttgaatatcaagtcgttgaaatttatttgaaatacttgctggcactgcacctggatttgtactgcaagacctgactattcataacggaaaacgatttctaaagcaacagcaggtatttttgtacagggaagtttaaatgtgtttgtgtatggaaaactctccactctcctcccctagatgccatgcttccttttgtctgttacggttgccatgttctttgaataacaaattatataacattttatcctctctcaccacaaggacaaagtatggatgtggcagagtcctcatgaaagatgtatccaaacaagataacttatatgtataaaattaaagcatataatatacatttactgttagtttgttttgataaggaataaaggaatttctaacatgactaatttttttttttttgagacaatgtttggctctgttccccaagctggagtgtgatggcacaatcttggctcactgcagcctccacctcccaggttcaagtgattctcctgcctcagcctcagtaggaaattagccaccacatccggctaattttggtgtttttagtagaggtggggtttcaccatgttggccaggctggtcttgaacacctgacctcaggtgatccacctgccttggccctcccaaactgctgggattacaggcatgagccaccacacctggccatgactattgtatt

SEQ ID NO: 106292 - DNA, 1207 bp, Homo sapiens
cagagtgctggaattacaggtgtgagccaccgtgcctggccttgttttgtctattgtgagtaatgctgctgtgaacattgatgtgcaagtatatgcttgaatccctgctttcaattatttggggcatatacatagaagtggaattgatggattgtatgttaattctcctctccttcctttttttaactagattttaccattcattatattaaaagagcaactcctacattctggatgcaaagtatttggcagtacttggcacctagtgagcactcagtacattaacacatgcaaagaccaactatgtgtaatagaaatgttacttttagaattctttgagtttttagagagaagcttgttctagtgtttttatattgtatgctgtgggcagcctaggtaaatataaaggaagaaaatcttagttgaatcccaaacaattctgtattgactgtttttgcatacctgtgacaggtgacagttcgtgatgctataaatcagggtatggatgaggagctggaaagagatgagaaggtatttctgcttggagaagaagttgcccagtatgatggggcatacaaggtaactaaaatatatgaaagttatacaaaattgaggtcactgttacccccagatacacttaagggatcaactcttaattgtaggttagtcgagggctgtggaagaaatatggagacaagaggattattgacactcccatatcagaggtaagccttccagtgggaagcagaccctggagggcatgtctgttagtgtccattatcctcatttttatggattttcacttatgtttatattttactttatagatgggctttgctggaattgctgtaggtgcagctatggtatgtaatactctttatgaaacttatccaaagacatttcttgttttctttttttttcttttgagacagagtctcactctgttgtccagcctggagtgcactggcaccatctcagcttccaggttcaagcaattctcctgcctcagcctccatagtggctggggttacaggtcgcgccactgtgcctagccaatttttgtgtttttagtagagatggggttttaccatgttggccaggctggtcttgaactcctggcctcaagtgatccgaccgccttggcctcccaaagtgctgggattacaggcgtgagccactgtgcccatccccaaagagatttaacatc

SEQ ID NO: 106293 - DNA, 1678 bp, Homo sapiens
ggctcacagtaggtgcttaatgcaatcaatgaaagctatgatgtgcattataaggaatcaacagacagcactgtccagggaagactagactcactcatgaagtgttaagttccccatcagtagagcgtgtgcaagcacttcttggtgcccaaaggattccagcacccacaacaggttggcctaactcttaaggtctctccagcttccagagatcatgctcctcagggtctgacttctagtccccacgcttcaagtaacaccgaccaggcacgtgtgcccagcgtgcaccccgcctgtcggtcaccgcctactgtcaataaagttgatttgaggcggctccaggcagaggggcacggccacccacacgccacctcagcccggccccgcggcccctcacccggtgggcgggtgggcgggtcacgcagccggcgcgccttgccattggcccgcgccggtggaggcggggcctgctcacgtctgccggcccctctgttgtcgtttggcagcggatagaggacacgaccaagatggcggcggtgtctggcttggtgcggagaccccttcgggaggtaggcagcagcgcgcggcctgtattcccacgcgacccctgcccaccctgcgtcccgccgtcatcttcctctctccctgccaggtctccgggctgctgaagaggcgctttcactggaccgcgccggctgcgctgcaggtaacaggcgcgggtgctcgtcggacgagggcggggagggtccccccttctctcgggaaggaggccggagtcgcgcctgcgctgtggccttccggcgccgtgggccttgggtttgcggagccagcatcctccgtggagctcctgctgcctctgtcgccgcctggcaattagcacaccggcgagtcaccacctcacagctggctgggcaatgggggaaaactaagactaggcgtttcctccctcactccatgtttttttctttaaattgcagcaaaatagacctaacttaaaatgtactttttagaagtgtataattcagtggcattaagtacattcaccatgttgtacaaccattaaccaccatccatttccagaactttttaatcatcccaagcagaaactgtccattactcggtaactcctcatttcccttccccaaacccctggtaacccctgttgtacttttctgtctttatgaggttgcctattctagaacttcttataagtggcatcatttgtccttttgtgtctggcttatctcagcgtaatgtcctcaaggttcatccatgttgtagcatgcgtcagagtttgattctttcctaaggctgaataatatatatatgtatatttttttgagatagtctccctctgtcacccaggttggagtgcagtggcgcgatctcagctcactgcaacctccacctcctgggctcaagggattctcgcgcctcacactcctgagtagctgtgattagatgccggtgccaccacaccgggctaatttttgtatttttagtacagacagggtctcaccatattgcccaggctggtcttgaactcctggcctcaagtgatctgcctgccttggcctcccaaagtgctaggattacaggcatgagccacctcgctcagcccgacattttcttttttttttttgagacggagttttgctcttgctgcccaggctagagt

SEQ ID NO: 106294 - DNA, 1021 bp, Homo sapiens
tagcatgtggaggcctgtctatatccaactgctgagtgtaaagaataaaaactgactgccccatagtctggtccacattttagttgtgtgctttgaaggatttgcaaggtagagaaatagatgcttcaggctctgatttcagcccatgctgtgctatgcaaatgttctctacatgcctgagtgaccttttgagaaagagcctttgtgatcttctgtagctagggcttgttctgggaattctgtgccagattcctctaaaagtgggaaaagtgaatctgttaaaggaccacgtaaaaaagccagtgcttttcctggatgaataccaataagtccatgtttcttaccatgtcttgccagagctttagaaatttgctctgcagtttgctttacaggttgatttgggattgaagtgtgtgagagggaactgactaaggcagttcagtagctgggaaactgtttgtttaaatgcttttgaattgtagataaaaataaattcacattggcatcattagtatctgagcatttctcagtgtcttaaggctggctctccatgagtgctggctgattgactctcatctatatcggtaaggttctttttgccccaaattgtgctctttaacacttcggcatttaaatcactttctatttgttttaattgtacaaagagaaatacatcattatttaaaagcatcatcttttttttttatattgtaagataaataccattctgatgtatttctcttggaaagggatgctggtatcctgggaggtttatgatttttgatgtttttactcaggtgattggcttgtatagctgaaatgctgatgaaaaggagttttcccttctccctttttcttttcttttctttttttttttttttttgagatggagtctcgcactgttgcaggggctggtgtgcagtggcacagtctcggctcactgcaacctccgcctctcgggttcaagtgatgctcctgcctcagcctcctgaatagctaggattacaggtgcccaccacca

SEQ ID NO: 106295 - DNA, 1327 bp, Homo sapiens
tgtcatcataacgcaactaaccatcaccactaaggtccattccttactagaaggcatctcaaattattttaccaagtggaataagcacatgatggacaccagagactgccaggtttcctttacttttggaccctgtgattatcaccaggaagtttctcttagggtccacctgatggaatacattacaaaacaaggtttcacgatccgcaacacccgggtgcatcacatgagtgagcgggccaatgaaaacacagtggagcacaactggactttctgtaggctagcccggaagacagacgactgatctccgaccctgccacaggttcctggaaagactctccaggaaatggaagatactgatttttttttttaaatcacagtgtgagatattttttttcttttaaatagttgtatttatttgaaggcagtgaggaccagaaggaagttttgtgctttggcagactcctccatgttttgttcccttccccctgagtatgcatgtgcctgttcagagtctccagataccttttttataaaaagaagtctgaaaatcattatggtatataatctacccttaacagagcttttcttattacagtgctaaaatgatttctgataaaatggtccctaactcaactagaaggctaaaaatacaagaatgaaagaataagcagagtactcatgatgcctttgagaaaaatcaaaacatcatgtagggtgacctagtttccaaaccaataaataagtagtattgtaatattaaaggaaaactgttccaatcatttaaaagtacttattaagtactgctttttacagttatgacaactgtttctttctatgcatataaatcaaggaaccaaatatctgtagccatggaaatgtctgactagaaatatttatattgaattctgaatacaaaatgtccctgtggtagaaaacttactctttatgcctggtgcagtataattcccaagtgtactgtctaccagaaaaaaaaaacaaaactaataaaaaatgaaatatgaaaattaagtttgtatttattgattattattacttaaggggagaaaatcatatttcttgtctaaaatatgcattgtttatgtcccagtgtttactgcccatagcacatttgtatttgatttgagaggacacagtgggatcttaggttgcagtttataagaactgttgcgtcactgaaacaaggatggatggaattattaattttgactaaaagggtgcatatttgaacagtgaacatacagtttttcatattttttcaaaagaatttatgttgaaggttacagattttactttaattgcccac

SEQ ID NO: 106296 - DNA, 1767 bp, Homo sapiens
ttctcagaagtttacaatctaggaattgaaatatatatggttcacttaatcatattcccttgcgtgtctagatttgcaacaaagccatttccccttacgctgttaggcatggggtggtattttccattattttttcctaacacactaactgatatttaaacagcatcacagatgctggggcccttgcctccagcgtccaccaaacattgcctcttagggcactgacagcctctatgacaaggtgcagaaatggctaacataatctcacataatgtagagaagtgtggggtaggaggaaacaatttcacagttcattcatgttgagaaacgtttcctaacatgtacacttgcatgctgccaagcagagcaaaatggatgccatttgcagcttcaagtcatttattttaaaatgccatctattggtttgtggggtttagagctgtcccttaggcacatttatttagatgcttgtgtagattcttcagaaaaacgtaagatattcctgctcaggaatgagttttatgaaataagctgtgattaccttctggttgtctgttcatagggatggagtcaataaccagtctttcgtttcaaatgatgattatacttgctatttttacaactcattggaaaattagggggagggaggaaggaatgtagtcaaaggctttgcaaggttctaaatgttcatggaaatatataatatacaaaataattcagaatacccaaacagcaagaatggcatgattttctaaagtgtttgctcaatgatttgtcacttatctgtagtttttaaaaatgtcattgcagattgtgttagggcctgaatcctttgcagccttgccacatgtttgtgtgataaacacacttataaccataattatctgataaagccctgcagtctttgacaaatgattaataaccactgacctcagttcccgctggctcagctggcctggcaaggcaatctggcctgtcgttgtaacccgtgtggctcctccagactgaccacggtggtatcgttttgtttttttttttcctctccagttgtcacgatgcaacctgatgggcatctcttctattgattaagctttttagtttcccatcacaaaagagagaaaatgtataaattaataaaattaagtacagaactttaatgttcctcttcaaatgattaagtttcgctcattttaaaacaagtaagttgaatttttaacaaatagtcctccttcaaaccaagacatgacagaggatttccttattaactaagcaaacattttgtttctcaaaacatagtgttattactgtttcctgttatccagatttttgcactaaatcgtaatgatttgattatgaaaccaaaggcatcagttgttgtttttatcatttctcttgttggcttcaactaggaaaagattcattacctcttctttcataatctcattcccacagatttcacacctgctcttttgagggccctgatgctccacatttagaacccacgggtctggctgaaagctcatttactgatgacctgtctggctgttcaccaagttcctctaaggcaggaacttactctctctcactttctctctctctctctctctctctcacttactccccacccccaccccaccccaccccagtgttattcaacacacgcctgtcaagggcaggagttttttcagtatttgagttgagggagggcatgagcaagtgagtaggtatacacctggacaccatggaaaatgaaaatcttcatcctaa

SEQ ID NO: 106297 - DNA, 1957 bp, Homo sapiens
tgcttcggctcgcacacggtgcgctgcacccactgtcctgcacccactatctggcactccctagtgagatgaacccggtacctcaggtggaaatgcagaaatcacccgtcttctgcatcgctcacgctgggagctgtacactggagctgttcctattcggccgtcttggctgccctcccacccatacccttcttgtgggttgtgtctgaggaaacagttacagtaatgagagtgcatgtgaatgtctatgtaaacagctttgtgctgattaaacattcacaaatgttttgtcttttccagcctgtcaaccagggtcgccactatcagaaagaaatgaacccaccttctccttctaatccccggtaagaatcattaataatctacatttaagaaaaaaaaaaacttagttggaagattgtacatttttcttggttttctgaaattgttttccaaaacttctagcttccaaacttatgttctttcaaagtcctagttcatctacttgtcttctttggactttagaatagtggtaacagtctacctaggtttaaatatctaccttttactagctgtggaattttgggtaagtcatttgactccatgtaattcaggcataagaattacttcatagtattttggaaagattcaaatgaaaaattcttagaacagttcttggcacatggcaagttctcactaagtgttaatttattcattactttatttgcataactattttattttaataggtgtctgatgtttggtaaattttaggcataaatcttttttatatcatctggtgcccttaaatttatcaagatagcttataaaagttcaaatgaccagtctcttttttcataactttaaaagtttataatctcaaaattattttatttcaaaaatgtcattggtgtatgagtcatttgtcactaaggaaaaacctcattatttttggttcattaggaacaagtggatctgaatttgagttttgaaatacatgctgtattattctacaactttctgataaataagtatataagctagtttatccatataaattagtattaccttatcagtatttatcatatattaggaaattattgaaaagtccatatatcgtgagcctacctacaaagtcttagttactgtgatgcacctcattatccaaacgcatctgacctgtactgtgggctgtcctatggagggtgtgttaactattgcatggtgtctgaattaagactctttggttacacactacaaaacagcttagctagtattaaaagacagaaagagatagggagaaagagtaagaaaggcggtttggcaggtggttgttaagtaagatacggggctgtattctagaacccaaaggccgccaggcctcaggaggggcctgaaactaggaactagaaaggcaagaggcagccaggcagtctcttcactccatctctgcttgcttcctcccatctgctccattcttctctctaaggaccagctttctctgctccatagtccacatatggccatttgacagctcttgagtttacatatcacagttcaatatacatgtagaggctaacagactacgtctgaacttcctttttcaagaaagagaatgtgattagtgtagcttgagccaagtgcccattctggtccagtcagcaataaacaatgaaccaagccatgaaaaatgaacatggcttccaggaaaccacgtaagtggtttacaggacttttattgggacccagaatattcatgacacagatgagtaaatgttctttactagtaatctcttctaaatgtttctattctgtacacctgctctggttatttgttcatgttacctagtagggtgaattgtcactatcacaaatagatacactaaagagtttaaaactgaggttagaatttcaatatatataagaaggtattttaacattcttagaattagctatctct

SEQ ID NO: 106298 - DNA, 1043 bp, Homo sapiens
ctcaaatgtgccatttgcagctgtttttccaacaataccccattgtttgaagaatccataaatgtctttctgacccttctctcccttcagctacaacaacattgcattatttcaaaacacctgtttgagagtcaggtcaccctgtgtgttagacatatgttcattgccctggctaactgtgcaggttcacttaggggtggttctccctcctttggcagtttctaccacatgtgcccactggcctcatgctgctctaggtcatttgataaatagccttccccaaacagaaccctctgtcaaagctatctgcattttcattctccatgactgaaaagtcaaaagcagtggaaaccatggctcagagcaccagctggaatcagacaggcctggtgttgagtcctggctttgttctttcttatctatgcaaccttggacacatttcttaatgtcttggagcctcagttacctcatctataaaatggagaaaataatacctatcccacaaggttgttttgagtgtaaaattagatagcgcatgtagaacacctagcccctaatctgaagtatactttcttctaccttttgctgagtggttaggcagaaatataaaccagtatggctggcattctaaagcaaatgaaaccttctcaaattcataaagttccataaattaattacaggtactgttctacaggggtggtggctctgtggttgtgtgcttcctgctctttatttatagttgaatcaagtgctaacacagtgaatttctgtgtgctttctgccaggtaacatattggcatgttctcagggataacctaaagagagaaaaatatttatttataagcaggaagcagtgtctatctgataatttcccggagaccaccctctgtgtgtctaccttgttcacacagctaaattgcagatgtgtagcttcctgcttgaggtcttgaattgaatttgggcataactagtagcagttcataaaccataatgctaaccatagtgagaatgtttcctttactaagtgggacactcctaccaat

SEQ ID NO: 106299 - DNA, 1062 bp, Homo sapiens
cagggttctcgaggcccaacaactggtccttcagagttaactcagttaacattagagagcctgctggggaaggctgcaaagcggacaagtaaggaatatctaaggagcgcctacacagaagcaggagcaacagaaagccaggattcctcgatggagcaaatagatagaaataactttgaaatgagtttgttgcctacaacatgcctttctccaactggaagaaggtgtgggtcctgtcagaaaactccagagcccgtaatcaaagcgaaggatctatcagcccagcaagtgccagcttcactaaacaaaacctccctgaaagaaatctcaggggaaaggctgagctcgatccccgaagcatctgtaagtggttcccgtgtggtttacagatgccggcaatacatcctgctgtgttccgttctgttccacccatgtttttagcagtatctctttttcatcatttgggtgatgagtgttgtattttctttcctgttctgatgtgttttagtttggtaatagcagctgttaaagagtctactgcacatcccaaggataatagaatacctcatgtttttaatgagaaagataattatgtaattttcatcataacagttattttattttctagttacttcccataatttgtagttatcactgcctgcaaattataaatgatgatcttatttttgagccaaaagcttgccagtaaaattgacagattttcaataacaatctacattaggagccataaaaacaccattattctattcactttctacagcagttccccaaataataaatgatatgagtgaaggttaacattaaaacagtgtcatcgaataaatccctcggctagtttggtggctgtattcgtgtccatcagattgattttttccttcctgtattagtacttttcttccttcaattcccctataagctgcacttagaaactagagaacaaatgaggctatgcataacaaatgacatgtacattccattttttaaaacatttaagattttctctatgtttcatgtcctaaatattctgtgggtgttgcattg

SEQ ID NO: 106300 - DNA, 1105 bp, Homo sapiens
tttttgggaggccgaggcgggcagatcatgaagtcaggagttcaagaccagcctgaccaacatggtgaaaccccatctctactaaaaatacaaaaattagccgggcatgatggcgtgcacctgtaatcccacctactcaggaggctcaggcaggagaatcacttgaaggttgggaggcggaggttgcagtgagccgagatcgcgtgactgcactgcagcctaggcggcagagtgagactgtctcaaaaactaaaactaaaaataaataaataaaaataacacttttatggattactgctctaatttttgtcatcttttccaactgtcagatgagtggatttttcctgaaaatgctgatcacatttcatatctggcatccagcagacagtctctacttctgggtgatgactcctgcaacccatcacacctgtggctggaagccagcaaagagagtgaacacgaccagcaggcagaggaatcccagagtgttccaaaggacattttcactttttcatcaagaccacgatcagcacctcatggaaagactcagactatgtccccagaggagctctcatttattttggatctaaaagaggataacagtgtgacaagcagagacacccaatcagaggatgatttttacggcggcgacagcagtgaagaggtacactgcttgataagtgaagtagtcttgaagcacagttgtttccttagctccaataagcactaaaacaagttgaaatgaaagagggaaaatcaactgctatttataaaaatgcaacagattgccatgtcagtccacagttgcatcaggttgttatggtaactttaaactgtctttttttttttttaattaacagtcagccaatttcacttttacttatagaaaccagttttgggtttctttctgttttttcattttaatctttgaatcacaggatgagaaacgatatgcagtttagtgctatgatagcaagaccagtaaaacactgagaatatactgttctagatctctggagaaattgtgttgcagttgctaagcattctaaattgatggttttctggcttccttactcccctgccatcttttcaccttagacctatt

SEQ ID NO: 106301 - DNA, 2019 bp, Homo sapiens
atggtctcgatctcctgacctcatgatccacccgcctcggcctcccaaagtgctgggattacaggcgtgagccaccgcgcccggccctttctttttttttttaaagaaaaactttgtggtggtggttctcaaatgatggtgagtataaaaattacttggggggacttattaaaagtactgtgatactgccgagatcctaattctatacgtcttgtatgtatctctgatgttgggccctagtatctgtgtttttaatacatgctgaggggggaggggggatttggatcctatggcacctggactggatttttagaaagattgcagtgtgatgtttgtcattacacccattaatggactattattaccttcctttaacaaaacagatcagttcattaacagaggaacaagtattacacggaacagtaaaaatcaagatgtttgtcatatcgcatttggatccaaagttcttgggccacctccactctctggcagaaggaataacatgaagatatccagcgaggtaggagcaaggtttggagagcttatctaagcacaagtgacctggtaagggaagagtgtcttccccttgtagagggagggagggagggaaagacagacagacagacagacagacagacactacatgccaaaagcagaaggcttgaataaatttggaacagaaattctggattttaaaagacttcaaaagtgtttcctttttgtcatatcaacataattaacattttcgagtattcttttcattaaatatgttcacaaaatttaaaggcaaatataagtgagcacattttgctgtctctttcagaggagttggatcataaccagacaccttaggatgaacagattctcaaatgttaggttttttatttttaatttcctccgaatttctgacatacgcgtgatttttaattcggcttctacctactgaagatggagtgtagcaaataagcacattttaatttatgtgtctaggagacttgcatgtcttctattttatctcgttatttttctccttccatttctaatttcctataataatttcctttttcttcacatcttaacctcatttcctctagtttttttctcactcttcattggtccaaatattatgttttctatatagcttctacagaaaacaaatgtagttgctatattttaaaatgtacagattaattcctttacagacagtgagatccgttgggtccaaaaataaccgatcatgccagccgtccactgtagagaagtgtgttaatggtacagaaatgtcagccttgctgatacctgagtctgaggaacaaggaaataaagaaaatattcaccaaataaagcagactgtacctattcatggtaagaaataatcatgcataaagattgatagctagtgaaaatagtgagaaatgttcttgttaagataaatcagcagttatattcaagtctagatcttaagtctagagaattgtcatttaataatgaaaagggtggttgattttgaaatatatttgaaattcttatattagcttctgaaatctatcattctgttttctccattatttcaaattgctataataccctgtgttttattttatggcaactgatgtagaaataaaatagcattccattatcactgtattttggaaatgccatgtgcattttaagtgttcttagcttaatattatcttttaattaatctcttccatttgtaaggtactctttcttttctctcactgatccaacaacaaaaataaaataaaccctgtaagtgaaaaaggatttttgttccattttacagatagagatttaaagtcaagcaaagaggtaaagtgatttgcagtttgtaacctttagaaataatttagaccagaacccaagacttagaattccctgtcactttttctacccttactgatctgactttactgagagttgaaaagggaggacatttaagttcattttatattatttacaaattaatgatcactgtcacagaaaatttccctcgtg

SEQ ID NO: 106302 - DNA, 1034 bp, Homo sapiens
cagtagtaactgtattgggtagataccacatgtctgccttccttcccagactgaaaggactctcttatttatgtctgtacccctggagccaagcccagagtctaacacatgataggtacttagtatgtgtggggaagaatgggtcactggaattgctgactgatgaaccagctgaatggttgagattggggcatgataagaagtcttttaggactaggaaccacgtttatacaacaataataatgctaatattataataaggttaataattatgattggatatctagaaaccccaacacttccatcccctataacctgcatttcaccaagccacagtgttccactctgtggcgtatctactggatttgtcccttacactctacttcctacataagcttcctagccagccctcctcacttcgtgtttagatgactgacagggaccaaactagtctttctgtgccttggtgctctccattctgcctcattcccccgcccaaccccatctcccacctcaaaatattcctgcatcatggttagtccgaacttctcaacactctgcttttgcacattcttttgtaaagaaccgcagtgatgctttaccctctccagatgctctgaaacctggcctcactgggccatcttacattacttcattccgctccagtgttcaccattctgccagtcaagccaatcacactattacttgactctcagtttacctgctgcctttgctgacaccaggctcctctctccacaaagaccagagcgttgccacagcctgcaaatgtaattttactgttgagacatctacatagaaaatactcttcatgtatttaataaataatgtatttcggtctcttttactttttctactgtggaagcaacctaaggttcacctccatattaaaatcagcattcctagatatataagatttgtctttaaaaaaaagaaaaaaaatatatatatatatatttatatatacaggaccttatgtaaaccttgcttctaaacaaataatggaagagcccaat

SEQ ID NO: 106303 - DNA, 1067 bp, Homo sapiens
tggtccattctgtaggctgttctgtacatgtcttcagaagtcccagtggaatggagcccctgtgacttgtagtgctgtcactgatagtacattcttatattgccttttcctcctttgttgtcctattctccctgctccctcactcctgcttcatgagattacctctgaaatagactacttgcaccgtattttaaattctacttttggagatgtgcttcctaaagacgctgcacaacacagccaagtatatgagatatctctaaggattgcattggccaaaaaactcacaagaattggagaccttactcagtattgaattttataaatattctcaaggatataagtcatgaagtacacatgaagcagaaggagatccagtcctttctaaatgcacatggcccagatttaatgggtaagttctccgagcaatacctgagggagagctaccagcccaaagagagcttattttggctacttcatatatttgtagcttatgtggcatttttcggggagcgatgcccccataagcccatggattccaggtttgttgactacaagcagtcctagacgtatcaggtatatcctgcaaaaggctttccattaataacttttcccctaataccactggtgcatttgccagggaagttcgctcatgtttacagggagttttggctggtcttatatcttttttttctggaatgccctttagtaaagtaaagtaaatggttgcaggcctgctgctctctttccttcccagaggaagcatgcaaccttttaaaaacactgagccaggtaactactaaccttggagttgtcagatagacttgtaaataatttaccattattgctcttgcctcatcattttaggctttagtaggtctcctggctctgctacgtactatctatgagaccttgaacaagttgcttaatgtctctgagcctctcactacattggtaaaatgtaaatattcattcctatttcaaagagttgttgggaggaataaatgagataacacaggtaaaatggtatgcaggttctggcacatggtagggatttagatgttgct

SEQ ID NO: 106304 - DNA, 1053 bp, Homo sapiens
atccataataaccaaaaccatcattaagccctgcaagaagacatttcttggtgtttttcttcaggtcctctacaaatgatcatcctctgactccagggacctatagattttattatatggccttccagcttttatattatagcattgagctgtcatctgtagcatctattagaatgctattgacaaaatgtccactcatattgaactaagtactcaataaaccactataagtaaattgttgtgttctaaccttgaaggatagtctattgattcccctcatgggtatgagcctagcagaacgcccctatctgcagttcctttgtgctacctataatatgttgtgtaatgtcttttttgagatcccagattataaaggaactttttttatattctttattaaaaccaaatattgttttcgcatatttattttatttcaaataaatagttaaccactaatcattgcttttttcttatgctctaaaactctgccattttaaaattgcatacagaattaaagtaatccacacctataataagaaagtttggagtcattttccaaaggtaattgtttttagcaggattttttgggagtacctctagagcttaattgtgtgtgtgtgtgtgtgtgtgtgtgtgtatgtgtgcgtgtgtatgatattacagtcctttttcccacaagtggaatcataccattcacactttttggcatttggtttggtagtgacagtggggctttctctgttacctgccttgagacgatttccatactactaaatctgtctcactctttttaatagcgctatatataccattgcatggctagaacataacctatttatctagatccttatggtggacctccaagttttccctctgttttgctattagtgttaccatgaatatccatgtgtgtatctttgtgtacctgtgaaatgtcctctatttaaatatgtgtgagattttcgtgtaaaaatgaaaaagagaatgtatatattgcctaaggaataaaaatcttctgcaattatagtgatacattctggagagcataggtga

SEQ ID NO: 106305 - DNA, 1023 bp, Homo sapiens
caaacttcagtgacacgcaactcacccatgtaacaaactttcacatgtacccccaaaacaaaaagaaaaatcctcccttccacccctctagatctgttccctgccattctctcacttgctctgtgtcctgggaggtagcccgctcctgtcctcctacgtcataccatatgaatcacccagactcccttgacctcaggcttttgatttcctcaagcctcccagccagtgagaagtaccagcaagagatcagaagacaggatgagagagaagccagggtattccttccctctttttttgctttggacttcctactgatgaccctttctataaggatccaattgctctgactctagttccttcccttgcccctttatacctaggaatggtaaaggctgcccattgtttctattttgggggtgcctaaccatccctttgtttcctcaaccttgcccacacctgtgtaaggaattgtttcatgatagtctcttcattttaactatgtgggatgaattctgtttcctttgagtctctgactatagagaatgacacctggtgagtgaggcaggataatttctagtcctttttagctaggaatttagattccattctcagagcagtgtgaggccaatgaaatacggtgagataatctgatccccatgtaagatggtcatcctggatgctcttgagggtattgactagaggagtaagaatggaagcagggagaccagctagaaggctgtgaagccaggaactgtgtggtgcctgggcaagagtgatagtataggagaaagagaaatgagtggattcaacatgtaactgataaacttttagcacagaaatgtgagtcaagcatgacttaagttaatgatttgagccattgggaggtggtgttggtaaggaattaaggattctttgtctttggtgggtttcatttgaaatatctgtgaaatatccaggaagagattcaattaaacagtttggagttcaaggaatgagttagggctgaatatctagattgagtta

SEQ ID NO: 106306 - DNA, 1005 bp, Homo sapiens
tgagatacatcccatcaatacctaatttattgagagtttttagcatgaagcattgttgaattttgtcaaaggccttttctgcatctattgagataatcatgtggtttttgtctttggttctgtttatatgctcaattacatttattgatttgtgtatattgaaccagccttgcatcccagggatgaagcccacttgatcatggtggataagctttttgatgtgctgctggatttggtttgccagtattttattgaggatttttgcatcaatgttcatcaaggatattggtctaaaattctctttttttgttgtgtctctgccgtcctttggtatcaggatgatgctggcctcataaaatgagttagggaggattccctctttttctgttgattggaatagtttcagaaggaatggtaccagctcctccttgtacctctggtagtctagaaacttttaaggtaactttatcttcaagtttggagggctacttgatgatgggaggcagacaactcagacagaggcattaagagctatcaagctcggtagtgggaagccaatggcattgaatttaagaagggatatatacatttagcaggtccttacattacagataatgcatcaggctttcaactatggcagtggtagggtggataactttatcactaaggcaacatacttcctcagtgatgtccgaggcaaacagtgctaatcgatcatttcaaccttgctgtccttcttaacagagcactccagacagtcactaccaatcatttgacactggaacttaagacgaaacctatttgctgtccaggatatgatttttacaaaagacataaagtttccttcaaatggatttttgttatattgattctccataaaaaaaaaaaaagaaaaagaaacaaggacaaaacattaaatctcaactttgtgaaggcacttctttagggagaaaatataatatggttcagaaaatgaggcatttcaagcaatcctttggcaagtgc

SEQ ID NO: 106307 - DNA, 1266 bp, Homo sapiens
tgaaatcatgccttacacatatgcattagaatttctgggtcaagggtgaagacagtatatatcaaagtggtttaaatgacagatgctagggccagactgcctgggttggaattctggttctgatactcactagccatgtgatcctaggtaggttacttagtgtccttgtgcctcagtttcctcatccataaaatgggaataataaaaggacatatcccatggggttgcttgaagattaaacaacatccataaagcattttgaatagcacttggcacagattaagccatatataggtatttattattataattattactgttgatatttataacaatttctattttggtgtgttatggtgattattattaaatttggatgataaaatatttaccctatttccaataagcaaatctttgagtagaataagaataggcagtctcttttatgctttcccattagagtgttttgctctgattttgttgtgtaaatctttcaaatagaaaatatataaaactgaaccataagttctaaaactgccatctaaattgagtatggttttcgtgctttaaaaaaacatgttttgtttgttaaattggaaacaatttagtgcacccacattccttctggtttaagtaatctatagaattaaaatgacaaaaaagtaggattagccagatttatatttggcaaaggagcgttgcaaacagcttccataaaacaggtgtagctgttttaatagatgtaccagactggcccataaaacccacccagttgccatagcactccacagatgtccacttaaacaatttaatatcactgaaatgattctggcaaagaatttcttaaaacaaactgtaatgatttatcattttgagctgtctcaagtaccatcattatcctaatggcccatgatcagaatatttttcttcaaattctttccccccactttggctctcctttttctgttcagaccctcttcatctgcatatgcttaataccactaatcaggctctttcattcatattatccaacccacactaaatttccttaccttactcttttcgctttcatttgagaaaaatcctgtcttccaatctcctcctgtgtgaattgattctagaaactttttttgtttttattattatactttaatttttagggtacatgtgcacaatgtgcaggtttattacatatgtatacatgtgccatgttggtgtgctgcacccattaactcgtcatttagcattaggtatgtctcctaatgc

SEQ ID NO: 106308 - DNA, 1187 bp, Homo sapiens
gagaaatgtaattatagcttacaggctgaactgggaatgagagtgaactattagagaaaactgtctggacattctctcatccagtgtctgttcaatgtgtactgtataagattccagagactgttccagaccctggcgatacaaagatgaataagaaataattcccttccttagtgagttcatagactatcaaatagaataatatagaacaaatagaatgcagtgagagaaatgctaacagaagtatatataattgctatgaagactttaaataaaatagagtttttatttttgccttttagttagaggtatgttgatggaataggggatgttgctaacgggtttcatagaacaagtaaaaaatcacaaatggtaagcacggcatttttggatgagagataaacatgtataaaagccacactactagtgtagtatattggtttggctggagaataaggagtgagtggagaagtgatgatagatggatctgaagaaataggcaccgattttttaattttattctgtaggcaagggattgatagtttttatgaattaggaagataacattgctggttatttttctaaagatgtgttaagttgctgagaaaaaaaaactagatatggtgagtgtaattaggaggttgttgcagtcaatcaggccagggatgatggatattgaaaagcaagagtagagttgaagaggaaggaatatacttcagaaatggggactctcagagaaatttttcagtgttagtataaaaagagaataggaagaatattaataaatgaaccacaattggcccagcacagtggctcacacctgtaatcccaacactttgggaggccaaggcaggaggatggcttgagcacaagagttcaagactagtctgggcaacatagcaaaaccctgtctacaaaaataaagttaagaaaaatcagctggccattgtgggcgctcctgtagtcccagtcctccagtcctagtgcctcagtcctactcaggaggctgaggcaggaggatcacttgagcccaggacgtcaaggctgcagtgggctgtgatcatgccactctagcctgggtgatggagagagatcctgtcccctcagccccccaaaaaaagtaaccaaaatttattgagcaatcacaccatgccagcaactttaccaagttcctttaactctcacaa

SEQ ID NO: 106309 - DNA, 1050 bp, Homo sapiens
tcataacatttggaaccatgggtattgatggtctcttggcaaattatcattttttcttcaggcttccatttgcaaagtaataatcagaaatcagactaaaatgggaaatatttttaaatgacagtgatttagaaaaaagactagaggttgaagaaaatttagaagtaataatggctacatattttatatttacatttctctttaggagaaactgaagattcagaaatattgtcttaatccatttgggctgctttaacgaagtatcataaactgagtagcttacaaactacagaaatctttgtcacagttgacaaggaaatatggtgaagtagttgctttagccagtgaagatgagtatgagctgacatatgtcactttaggaagatgctttagaaatgtccctgttcccatctcaatgctctgctgattatggaagaatgtaccagcctaagtccctgagttaccagaataagcagaacctcctgctgccccatggaacatgtagtgcgaagaagacataatcttttacatgttaagtttccgaaatttgggagttatttattactttggtataacccgtcttgactgatacaggatctaaaaatataacttagtcatagattaaagtgcttacttttctagtttgctaaagcttgttattattcatgggtgttgaatttcattgaatgctttttttctgcacctgtccagttgatcatatgtttttgattttagtctgttaatgtcatggatgacattacagatattctcatatttaaacttccttccattcttgaccataacctctgttggtcatcaaatatggtatttttatacattgttagactgagttttctttcctttatttaagacttgtagacacatacattcattattagattattttataatttttctagtcatcctcacatagttttatgataaaattatatttgataaattaagttggggtgttttaatcctttttatatctcaaacaatctgtattgggttccttaaaggtttggtagaacttgtctttaaaacctc

SEQ ID NO: 106310 - DNA, 1075 bp, Homo sapiens
aactcctcagcagcagtagatgcagtgtcttttctctagcaacaagacaaaaaccgggcatttttaatacacgtatacaaaaccaactacaactcattagttattcttgggaagaagaataaataaacaaagaattccagctctattttacatcttcatagcagaagctagtagccttagtagcagaggctagacattgtttgaaggcatttctactttaatttactatgccagtatttctgtctctttggagttgttaatttcttcatctcaggacctctctgagggctgatcaggactgcagttcagagtgtttccagggcattgtgagaacacaaaatgcattccttgtgctcctgtctttattacatgctgttcatcagtacattgcaggcacctcttaggcatttaattccattgggagtttctcttgatacaaattactttcatttactataatttttatactttatccacaggattaactcttgactcttttgaaactcttgaccaccacctttctcagaggtcatgattttttctgtttctgctatagctcatgccttgtcttgtgctttgctaataataaatcaataaatggctcatttcttgctctcatccaaatgaagccatatatggtaagcattaattttgtaataaattttcttcgtcagaatatcttactgccatttaaattttttacatagactatggaaataatttacttccaatattgaaaaataatcatctgcttgtgaagtataaactgagcctctgtttattttatctaaagcagtatacaagtcaaactttacttttttattcataagttcacttttatagatttgtttggaatgtacttatattacaaaattttatcttccttaggtagagtggaatatctaaaaaagtttattaatgaatcttgaaatctttggtcatgaactacttatagtgtcatctttgcatacttcagtgatattgaatacttcttaaaaacaggaaatgagtaatgctgtatccagtgaaactctaggaagaatttaaaatgtaatcatcattagcaaaaattcta

SEQ ID NO: 106311 - DNA, 1003 bp, Homo sapiens
ttgtttactggaaaacccaattatggtgttgttacctagaagggaatattgtaagtaaacacttttttttttctgcttcatttataccaaagcaatttaacatgaaattagtaattatattaatctgggctctccagagcaacagaaacaatagatagatagatagatagatagatagatagatagatagatagatagatttattatacagaattggctcatgtggtcatggaggctgagaagtcccatgacctacagtctggcaagctgaaaagtcagaagaaccaatagatagttccaggttgagtctgaaggcctgacaactggaagagccaatggtataagctccagtccaagttggaagggtcccaaggcaaaagacctatgttccaactaaaaagacagagagagcaaattctcccttactccaccattttattctgttcagggctccaattgattggatgagacctaaccacatttgagaggcaatttacttcactcagtctactgatttgtgtgttaatctcggccaaaaacaccttcacagatacacccaaaataatgtttaaccaaatctctggggacccaagagcccattcagttgaaaaaaaattgatcttcacagtaatgttagatgcagccttatataaggatgaaattctttgattcctataaactcttaaaaaagatttttttctactcaaaattaattacttagactacttttggaaacattttaatttattatttgaataaattttttaaaatttctacaaatagtgttttttttttttttagtgagatatttttgacaatcatttctgatggattgcaactgaaaatgtaaagacatgtgccagtggttgttctgggaatttttcagttgcaggagagtcctctttttgggctaaaaaatagatttgataaattatggaggaaacctatagagtgatggggcagaggaaggcaggctgctttgtgcaactgtatctcctaatat

SEQ ID NO: 106312 - DNA, 1032 bp, Homo sapiens
gaatttccagtcagtgaccttaatttgagttccaaactgtgatatttttcatatattattcacctaaatatcaactcagttggtatctcttgaggtttctgttccagaaactctccaaatgggccttcctgtttgtggaggggaacacactctactctcatccctggaacaaaaccttctgtgttgttcttcacatcctgtatgccctccaattgccacccactctctgcctccatttctgttcatctgaattttcaacctctcaaatcttcccgattctccttgagtgcccactgtctcatgacttgacaggccctgaaatatttccagtttcccctgacttcaagttggagggcctccatcagcatttccaaatctcttcatagtcccctgtctaccttggtaaagattttatttccagatcttactatcaggttattgtttcctttatttaaaaaattaacacaagcattactgtctttaccatgatcatgctcagattccctgactccagctagattcgactgctaaagattttgactggaatttgaagctgaaacatctcttcttcaccaccacacctctgccttaagctttatccatacccactcctggccatctcagtaatctcatgcagatggagggtattgtagtatcaacctaaataacagagagagcctcgctaaaagaaaagatgtttatttgggaatgaagcattgcaatgagaatatacatatgccatggtaaagtatgtgtgttttcagagagataaaggaagacaaaagtttttaaaggaagaaatgaaggagattacataattgttttgaaataattatctctggctgcaagatcaagggtgacaccagttcaaggttggacaggcagtttctgggcagatgttcttgcagagtttttttattccatatggttgtgatggccttcatgcaaggttgtggtttctgtagagcctgtttaattatgaggcatacaagcataagcaagcataagaaccctctctctttgtggccttcc

SEQ ID NO: 106313 - DNA, 1025 bp, Homo sapiens
tccttctgatggctttttaacgtcatgattttatagttttcttggcttattctggttgctgggatgacagtagcagccttttgccactgtctacattctaacctattcgcccctcctccccgtccatccatccatccatccatccatccttccatgtatagatgtgtgtatatatacatatacacagtatattacatatttataaaaacacatataaatgtagggatatttaaaagtacttttcattgaggagtaattccatcttgtgaattatttcccttcctctatatgcccaaattactataaggtgttagttttagctttcctaaataaatgagagatttgagtcactgaaaaccacatttgttttcatctaattctatgtatctaggatattttgtaaatgaggatttactacttcatatcttttcagcctcatcaaatctagaaatgaaagtaatcaatacttaaatttgattagttcgcaaataatgtagtctctatcgaccaccaaagaagactaagaaacagatgatgaagacatttaattacattaatatattgaaatttttatgacaataagagctaatgatagttatgtaacagttattgtctgtctagaaatatagtggtgggatattaagcaagatgttatcagtattcacatcattttagtttatctaaagtgatataaaatgaatataagcggaaagcttaattcatataaaaattatatgacagaaaaatttacacatggtacactttaagtatattatagtctctcagagtagtttttaccacagaacatagtgttatgtaaggtgactttgtctgaaacttgtctgtatcagctagcttcttctgcataacaaactactccaagagtcagtagcttaaaagtattatgtattgtttctcatttatctgtgggcaggttggagttactaggcctggctaggcaaataggcttgaactgtgcatgtggctggacttgcttcctcaatgaggtttggagtaaggtctgc

SEQ ID NO: 106314 - DNA, 1459 bp, Homo sapiens
atgtagtactactgacttccacaattaatgcagataattgagggttagccgttagtaaataaattactctcacttcaaacatcagatgtctgttaactccttaacagactcattttttgacagccattgagataattaaaggcagcagcatattataattaccacaacactaccttttagtttgcttaaataaaatttaactgcaagtactgtcagaaaaattcaggcttttcaactgttaccctctttttacttgtgagtctgagcttgatatccctatgaattgacaacactatttggattatagatatcataaagtttcagttaatatttagttaaaaagtagaacattatccagtcaccttatcttttttatttgcattctacatcatctctggtggatttttattatttttaagtagcttcacattatgttttatgatacatttcttcctgcaacagttttgcatacagatggaaatgttggaaatctagtttaaggtcgatctttttttcccattttgttatgtgattgatctggtcagtgaacaagaaattcttcaaggccatccatcactctaggcagcagctgagctaaaccttctaactcactgcttgcagtcagtcatgcaagatttgggttataaatattgaatgtgcaaacaactgtttaaattagctgtcctatctgttttatgcaatttcagtagaaaagcaagctgatatgttgtttagtggcaagaagtagaagacagtgaattcagtattatccttccatacgtcattgaattcatcctgttggcaaatatttaaaatagatcaaattaattcttgttccctgaagttaaatgagaactaaggcaactgagcatgtaatttatgtagtttttttgttttttatattcaaacagtaggaagactgttagtaattgtgcatgtagccatctgtcataaatatggtagccaattgttaaatgcttagttctgtgaattttgttacctctttgcaataacaaaaatagcttaatatttggaaaatatttggtcaggaaagaaaatagcaactggcttatcctactattcctggtaagcatctagaatattgaatatgtgcaggtgttagtacttctgctagttggagttgtaacaagtctgcatacattcactggtattgatatatgtaataggtaaaatgcaaacaatttgtagtgactcccaaaagcctttctgtgtgtaatgaatttaggtaaacttccataattgctatctgtgtttaaaatttatttttcaattatatgatgctgggaacatcctttcaagtagcagacatgtatctaagcctacattaataacataagtgaactgcttaccagagagaagagtgttcagtagcatgtgtctcttagtagttggatcacaatctaacataaaagttggacaagattataagttacttcct

SEQ ID NO: 106315 - DNA, 1512 bp, Homo sapiens
ataagttgggtagttgtaaatacaagaagaatccccctttgggaagggctggtgtctctagggttcctcatttctgtatttttttttctcataaattgtgaagtttctgatttggatgtaaaaatatctcagactctttggattcatagaaatgactgatagaatggcatacatgtagtaaattacaaacatatcttacaatagcacttacacatgtctgttaatggcatttattacataatggtcttattatttagacatctcaacaaccaactctccacctccaaatagaccatgagatcttgaggggccagagcaattagatcccaatgaggctactgttgaactttccatttctaagccccatttgtaaaagacattgcccagatattacaatagacatcagtagatttcattggactttagattggttacagtatagtacctgccatggtagtacatgatcagtaaatgttaatttccttctttcagtagttttctaattctttgcattattagactccctttaatttggcttcagtttgttctgtggtatacttcttttgggagacagaatgaagatatgggtggcctaaaattggcaaggtagtaatacatttagaatttccattcatagaaaaggagttttggagctagctggagttagataattaaaaatcatccaatccattgctttttagacacttctgaatcccctctgttacttcaaacaaaagaattcatcctcccttttttcaatcttatgtacattttgggatgaaaatgtttatatgttttacgtaaatagaggatgccattgctccctcataaggttgaaatccactgatatggttcaaccttctttttaaaattgggtaataatacaaagtcaaataaagctgatgttgcagttttcaaccacatttaaattctgtgtttcgaggtactctaacatttgtttttactttttaaatgatcagtatttgaattttaagttttagatattggtcttagcccaagtccgtaggaaaaaaattaggatttcctgcagcccaagctgctttatccagttgccccacaaagttggtggtcactggcaccctaggcttctggttctgatctcaggcacctctctctccataattcattccactcctcctccttgccatagccaccttggttgctgagcaccttacaagctctcagcttttggctcaagtttttcatccaacctaatcccatctctccactttttgaaccctaatcgttctttaaggtcaaactcaaatgcattatctttcataaatacttcccatatcctccagttgtagtaacatctctgtttcctcggtgttctcacaattgtgtacatgattactttgagggcagggactacatcttgtcatcagtataatccgtacagcacctagaagaattctctgtgcatggttggtcttcagtagtgcttgttattttgtattgtactgaaatgtgttgatatactgttggtgt

SEQ ID NO: 106316 - DNA, 1036 bp, Homo sapiens
ttggctgccaacctgcttctttgcttcctcacgcaccaggtgaagtctcttcttagggtcctgtgcacagtggtttctgtccccatctctttgcctggctaactcctcctcttcagcctcctcatctcagcttaagtgtcccttcttcagaaagcccttttatgattttccgccaactgaatgaagttcatctcttatgccttttctagtacccttttcttttccttcattacaactgtaacagtttataattattatatgtttatttaattatgtgtctttttgggtggacttcaagtttcatgaagacatggagcctgttctattcagcttgatatcccagcgcccagcacaaggcatgacacgtaataggctctgaaatacggacatacgggcggaaggatgggtggactaatgaatgaagggagaagcagcacccagtctctgttctcagaggttactctgtgagtgaaagatccatttaaaaggaaatctaaatatatcttgatgaatgttatgataacataagagcaagatcagtggggaacatatgaagtattagggggaactaagattataggctgggaactggacagatctgtaggcaaattctgctttacctctgtgggactttggtcaaattacttaacctgcctcaccttatggggtgagagtaataatacttacctcacaggtctgtcataagcattaaatgagaaagctaatgtaaagtaataataatggctaacattaagcacttatgacatcagcattgttctaagcactttgttatagctcaattaatcctcagaattagcctggatagtaggcataattattacctctgttttattatttgagggaactgaaacctagaaaggataaggaacttgccagctactaactcttagagctaagattcaaacatgtagcctgaatctagaacctgtgctctctactcccttgccacgctgccttacttgtaaatattgttatttttctatttgactatacatatatgcataagtagtagata

SEQ ID NO: 106317 - DNA, 1009 bp, Homo sapiens
tgtattagacatttgatcaattgaagcagtaccaacaatcattaattgcaagtgacagtttttgcattaaagagcagtgacttacatcaagtcaacatcaagtaattaaactaatttaatcatatttcttggatatcactatagtctggcatttccctaggaaaagaaagcaaatttcatctgtttaagaaaatatcaaaggattattattttgacaataaatgacctataacttgaagaaatatataatccaaaagtttgagattttggtttgaatgaagggcgatgttatgttttgtacggtctgctattcaaaactatggttggtcaaaaattgattgaaatatcttattttaataatatttactttgtctagaagtattactccttcctatttacatatagcagctagcaatatatttgttttaaatggagattgtttagcaaaaatgaaaatatacaacctttactcagttgagctatctattatgtgagatgttattgagaatgaaaataacatttgattggtacgcttgcatagaattgagtattgttgaagattttattaataaatttatatactttaaattaaccattacatttaaggtatgctattttcttattcttctttgtaattaatagctgtccaaggtctgagcttaggtttttattttccatgccagaataaatgatttttcttattaaggaagatgattctatactgcttttactaagtaaaagatgattttttttcagtgaagccatcaaacacacaatatttattaatcaagttcaccatcttatatggggtttgttcatggcaccccaaaacaattacaacatgaaagatcactatcataggtcaccctaacagataaataatactgaaaaagtttgaaatattgcaggaattacaaaaatgtgacctacagacacaaagtgagcacatgctgttataaaaatggcactgatagatttcttgacacagggttgctacaaaccttcaatt

SEQ ID NO: 106318 - DNA, 1048 bp, Homo sapiens
atgtagacatgaatagtcagtttaaatatactaagccactggaaaaaaatgttactatagaatttatttagcatctgacacacaggatcagtctgtgtcaaatgttattaaagtactttttttttgtcagatcatcaccatatggtatcataatatttcttttaatcttagaagtgaaacgttttggaaactggggcttctatatgtgagaaagttgaattacaaaactttctttttttgagggtaagaactcttttatatctaaaaatgctcatataaaaatgccctatgtgtgtaactctttgtgtttgaagagaacagtgctgattcagtgagatttgtgacataaattagggaccttttttaaagactgatttcacttatcctgctgttctctcagctctatttacagaggccattgtgcaatggaaaaatactgtggggccaatcaatgcaagatgcaagagagattcattgaggatggtttatttaagttggcctcattttggtatctcactttgcttttgtagaccagagctctgcttgcctcactggcttttcccataaatatggtaaagtcagatttctagagaattttctaggatcaaggcctgtgatctcttatttctgttacattgcttacactactgatggccctctggagagtactaagcagaagcttagtacttttaagtaaaggttatccctgtatgtttgataaaaatgttatgcatatttgatcaaatatgtttattgtttagaatgtaaatctgggataaaacataggaactgttataagttgttcaggaatgttgcaaaatgggaatcatataccagaagttctttatatagactatccaaaaacgtgttgttactttaaaatcccttaatttgttaagcgtactaagttggaataatataaaatagcatgagttttagactagttgccttttttttgtctttaatccacgtgttggtctgtactattggctttgtaggagaggttcacagataaatcaagacatctccattttctacccaaaaagtc

SEQ ID NO: 106319 - DNA, 1048 bp, Homo sapiens
attttttaaaaactatgaagatagaaaaaaggatcacagtctgacagagttcaaaatgaaaaatcaaataaaaccactatttctttgccttaaatatcaaatgatcagtcatgtctctacctttttccacagaattgaacatttgtattattccataatgttgccaaaatgtggcttttcattttaattttaggaaagatcaaaaagggttcttatataagtctcttgaaatggaatagaaatgtctccctaagtgcctctttaatgtgaggtgttgtaattcatctcgagatgagcaatttatgatcaaatgtcaaatttgcagagaacgatggattccaactacaaagacttagatggggcaaatggtagagagcaatccaacatgcattaatttaaaggaagttaaaaaatatacattatctgtagatcttcttgtgtttgtgcctacacaaccaaagtaaatgaaaactgaaaatttcagacaactgaaaactatttgatttatcacacagtggttaagaccctttggcatgagagaaacctgaatttaaactgttgccccactaattcccgactgagtgaccttgtccctttactgccctgtgcttcagcttcctcttctataaaatagggatacctatggtattcatgttaatgattaagtgatatgtgcctgtaaagcacttagcatagctgctcgcagtatctgcatttatctgaatattagtatacattcctatacatatttcattgtcacccagcagaatgacaattgatgtcatgttaaccacaccttctggtgccctataccacagtactttgtatccagtagacaatcagtaattatttgttgatgttctgtcatagaaatgtctgttatttttgccatctctgactttaaatgtgattctcttggcctgtgttattccaatttaactcagcagtttgtccatcatggttgaataactgaccagtccagtgaaaagaaatcagtcaaacttgttctttgactgcagggcctggtttttgctaaaatgtgaggaag

SEQ ID NO: 106320 - DNA, 1021 bp, Homo sapiens
atactggggaattaatggtagctgtttcctttcatgtagcatgcagaacgaagagaacccgtttagagagaccaagatgtcaggaagaaatgaaagatggcctagcttttccttagtgttctagaccagggttctagctggggccagatgcctgttttcatgaccttggatttcttaaacctgaaggaacctatttttttttttacacacttacaacctacagaaacatgtattataacctaatatttgaggtcctgtagctaggtagttgaatttcttataagttttcctgtcttggcagaaagaccctgttcttaaaaaaaaatggcacatcctccaaaaatcccatgttgatttaatttggcatattctcacaaagggaaggtcacggaacaagttccatttccattttaatggtttaatttcattatactaagcagacaactggaaacagaaggaaaccattaacaatattgtgatgtcacacaggacagatatttcaaaatggttttgctttatagaagtatgcatagtgtgaaaagattacaccactgtgatataggggaaagggcacaggcctttcaaatccctgccctgccgtctcttaactctgggaccgtgagtgggctgtgtggcatctatgaactttggttttctcttctgcataaaagagaataatgatacctactagagaattgttgcggtgatttactgagactgaaatgcgcctaatggaatgcggccacgtggtaggtagcaataaataccattcttttctcacttcttttgctgcccatgaaaagctaattctgaggaatctttaatcctttttactatctttttacaaacctactgtatgttaagagtcttatagtgtaattaaggggcccctcagtatttcttgaagtatattttatagggctctgaatatgagatggtaatacgtattttatataaagaacaaagggaaaatcgtccccaagctaaaacgctttaggagaatacagagggcaatatcaga

SEQ ID NO: 106321 - DNA, 1122 bp, Homo sapiens
cgaatgtgatactaaaccatcattattaaacaacatctcaaagaaggattaaagtctaccagtcagtgtcctatcactaatacttctgtgtttctcctgagacacataatgaagcaagctctgaaggtgacatccaaacaaaggctggggaatgtaaactcagtttggatctttgagattaagaagagctatctcttcttcacagccctataggtcaatgggaaaatcttcaaaatcaattctttcagcagccaggaacatctgaaaggaaatcaaaacttgcttattatgctgacatggtttaacaccagctaagacttagaaatgaattttaaaatctaagctctggcaacaatacatttagcaaaatctcctgctcgagatatagcaatcataaactgtcatattccttacatataagccaacaatggtgttatatattcggtatcagaataatgaaataaagactatatgtgtatgtgcatgtattgtgtatggatatattgaatgcaattcagagaaaactcacaggtattaattattcattaattgtgttaatatgtgtaagtagttattcattatgttgacatatgtttaattcaaatgaaatccgttagtgttaactattcattaatactacagatatatacatgtaaggataatttcactttccaaggcattaattattattattttttgttgtccctgtgctatgtacacagctttaattgtctggtctgatttaaaggatttgtgtaatgtgtcatcattggaatcctacttttatgctaggcactatcataggcactggaagcatgcaagtgaactggacagacaaggtcccaatgatctcagagcatgtattctagtatggggagtatattgataataagtgacttgtctgttaatctgttctcatgctgctaataaagatgtacctgagacgtaatttgtaaaggaaggaggtttaatggattcacagttccacgtggttggggaggcctcacactcatggcagaagataaaggagcaaaggcacatcttacatggcggcaggcaagatgtaagtacagggggcatgtacagggggactccccttcataaaaccatcagatcctgtgg

SEQ ID NO: 106322 - DNA, 1040 bp, Homo sapiens
ctttttgctttgttgtatgataagggagaaaaacagggttggcatgaaggggaagtgaatcaggtgccaactttttttgttgttcctcagctctgatctttgctttccctgagccttgtcatctgtcagggaaaggaagagtgcaactacactaagggtttgaaaaatgaatcgatcattctatactttcagaaaacatattcagtaatctttaaagtaccattctcatgtaggcgatagcttcaaggttccagcataacatatgcatagtgaaatgttttaatcttttattttatgcttttcagcattttagaaagcatcttttgtgttcattttccatggtgctgtgactttttttttttttttttgcttagtacagctagttgagtggtataaatttcttaagataataaaaccatggctttcttttatttcattcttagataggatagttttaaaacatttaatattattaaatatcgctaagatagagtaagtacagtagccattcacctatactgtacattaatacttaagggctttattatctgacatttcatgacttggtttagttctggaaaaaacctgaggaactcattaagaaagggagggagtgtccaataaagtttgtatttgttgctgatacacaaattcttttttttttttttttttgagacggagtctcgcttggtgccaggctggagtgcagtggtacaatctcggctcactgccacctccgcctccaaggctcaagcgattttcctgcctcagcctcccaagtatctgaggttacaggcatgtaccaccattcctggctgattttttttattattattatttttagtagagatggagtttcaccatgttggccaggctactctcatactcctgacctcaggtgatccacccgcctcggcctcccaaagtactgggattataggcataagccaccatgcccggcccacaaattcttaatttctacctgcctctaaccagctgcttctcccagaaaaattcagtattttcaaagccagagcttt

SEQ ID NO: 106323 - DNA, 1019 bp, Homo sapiens
cacccgcctcggcctcccaaagtgctgggattacaggtgtgagccaccatgcctggctgaggctttcttttaaacagaagaattacacttccaattcaataaaatttcctctagaagagaattggatattaattcaaagaaatacgaagtttttattttaccctatgcttatgtagaacattagagaattccccaaatctctaaatcttcattttccaactaactgaatggcagtgataaaatttcctgtctaagcaaattatttctcaccatagatgttctctttatgtaaatcttgcattttgagcctaatgttgtaagaaaccaggtctgatatgtgtagtttttactaatccattgtttaccttgttagagaaacagtgagcaggttagctacctaggcgaattgatttgaatggagacagaattgttagacatacgttaatttgatagcaccttcaaggaccaactcaagggaggcctgatttaccctcattgccagtcacttgcttttgttagtagtggatgcaggagctatcatgtttcattctcaaaatcacagtatccgtttgcacacggaaaggtggaaggaaggcctatgcaagtgtctgttgaggcattttcagctggaggtctgtcttgatttgtagatgcacttccctcttaactgagttttaggattacagttctaacatttctgtgacttcaaactcagtttgtacagaagtggccattcagtgaggtcctcatcctcattaatgttcagaacttcaaggagtattctttgattagttttgggagtcctcggtttgtccccctttctgtacctcaagatttgatatgttttcacaccgggggaattggtagagtatcattaaaggattcatcattactgcttcctgaagataccctgtgccccagatagccccagacacacactgacttttctgacatgtgatgattttgctgactataatctggtctctatctctgcctttgcagatcttctatataattta

SEQ ID NO: 106324 - DNA, 1043 bp, Homo sapiens
ttagatgatttacaggaatagagtttttgtggtatagatgattgtgaaaaatcaggtatatatgctttatcatacactgttatagcattggacaggtcttcgggctagtagcgattaatgggaaagctatagtcttaaagtggaatgtggtggaatttgagcaatttcttctgattaatcttagtgatgcagaatatatgtatgcttccctttatggaagattctctagaaaacgcattccatcctgtcccctgctgcatctcaggtatgacacttctctcaaggtctctacataaatgggaaaaaaaattcgaaaagaaacattatttgaaaaattaccttacaaatggaaacttgggtgttcgatttttcgaactggtaaaaatgcccaggcttgatagtaatgtgtgactgtgtattccaggatacacttcggtgcccatacaaagtacttcctgagtttgattgtacccagtgaccaggaatgcaaactgttttctttatgggattttcagacattccagtcccccaagagtctttctctgccatctctgggctttatggaaaccccaggtacacctgtatgtcatgtggtttcccagaagcctttagtgtgtctgtcttatttcagtactctctcccaggatcataactcagtttatcaaagcaactcagtgcagtggggtgtacgagacagcacggctaacttgtccaccatgaaagcctctgagggatatgagtggtctgtggtatttttgccataggtttatggttttgtcacttaagttatgcttatttgtatgtgtcatgacaaaacataacatgtatttcaaaattagtaattagcagcaaaggaagaatgattgcatcattaagcatccctttaattagaaatggtgtgtaccaagaattattcaggcattacttcatttaaattttagagatgaggagacagtcagaacacatgcttacatagctagaaagtagtaaagccacgaaaccgagtttttcagattccagaagcaggcttttaaccattattt

SEQ ID NO: 106325 - DNA, 1107 bp, Homo sapiens
ctgataaccatttgataaaatggttaaaaaaaataaagtaaaaatattttttcaagtagtaagaaaaacatattgggcttttcattagttgttgttttaccgatgtttaattcaaactatgttaatgttgcgattgccttcttcgttggcccaagaactcctaaaaacaagttttcattatacaaattgaaaatacctattctaactctaaactattgaaagcaattaattaagaagttttatctgcttatatctctcacttaaatagcccatatgagaaaaatagtctactatttattctctatatggacctggctgttaaataattcgaagtcactagtacctaattcttaaattggtatataccttcactggctcgttacaagcaggttccttcttgaaaacatggtttttgttggtgtttttggtttatggctccttgcacacaacttttctatatcaaatgattttccattaataagtgaggcattgtctgctgttatttcatccccaaattccccacttaacccagtgctggcattactggaactctctggaacccacttctgtagctgacctgcagctcctcattttttaaaatctctcttcctgctctgcattatctttctctcattatgaaaatccagcatcccctctcaaactcacttcctctggagtggcttaatggactttttctgtttattcttttctgctttgtcacttgcatagttctatacagttctatacaggacctggataatatgcacagctcagctcttagagatatatatacatatttatatcttggggatatatacacatatatatatatttatgtaccataaaacatttcagtcaacagtgaaccacatatatgacagtggccccataagattataatggagttgaaaaattcctattgcccagtgttgacgtagacattgtaatgtcatagtgcaattattaatactttattttttaataaatttagtgtaaccttaagggtacagtgcttattaaagtctacagtagtttacaataatatcctagatcttcacattcactcaccactccctcactggctcacccagaacaatttctagtccc

SEQ ID NO: 106326 - DNA, 1103 bp, Homo sapiens
gtcatggttaacaatcactgaactctgttcgttatattctgggcatatttttgacctgctttccatgcaagtcatcagattttaaggaacaggaaaagactggtcatggtgttgcaggcatcgcacttgctaaggaatataattagaagtaatgaatggaataataatacatcattatttataagaagtgtcatgtaattaactcaaataatgcagaatatattctaatttccatttggaatgaaaataggtttgtttgaacatcagtaggtagttacttattcttttatatttcatgcacatatcaaaactgttaaaatctactgagtacatatacgtggatttttttacaacagtcaaggtagctttcctctcctaatagtcttatgtatgttccttatttttattatatatacaaaatacgtatatgtgttcaactcttagaattagcataattaatttatatttattgcaaattaatgatctaatttatttacttagctgccatttcctttctcaaactaattaactgaaaaaataaccataaatttgcaaatagcttctgggcacaaatcctacattggacttatccttaaaaacctctacaataccagatatctgaagtagtttgcaatctaaactatctttgtgagatttctactacaggctttaaatatatttcaggagccttggtttagcttgtatctgcctgcatttgggggtcaggatatgggtggatatgtcttaggcagtggagttatgtttatgtgtaacaattagtatgacaggtggtactgaccaatgtcaaaggtggttcctgaaagctctctactgtgccagacatcagcctattaatttgtgcattgtggggaggtctggagagtcccaggggaggaagaaaagaggtggtgagcagcacgcaagggtaataagtaatacttgtgtatttcaatattgtaataacaggaatagacatgccaatgcacatggtctcagtagattttagagggagattttagagggagaaaaacagatggaagaagctcctttatattcctaagaccaagcatgttctttgttcttcaagaccaattaagtcaagc

SEQ ID NO: 106327 - DNA, 1040 bp, Homo sapiens
cttcagcagagagtgtattgatctctgcattgctattctgaatggcataaggagctgcaacatgagggagacacagcaacatttgtggatgaattgaatagggtgtgtaatgacagaaaccttgctcactgatcatactgtattctacaaatcatacgtcaacagtttattgaatcagttattaaaaagagcagatttttccaatcaagaccatctcacgcagaatgttaccagggccatacaacattaggatgatgcatgtagggacagccttacaaagtatatttgtgagagaattagactaggtaactttaagaacatttctgctgacacattagaaataaaaagttggctaccatgcaaacagtgctccaagatccaaattcaaaaggtaaaaaagaaaactctgacaaatatcttttaatacggaatattaactttccaaagagcaatgttaagtttcccccgttttcagaccgttaccatgttgagtgttcctgaaataagtggaaaaataataaaaatagcttcattacttaacagtgattcttacagaatagatgctatacataaaagcgcccttttagtccttccataaaaatcagaaatatttgtcatttcctcagtaggttgtaatcttgtgaattcctttaattgttcaggaaactgcagttattagtgatctttcatttctctaaagagtttcttttcggccgggcgcggtggctcacgcctgtaatcccagcactttgggaggccgaggcgggcggatcacgaggtcaggagatcgagaccatcctggctaacacggtgaaaccccgtctctactaaaaatacaaaaaattagccgggcgtggtagcgggcgcctgtagtcccagctactcgggaggctgaggcaggagaatggcgtgaacccgggaggcggagcttgcagtgagcctagatcgcaccactgcactccagcctgggcgacagagcgagactccgtctcaaaaaaaaaaaaaaaaaaaaaagagttcttttcaaaccttcctgtaca

SEQ ID NO: 106328 - DNA, 1020 bp, Homo sapiens
tggctgtacgttagaatctcctgtagagttttaaaatcctcaggtgcatgggtcccaccacctagagattctgacttaattggtctgcagcagagcctggacattgagaagtgtaacatttcccaggtgattctaattgttagcccctgttaagtactgcttggggtctagtttttagcaagactaatattcaaaatatattaccattggtactgcattaagtaagctcttgctctctaccaggcactgtgctaaatgatttacaggtttcaatccatttgattgtcacaataaccatatgaatgaacattcattaattccttcatttattcaacaaatatttatggggcacaggcaacaggtcaggcagtgtgtttggctgctgggtaggaggttcagggaaagctttcaggggagatgacatttgagctgacatctaaagattgagaaggagttaaccaggtaaagagttgaggggaaggcactgatgaccaggaggatggttttgcaaatattctgtatcgggaaggaggatggctagttcaaggagtggaaaaaagaatttaccagtgcttctggagcagaggaaaccaggtggagcatcatgcaagataagatatagaggtgggaagcgaccccctcaacagaggttgtagttctgtgaaaggcttttggcctttattttgagagctcatggaagctctgatcacatttgcttttcctgggagatctctctggttgcagtaagtgaaacagaatagaaggaagcaagaggagatgcattgtaatgagttgagtggccattgcaggagatctggagagaaatgagaacagcttggactaaggtaatgaagggaaagagacaggtaaggatatttgcgtggaccttaggacttgaggatggattcaaaggagtagacgatgaatgccatctccaagtttactattattacctccaatttgcagaggagctggtcaaagcgtatgagaatttgtgtagttcttctcaaactacagtgt

SEQ ID NO: 106329 - DNA, 1585 bp, Homo sapiens
ctgggctaatttttttttttttttttttttgtatttttattagagactgggtttcactgtgttagcctggatggtctctatctcctgacctcgtgatccacctgcctcagcctcccaaagtgctaggattacaggcgtgagccactgcacttggcctgtcttatttttcttaacactagacttctctgttcatttatttacagtacctcccagcacaaaaggcatttgagtttgcgtttttcctaggattagcaaaaagtgccaggtaggcgaaggcagtagggtggtgatggcggcagtggctctggaggccgcagtgcgagtcctggcctctgctccagccccactgtggtgacgctcgctgagctgctgttgctccagaacactctcctgaccatggtcttgggctatttcatcagcatccacgcacatgctgaagaatgcttaagtgagtcacctcaggcaccaagatgggcctcatcttcgaaggtggcttcctgggcatcaacatggagattacaggacctaagaataaaaggatttataaaggagacaaagaatccagtgggaaatacacattttctgctcacatggatggaacaaatacattttgttttagtgaccgagtgtccaccatgactccaaagatagtgatattcaccattgatattggggaggctacaaaaagagaagacatggaaacagaagctcaccagaacaaactagaagaaatgatcagtgagctggctgtggccatgacagctgtacagcacaaagaggaatacacgaaaatctgggagaggatacacagagccattagtgacaacacaaacagcccagtggtccttcggtgcttctttgaagctcttgttctaattgccatgacattgggacacatctactacctgaagagattttttgaagtccagagggttgtttcaaaagcctcttcctgatgattccaaactcatagtttactgtttaccaaacaccttggtgataacgtcataggccattaatttctatgttttaattttctgaactatacagtcacagcttatgtttctttgtgattaatagaaattggaagaaaacacctttttaggaaagtcatagtgaaaatttgacaattgattggcataatttcctaattaaatgctgcctccattatataggtccttccagaaattaaacactggaattgaaatataggaatatatatatatatatatttttaaaatcttcttttccttttgttttgataataaaatgcagttagttcaggaaatcagcacaaagcctgatagtactttactgaaatgactgcattctgtgtattccctcattctgtggtttaagctattaaggattcattttgttgagtccttatgagaaacaatagtatgaatcctgacattttctatgcatgctcatggcagagctctctggcttgggtgtatgctgccaggctgggcacttttatactttgttttcaagttttgcttttaaaggtaagacttgccccagcacctattttcccccatacattttacattgtaccttaggactcagtcacctccactta

SEQ ID NO: 106330 - DNA, 1047 bp, Homo sapiens
tgtaaccctgctcccaccccacaatacctcgtacttatcctttttgtttttttgccagctcacttttctcccccacatttaaggtttcacagagatatgaaaagccaccctggttcctccatctattaaatgggaaatgcatatgaacaaatagaagaattgcaccatacgatgcagctgaaatacaatgttatcatccttccactctgaacatttctcaggatggtttatgtcccagcagttaatggcttgctattgttggtgtaccaacacaatgctattagcaacacagaattctcaggctttctgtttagactatcttcatgtaggctagccagaatttagatatttgtaaacggaatttgaacagtggcctttcttcacaatataaaattcagataagtgtaactggtcatggcccaactcttgtttattaattaaggctttataatatggcaccatttttggaagctgcagtttatgcaaagaagaatactaattacattctgcattttctgtaataatggggcagtgttttggacaatgcagtttatccagacaatgcatccggctcataatgtagtttattaacaaggaggctctgaatgtttcatgggagattgatacagctgtgaaagggtggcataaataatattcctggccaggctgggggcagtggcaatatgttgcatgctgttaacctcaagagatctccgaatagcttttatgtatgcctgctatatatttgttgaccattgctggatacaaaggaagctaagtgatctgggaaaatctatttggtaattttcttttcccattctcttagcacttgctgaggccttaaaaacaataggcctttgcatttgtatggattgtttttccttaggctccaacaagaacgtcactttaatattgttatcatcatggatttcttataatggtcatttgtgagaatcagaataggctaccattttttttctataagatatttttcttattgaaataattcacatagcacaatgtttatccgtttataatgtgaaactt

SEQ ID NO: 106331 - DNA, 1081 bp, Homo sapiens
aatcaagaagatgattaaaggcaaaatgatggtccagctttatgaaagaaggtggtattaagccagaaatcagactggtattgtttggcatgaattaaacttataataagtcacaataatttctctgtagctatatagtctgggaaactgtaatctagttcccaagtgaataaactataaggccaaagggcaaatagtttaacaaaagggaatcagatgattatcttgtaagctagaagagcaaagatactgtggcttaattacatagcttggtaggaagctctagttacaaccaaagtcttaaagtagttgtctggtcatttgcaagatactggaatggtttaacttatgagaagagagaagacatagaaaaaaaacagaaattctgtaatggctcataaattgttgctaggggaaaacaccagggaaaatgatttaatattgtgattataaagactaatgcaatgaacaaggaatgtttcattagtgatcaagaaaattgcattgacgggtatcagatacccatatgattatggagatgaagtctagggagatgtttgggcttaattgggtacagagctacagggtacactaataaataaatattcttggttttgaccttgggataactgttgcgttttaactgtttcgatgtgtctttgattttgaccatgattgtgcagatcgtaacccttaaattctattttttttgcctagaatatttgagtaaagtctgactctttgcagccttgaaattctgtgaccacccagtgggttcttcctgcctgctacacaaacagagaccatggaattgcagtaaagaaagagtttagttgacagaaggctagccacaccatgccggagatggagttattattcaaatcaatctcatagaaggcttgtaggttaggggcttttcaaaggtagtttgggcgaaggcgtagggatggctatgcaatgggtgtttgctgccgattggctgggttggagatttaatcatagggagttgaagctgtcctcttacactgagttgcttctggccagaggaaccatcagttggtgggtccaagtagagccatgg

SEQ ID NO: 106332 - DNA, 1083 bp, Homo sapiens
tttatctcataccaacgtatctatgccatagattgctgggaaacaagagttgtcctggttactaacgtagtgtacattaagtttcctggaatttttttttttaagcctgtttatttgatgctggcacctctgttcttctgaaggcagcatattaggtttactaataaatgacacccagttcctaagagactcggcctaaaagctttcctgacagggcaggaatttgtttcttttttctttgcttttattaaaaaacaaaaaacaaaaaaacaaatattgaggcaaaatcgaggatgaaggacattttgaaaacttgagtactgtaaatagttttaaggaagatttcatttttccaaaactacacattttgcagtttctttaaatgcccatttaatattttgggtcttgccagggcaacgtgttgcttttacgaataagagccaataatgagcccatggagcctttaatttatgatgtatctgacagtatagtggtggatctgataggggatgcatgtgattatgtctgcaagctgaaaataaagtagctggtatttgttctgaaaacgttctgagaacaccctcctgttaatggcccatggcttgatccagcatctggtaaactaatagattgtcatttttaccatgaaagcataaatcattaatgattccacaaccatttgagttcttctctggtctagaatatgccaattaccatgaaattagtcctattagcaacatgattgaatgatagtaacctgactgtaacttgttggcagaaattctctcataatgacagtaatgaactgtgcatttgagtccttgctgggctctgttaaacaggaaggttggatattatatgtttctaaccccttatgaatgatacttcttaatgattatgtgaattgaaggaaatgttctgttttgccgatttctttcaatgtaggaatttatcatttttacttaatttgttgggggaaggaatcactgtttgccattaaaaatgttgttcagggactactttgtgctacacacatattacgatcatcaccagtatgtatatagagcctaccgtatcaggctt

SEQ ID NO: 106333 - DNA, 1018 bp, Homo sapiens
gagttcatacggggaccaaaaaaaatgagtgtatcacagaaatgtcgactaataggaaaattcatttgactttccttcttcctgtggttttaccacaggcagaaatttcaaggtaaggaagaagaaaagaagaaagggaggaaggaaaggagaagggacggaaaaggattccagtttctgaatttttgtggcatcctactgtaagtggcagtaaaaggggcttgtgggtgtattttccaagataagaatgaatggataacatgagttcatgtgctttcctgggagagttgatagggatgctttttttggaaaaggggatctcctcatttgatagccctgtgatttgagcctgatgtgctgttaaggcttgggaaaggtagccccagtcaggggtccaatcttctgcaatgtgatccaagcataaagaagtgcttctgtgtgcagtggattcaccatatgcccacttaggaacccagcatcaggtgtagatcttcaccatgcctaaaatgtgcaagcaacagctgttcagaggtaccctaactggaaatgccatcttggaaagaaaaggtgcaggttgtcatattcttctctacaggattttaaagagcaatgtgtttgtgggtctgatgaaacaagagttagattaaaatgtagcaccctattgagtatctgctctggaccagaccctgtggatgatgcttttgcttatgaaataaggttatcagccaggctcattggctcatgcctttaatcctggcactttgggaggccaaggtgggtggatcacctgaggtcaggagttcaagaccagcctggccaatatggtgaaaccttgtttctactaaaaatacaaaaattagctgggctttgtggtgcatacctgtaatcccagctactcgggagcctgaggcaggagaattgcttgaacctgggaggcggaggttgcagtgagctgagatcatgccactgcactccaggctgggcgacagagcaagactccatctcaaagaaaaaaaaa

SEQ ID NO: 106334 - DNA, 1048 bp, Homo sapiens
gcatctactaagagctcaaaaattatcattttaccattattatccattatgctgccttcaagttttcactcgaataactatggatgtcttaaacttaattaacctaaatttgataactttcatgatatgtgaaaaatgggagaggcccattaaattaaaggtccctgcatgctgaacaagcacaatgaaccagttagcactgtggcagagggcagaaaaggtttgaggataaggcttgtctgtggattgggtttgacagaactaacttggcatttaaggagtatgttgatgggcagccattcaattaagtggttaacttggaaagtgggagtaggatagtcagtcacacattgtaacagggtagcccaagaggtgggtagaattctaggatggggaatccagtatctacacacatggtacagaaaaatgaatgttggacaagtagtaagcatcagaaaaggtttccaaggtagtcagacctatttctttggatgggttcaagtatgtaggtgggaggaagaataaagaagccagcaagggccagagtttattcctagagggatttgggtcctgggaaggtgaccaagggtgccaggttgaagcccaggtaagaaaagaacattgctgagcatctactgttgcctgacatatgctcccattttaaaaatattctctatattatctcatttctctctcatagactcacaatgtaaatcttattgtatttattttataggtgacaaaagacatgattaagtaaacgtttccaaggtcacacgtccagtaagtggtcaagccaaatcaaacacagaccttcctatttcagaggtcatgatcattccatgacaacaccctgcctcagaggtgacttgatgttgagcttagagcattgacctagctagtcttaaatctctcctgccatatgccatgattagtccttagaagaggataggttgagactgcagatgggaggtgggtctaggatcgcaactcttgggagaggaggcccgcagaagctgggagagggtggagactaatcagcaagagt

SEQ ID NO: 106335 - DNA, 1038 bp, Homo sapiens
agagattgaaccacattccttcatgttcttcaccttatttcttattctaataaccaggagttgcattgtatccagctgaatgcataaaattgctaatctgaaccaagttccagagtgctgatttgctttaaaacaaacaaacagaaagccatagtgacattcctgaaggcatgcctccaagttcttaatgtaattacttcttggttcctgagatgtaattaattagataaaaagagatcaagcgtaatccaaaaggatatagaatattttctaaatgggagtgactgtgggcttcagagccatgaaaacaagtcactagatccagggacacaaacatctccctcagcccctcactgtggtgggaaaacctcttgaaggcaagaaccactgaaagttacatacagagaggctggtcagagggataaaaaaaaatcccccttcgaatctgcagaaggttttcttaattttttttcccgagtagtctttctctacctggggttgtctgccctaactgacatcaaggccattttattgaaaattgttcagattgtcgatgaagcacttagtctgacatactttgtctattgttactgttaaattaagtttcactctgacagctgaccaccaagtcaggccccattttgtctaggagcttctttgattcaggaaaagtaccttatctagtaacctcattgttttgtagctcctttttacgcataccttttaacacacttcaagatgagagaaaagaggatcttttaaaatgtcatatatatggatgtgtgtgtacacatatatatatgtatatggatgtatgtatagatatacacatatatacatgcatatatatacatatatatacatatataaggatgtgtatacatatatatatatatatatttttttttttttttttttttttttttttgaggcagagtctcgctctgtcacccaggctggagtgcagtggtgcgatcttggctcactgcaagctccgcctcctgggttcacgccattctcatgcctcagcctcccaag

SEQ ID NO: 106336 - DNA, 1030 bp, Homo sapiens
catggactttgaagtcagacagtgaaattttggccccgccacctcctagctgttaacttgaagcaagttacttaactgctctgagtctgtgtttcctgatctataaaaaggggtatctgtggttacctcaaaggctgttgaaaaactgaatgtgcccatgcctgcaaagcaccacgcatagaggctggcaagtactgagtgctaagtaactgttgactgatttgtgagttcagttttgactcagtttctgacttctgctggctagaacttataactacattaagacacccacctggttaaaaaggtagaagactcaaattatatacgtgcacatacgtacatatgtatctgcttaggatatagtaagacctcaatcaatattagtttctttccagttccagtcatgttggtattaaattagtatgacaaccaaggctgaactgggcaaatgtgaaatagatctatcacagtaattattatcatttgtattactttagaatttaaaaagctctttcaacatgcattgctttagtaagtccttacaacagctggggaggtgtggaagtgtttttttatttgtccatatattctttcctccacgcagcaaatgcacgtgagtgcctgtgatgtgtcaggtactctgctcatcctgggaaaccaaatagatgtcctcacagccctgtcttggtgatcctccaaatgtatgtcctaagataccaaaaggtggtatagacaaggtagttatttccagtgattaatgttttatagatgaaaaaaaatgagattcagtgtggcttgtaagtgacagagccagatctcaagctccaaatcccaagtcttttccactggatcccatgcctgcctgcctgaatgtatcatttggaataaatgctagagagagcctggtgtagccattcattttacagattaaaggcaccgaggcttaaagtgggtaaatgatatgctcaagaccatctctgctttaggggtagctatcagttccaatgaggaaaccttttgacagcatgct

SEQ ID NO: 106337 - DNA, 1074 bp, Homo sapiens
aattatgttaataaaggtaagcaaactagttgacatcaacacatgcattctgtttcttctttgtacatccgtgtacctcccagcgaggactgtgaaccagattccgtatgtattcaagactttcattagataagaatggcatatacttatcattagagcatactaattaaagcagaaagtgacatttcaaagtaatgatgctccctagtgtctcaatgtaaaatactccctagtctatttttaatgaactggtatgctatgtatgtttaaaatattattttgttattttgttttcattatttcagtggtggctatgaccaggaaggtaggacgttcttctagatataaggaaagaggccagtgaaacctaccaagagcttcgggctttgattgtagtcatattcagggtgtatccaggcattcttgcattcatttggtgctttgactgtatgcttgctacttgatactgtctgtgctaggttaataggacccagatagttcctgccctcaaggagattacccacgccctttgattatgatcaaagcaaagccgttctttatatttcctcttttgcatactctctaatagcaaaaaggatgatatgttcagtgctggttatatatacacccttgccagttactacaaactcttaggtattcttagtggataaggatagctaaagagtctccttacttattctatatttttttccttatatttgttactgaatgcattttcctcatagtaaaagcagacatcatcgtcatcatcatattcattgtttattaagtatagaaatccaataagataggtatcactattatttaaatgttttatggaagactgaataagttcagagtgtttaggcaacttgcccaaagctacagagctggtaaatgacacagtcaggacttcttgacctagggctggctgcccccaaagtgctcttgacctttatgctttaatgcctctcattgtttcttattttttttttttttttgctttctcttgcatggacagctgttaaaagtcgttatcctcatagatgatgatgagttaaatacttaggttgt

SEQ ID NO: 106338 - DNA, 1053 bp, Homo sapiens
ggcctcccagagcgttgggattacaggcgtgagccactgtgcccagccagaaaattttttttaggtattaattttcttgacacatctgaatgctaaataacgacaagaccaaggctagtcaaaggctggtcaaaagctttcctctgcagcaccataactgtttagaaatgccaaatgaccagtggttttccaatagtgtaagcaactatctctcaaaaacaatcacgtaacacaaaacacataatatgcatgcactctaaatattatatgctatgtatattataatgtattatacatacatataaacatacactatacataaacattagaaacttataccaagttgtactcatgactgtttttttctttcccagtaatccttcctaaggattatgtcaccatcttatttttccctgttaattggttggatgatttctgttgtaaaacatttcttttaaataaaatgaaatggtgatatcatgtattattgtaatttaaaaagcagttggtatcttttccctcaaacttgtatcttcacaatttgtaaggctattattaattttgtcatattgtggtaagggaagggtaacattccatgcaggtaagaaacaaatctgaaatttactaaagataaaaaaaaattccctggtaaagaaacacaattttaaaatacactgtaaggtacatattaacgatcttcactaagatagtgaaaaaaagctttaagtctacctttttaaaggattttgtaggttaatattttccctttctttctttctatgtgtcagacttctagcttttcccctaaaatatgttcattacaggctaacagcctaattttaaatattaacagatactcttgatatgtttgaattgccccttttgataatggcatggcttaagaggtcctaatgaaaaatgttaatgtacagataatttgtggaataattttttattaaatattataacaattattttttctttttctatgtcatttttgtaatgatcacttttaatggttgcatggttttccatcctattgttatgccatga

SEQ ID NO: 106339 - DNA, 1023 bp, Homo sapiens
tattttgtatttttagtagagacggggtttcaccgtgttagccaggatggtctcgatctccttacctcgtgatctgcccgcctcggcctcccaaagttctggggttacaggcgtgagccaccacgcccggccggttccctttctttcaagatctctttgccacaaatgcttacagagaaatgcctcttcatgtttcctctcagctagaacacggactcccaaggactcttggcactctgagggcccatgcaacagggaccctgaagtttaagcttcatcagcatcatgtcagttcttctctgtctctttgaatatgctgctgaatcagtgagaatataactggttagatggcatctggaaagctggagaagacgtttagttggaattagctgtgaaattgagtttcaggttaacctcgaggtggatattgcaaattcttaagtgaattgggagaataaaaaaagctttataaagtataaagctttaaaaatggttatcaaaaagtagaataattccaggatacataacttctctgcataagttgttgcagtgaaagattcattagaaaaatgtaacaataaaaagaagaggtattgatgttttccagaaagctgtatttcttgaggtgtttaattttttgtgtgtctcacacagcaagtttcctggtggcagaacaacatctagccttgacatgtggtgtaaatctttatgctctcttcagaataaaatgattgcagcacttttctactatcagtggggcatgaattgctgatatgttatttgatggatccaagcatatcagttgtctttgtcaccaagagcctcaatggctcaaactctggagatagttattcaaggaagagtttcagtacttggccatgggatgccccacaacccagagaaacctgaaacccacgtcagcctttcgattctgtatgttcatcagttatctatttacttattgccactttgttgaatgctctgagatactgatgtttgtcaattacgatttgcttatgcaaa

SEQ ID NO: 106340 - DNA, 1049 bp, Homo sapiens
tcttgtctagctttaaataaaagcagggcaattaaatcaattaatactttgcttggtacttttttgtgactgaatcaacttattttttgaggtagcatcagttttattcagacagctgcacaaacataacctcggtatttagtcttggaagacatgcaaaatacatttcaagtctgtgcttcctaaacacaaaactggagaagagagactgagttggaacccccatggtcttcacatttctcattcatggaaactgaaaacaaaactaggtctaacctaactattattgaatttatcgttgagagggaagaaaggaaaatctgcttagcatattatcttctgacttcctgtaaagtgaaataaacctaatcagtactggtgtttctaaaaacatatcaattgtttacattttaaacgcaattgttaatgagctgttattatgaaagttcaccacattgctctaaatcacttgctgagccagccatcagaggcttacatcccagcaaacattttctggaatttgcagggcacaattatgattgactacagatctcctcacactttcattacaagaattaatgtagtgaattgctatataaattgatgccgtgagggaaaggcacgctaagaggttttaacaagactgtcagtagctcaatagtttgtaaagtcaaacttctcagtgttttcagagtgcccaccctctttctcagtgtatcttttcttcttggtctagttagcaaactgaaagggagagaatggttgttttatgtcaattttctgtagaagcataacatgctataggatttgtatacttgtaaatccaagttgtacatcttgatgaattttcccaaagtcatcatgcctaaggaaccagcatctagaataagaggtagaacatgacactctgatgccatcttccactcactaccatgcttgcttccactgaggctgtcactatcttgactcatctgcgattggttttaccatgtttttgaatttgtgtgtgtttttgggtggttttttttttttttttttttttttttgag

SEQ ID NO: 106341 - DNA, 1208 bp, Homo sapiens
tgttttctatcctaataagagaatttaattgatcaaggtggggagagcatttctgaaatcctcttcagagatggccacctgcccatcaggactgtgattcacccatgttacccatgactcataccacaccaagctttctctttcagttaatggttacacttcagagaaagttatttccccttcagagtatccgatttcacatgactatggagcatgtagccccaggatcctttctcattaaatgcttatgttggcatggactaattctggttagagtatttaaaccagacttggtatgtccagtagccagaaagaatagtaacagtcatctaaccatacacttatagaacagaaatgtaatagaataaatagaatatttatttcatgtatgaaaaataatactagaatctattcctgaaccattttttctaagggataggaaaaattgtcaaaacaaagagagatttttctccaagaatagtaattaggctaggaaagagacatgttactgcaattataagtgggccctatgtggcaagattcaggggcttgctagcattagacgacttggactacatggtagatttttttggtctttgggtctgtctttaggcagagccaggagagggaacccagggaatatcagagcagcctgtgatgctggaattaaatgaaacttgttagtattctggacatgacaggccaggtgacatcctgggctctcttcagccctgtgattctggatgactgtttttttccccaccagttccataatatatttgtttgtgtgcttccttcaagtaccagaaggaacacccattcttagaggtctgttgtattgtcttttcctaaatacagtggagggatattactacacaaagttaatttttcatccttcttgtagatacaaatattgatgttttcacagtatatatttgtatatttatttgctatagcctcttgattgttgataatcaagagacaggaaaaatataatgttactattattgccattattggtcattacttggctgggattttatccagtttgggagctaaattcttctttccgttgacaaagaacaattaattgacttcagataatttaggcttctcatgtccccaatatgtgatttgtcaagctaagaatattactttaacttcattatgtttactttccttgtatttggtatgagtgagggaaaata

SEQ ID NO: 106342 - DNA, 1723 bp, Homo sapiens
tttaaagtctctgccaggatccatgctcacatgttacttcctgtatggaggcatggccagtttccagccccgcgctcttcgttccttcccagcctgcgccggagccacaactttcaggagcatggactgaaggcgccctcgccccagcgcccctctgagatcctttgtgttttcctccgtttcctccggccgtttctattttggggggctctccgctccccctgcctctcccctccccttcccctctcgcaaacatgcctccttccttcccggggccctggaaggagctgcctgcctgaagcccggagacgccgcgccgcgctcagccccgccgccgcccgccggctctcgggctgtgctgcgctgccgactcaagttggggatcctcggctgctcgccgccgccgcccgcggtccctgcctgccccaggcccggggcatcgccgccggccgccgactccgcgccctgcccgatcggctctctcctttttaaacggaaagcagcctttctccgccgagaggatcgtccccagcgtggctctgcgttcccggtcactttttgagattttccggggggcgctcggcggcttcccggattccaaggggactcgggccgccgagcgcggggggcccgtggagcgggcgagccggggaagcgccccggcttagcggaggctcgcacggaggcaagaacttattcaacaagtttacctccctgctttcctcttttcgatgtgcgttttcggacatgcggaggttactggaaccgtgttggtggattttgttcctgaaaatcaccagttccgtgctccattatgtcgtgtgcttccccggtgagtgccggccgccgaggggatgcggccccggccggcgcgcgttggggatgcggagttgtcgcctgggcgcggagctccggcgcccgtccgggagaccctggagagggtggagggtggcccggcgcccggataggagaaaaggattgctccgctggcttggatgatgtttagggaggcaggctagtggtcgaggaaggtggaggcaggggctggccggggagggggctgggggacgcgggggtctgctcccgctcccttttgggggtcctggggagctggaatcgggagaaagggggacttgctttgctgactcgtcgccgatcgggagaactcgagttgtggggcggttggggagactgaggccatggaaaggatgcttctgtgggtttggggggcccgggatgagccccctcgctctggcgggtattgaaggaactcagaaggtgggggtttgctttgctgttctccatccctttgggagggctaggtttcggggaatggaagtcggaggctggctgcggaggactgaggatgtgtggggagcagcctgcgttctgggtcgggggcgtcctccctctctctgggggctggggcgcgggcagcacttcggtgccggcgtgaggcagcctccttgggcgcagtgagacggcagggcgcaggcggtttcggagagatccgtgtctcccctagccccggcccgtggccctttccctccgctgctctgctcgattggattgcctgggtctggacgcggggagggggcgggggcggtttcggcggccggggcggtttcggcggccgggttgctgttcgcgccggggctgatttttttcctgtctcgcgcgccctgcctaccttcatctttgcccttttgcaggctgttcgcgg

SEQ ID NO: 106343 - DNA, 1057 bp, Homo sapiens
cccctcctctctcccctggggagggcagaggccagctgcctccctctcctctcttgcaggtcccccgggcagcagccccgagctccctcgtagctgtcccttggggtggaggccaagtcctgccctagcccggggaagggctggaagaaggggtgatttgcttttcatccctcgctcccctaaggacagagaattccccgtttttctgccctctcatccatcaactcctgcatacccggaggtggaggttatctgaatcaagaaaaagaggaatgtgccccgaggtctccgctctgcctggttacagacgcctgtcctcgggcggctggagcgcccgtttttggtgcagcgggtcccttagtcccgtcgtgcgacccggagcagggcgcgcgggagccctcgtcgcccttggggatcccctcgggggactggcagcgaatgccccctttgcagaatcggggatggcctcgaggggcagaaagggaaaacaccgtctggtattctgcacccccttttctctctgcgcatcctcctgcccgcggagcggcacggagctccagcccagaaacgcagctcggaggccgagctaggacgtgcgtccacactcaccctggggtttgcccactggagtcctgcctctacggtaggacactggggcctggggtttgcccactggagtcctgcctctacggcctctacggtagtgtaggccatggggacatctccccttagaaacagctgccttcattcactaaaagatcactgctcagtatttgggttaatcatctctcctttctagtctcccctgctttaccacggacttgacgactgagcgggctcaggtgcacacaggggttgagctttgtgagggccactctttaatgggtgcagtgggaggtcgtggagggctgccttgcaaattagaggaatttccaattccacttctgtccttcttgcgctcggggatgcagtcagtgggctgaccgtggttttcttttccctggtgtgtgaggaagcttgagatccaaaatgggactgccagggaaccagccttcgt

SEQ ID NO: 106344 - DNA, 3050 bp, Homo sapiens
ttgccgcgacgccgctggacctcagggggcgcccccgagccactggtggggctcctgccacctccacactggtcggcctcggccacctccacgcctcagggatggggcgcgcgtgcccgggttcccaggctctggggctgcagacgcgccttggcgcgaggcggcggcctcggcctggcgatgctgctcctggctttctcgaaacccgctgggggctggagttagccttgggacccctacttcttgcctgctatgacctcgaaagcgcttatctgtttgacatgagggataaaaatgcttctgttttggagtagggtcgtccttgtgaggtcttagccaaaatccctttttatttagtatttttgtgtttcctctcagaatcataactcagcataactcttcagttgcatttgagttctcagctcctgttcaggatatgggttagctgtagtttgggcagggttttggaaacacagccctggcatgagctttttcccagtggattggaaacagtggattttagtctttgaacagcagtgtggcaggtttgggatccattcagggttaataatgcttcaagtgatgctttccaagtgcaaagctaagagtgttaccaaacatgatattaggcatattacattgctatatacatctttataaagcactgtagaaacgtttacaaaaatagcaaaatataatggatcccccacccaacttcaacactcacaactcaatcttctctcatctcttcctccccaacaccttattattttaaagcaaatcctacacatagttcattcaaactctgatacatatctccaatcactgggaatttaattgcctctgacacagtataaaatatgttacttcagagtgttaaccttttatctagtttacattctcaagctcagcagattttttttttaattgatttttgtctttcggccctcagagtgaaactctggttttgatatgttttgtattgtaattacattatatctaggatgctgccattggaaacagttcagatggataagctcagctgtgtaccttggatgtgtcagaattggaggctccatgattaatgtcgggtgaatcatgaatctccctctaagctgtctcttattttatttgcatgtgcgggctttagttctgatgggcatccgttatggccttaggaaaaggcaaaagtaatatttggaaatcagcaatctttctctttacagggtgtgagattgtacaggttttttttccctctccctcatgtatcatgtttgaaaatgaagaatctttacccagtctctaaactgggttcctttgacacagttatggaataaaatctttgatgtttccttctaaacagtgttcacatttgagggttgatggacttaaaacactaataaagataggcataaacagggccttttggaaataggggaagttgctgttgttgctgaaagaagaaaggtcataggaagggttggctgatgtgggaaaagtgactattccatagtgaagctttgagtatctcccattaattatggacctgttttcactgaataaaagattatgttgttgtttacatgaagcgatccagcgaatgctgatgatttaatgcagcaaaacaaacagccctttcagatttgcctttctattctaaacagctcccaagttaacagagtagaatcagttatacacctgtgtgctgattgaaagtaacttccttggcattcacgtgagatcacttaaaatgccctagagtagttactcaggagcctctcctactcccttgtctccctgccttttcctggagacttcttttctttttttgagatggagtctcactctgtcacccaggctggagtgcagtagtgagatcctagctcattgcaacctctacttcccaggttcaagcgattctcctgcctcagcctcctgagtagctgagtctacaggcacgtgccactatgcctagctaatttttgtaattttgtggagacggagtgccgccatgttggccagggtggtcttgaactcctgacctcaggtgctctgcccacctcggcctcccagagtgctgggattacattgctactgggctgttgctttaacactttgcttttacagtgacacgttgtttgttctttttaaatcttgatttccattcagcatgtgggacaatgaaatgccatttctaggcaggttgaagattgcaatatgcgtacattctgaattaagagatttaaacaattgtagttaatactgtcatcctgggttacatttcatgtggtcacattccataacccggagcttatgggaaaaatttagggcatctgaagttccctctaaagcacttggtgcccagaaattagcccttggtttgctttggttcagagttgacctctgttagatgttgggtggtggtcactgaaactgttttcggctgtatcctgtttagagaataaaagggctgttttattaatattatagaagccaaggagtacactgctccccacctttaattttccacctgagcttgatctaggttaagcagccactgacgaggtagagggagtggctcaggagggactcaggaggggctgagaagagcctgctctgtgagggcttcttgtgggatttggcaatagtcactgaatttgtcccagaatgaggttgcctgtgcaaatgattaaaagataaaactgggcactgtggctcactcctataatcacagtgctttgggaggcgggagggtcacttgagcccagaagttcgagaccagccagggcaacatagggagaccctgcctctacagataataaaagaaaaattagctgggtgcactcttttgtccccactacttgggaggccaagatgggaggattgcttgagcccacgaggttgaggccgcagtgtactgtgatcatgccactgcactccagcttgagtgacacagtgagaccctgtctcaaaaaaaaaaaaaaaaaattaaaagatcaaatgtaggctgggcatggtggctcatgcctgtcatctcagcactttgggag

SEQ ID NO: 106345 - DNA, 2815 bp, Homo sapiens
aaaaagagttatcggacttggctttgacttatttttggtattgtgtttatgtggagttgtaaccaacaaaatcaataaaaaggataagtatattccagaaacctgtatttacgtctccttgcttttccctacaatttgcctgttgcaaatttctaagaacatgggattgttaatgtctctttaaaagatgtcttaaagtaatacaggtaaatttcactgtcaggaaagtctgtgatgattgagatgtagaacagataaatttgtggttaactcagtatgaaaaggattgttaggtataagtgatggctgtgcaagattgctttaagtagctagagggcttcttgagtgattgtccccttctattgggacaactataattggagggaccatttcacctggtatcatttgtggcaagatatttggtgttttgacagaaaaatatattctgtgtgagatagcttgctggatctatgcaggcctaaggtttttatgattgcagcccttaatacaactgtaaaaaaaattttttttttggcctggcatggtggctcatgcctgtaattccagcattttgggaggcccaggcggacggaacatgaggtcaagagattgagaccatcctggccaatatagtgaaaccctgtctcttctaaaaatacaaaaattagctgggcatggtggtgcacacctgtagtcccagctactcgggaggctgaggcgggagaattgcttgaacccaggaggcagaggttgcagtgagttgagattgcaccactgcactgcagcctgtgcgacagagcaagactccgtctcaaaaaaaaaaaaaaagattcgttttaagtgcttccagggataggaagaggaatgacagctgatgaggtttctatatgtgcctggtttctgttttggaagcctcccaaacggaattgggtagtgtttcacttgtacttgtggtgggtgtggggatggaggtaacttacacattgaatgaaaacttcatgtgtcagccagttgatgagagttgccatactattttgtcagcatgtagcaggaagaaaaatcttttaggagcctggaacttgttaatgcttttctatttgttttctaaactaggtggctattgagagttatacagaacatagcaaaataggtaagaatatggcctctggagccagcctacctgtgccattgctagccgtgctaccttagaaaagttacataccctctctgtgcctcattatttttttcttcctctgtgaaatggggtggtgatagaagcctaactcctaaagtctttgtgaggcttgaatgagaatgtatataaggacttagtgctgtgcatggtaaacagtaagtgctcaataaccatttttttaaatcaaaagttttatatgtttatttttatagagaccgggtctctccctgtgttgcccaggctggtcttaaactcctgacctcaagtgatcctcctacctcaacttcccaaagtgctaggattacaggcctgagccattgctcctggccaccgtttttaagtgttcttaagagatttggataggagtgtatggaaagcggacggtggaactgaaaaggacaactgtatgtatagacaactttttgaaaaattgtataaacatacgtgatgggtttttgtatctgtctttgctgttgagggtgaggaggagtagggatcagcatggggacattctatgtaagattactaacaggttacattttgaggtttaaataaatgagaaagtcctcatgaagtctgagatatcaccttgcccacattgcaaaggaggtctctgctttctcagcttaaagtgggaaaaatgctttctgtgggcttaaaatgtgtctcataagtcttccaaatccctgtgtagaaagagtcgcctagtcctgcaccctcagatgttaattcctcttctcaggctttatggacagtgtggtaatggagggaaataggttactcattactgggattcaatttggctccactgatgggaagcaaacagtagttgggtgtttgcttttattttacacttgtgtgacacttgaacacattgatgtcctgtctctatatgttcatggattcagagctacagagcatatgagagagaaccaaacactgatgcacacctcgtaccctctaatcttttcttttttttttttgcagactgaaatcagcatgatatttttctggccaaacaacaaaatgtgattttaaactactcagtttagctatttttggggagtagcaaagtgacacagttggctgctgaattctagcaactaaaaaagaaaaaaatgaaagcatagttcatggaatatgtaacacttccatgtaagaaaataggacaactggtcttatttttgggtctgtgatactgtctttctaagtgagtgaagcagggtgttgtataatgcagtggatatacttttgaggaattcatactagttacaatatacatctaagaggtatttgagttttcatagcattgctgcctcatgaatcctgcagtgcacttaaatcagatctgttcattaattgggaatgatttggataaggggacacagccataagcaattgaccaagcataaaagcatagtccagattagtgaggaaatattactgactttttaaggttgtctcgagaactttttaagaattgtcaaaaggatttatttacaaagcggtggttatttataaatgagttctacctgtttttaaaatgacacttttccagaagcgtttctcttcagtaagtgtggaggcttagctctgtctgtgggtagctaagggtggtta

SEQ ID NO: 106346 - DNA, 1031 bp, Homo sapiens
atttgctttttgaagagagtatggaaactatttttcctaattgcacaggagggccaattgaaagatctagctttttatgtatttcaccctgttacttttcccatataagcaagtgccatgaacactgggtggaataaaggtgtcttcctgtacttgctacaattaaataagtaagtaatgcaattagtataggattttatttggttacgttgaagagatgacctttcagcaaattactttagcttctgaataagctgataataactgtggatagagtctgaatttgttggtggtgagtttttttttgacactactcctcttccaaattacctaaattgatttgctttgtaatttgagaacttttgtttggggctttgaatatggttactttgtagtaatgcggtatttttactgtcccatgtatatcatctaagtgtgggcagcaggctctgaatcataacttcaggaaaggtctgagggtgttgtgtttggcaagaaatggcttggattctgcatttttcctctggagtttggaactagccatgggagccagccaaaccagctgtgggatcttgggcaagaccctcaatttctttcgggttgtttgcctcacccttcactaaatggcttctaaaatttttttctggaattttagagattgttgattccaggctaggcagtttggaagggttatggtctttttgcagtatgcaagtcagatgcccaggacacactgtgatttgtgaggtgcacttgttgactttttcctgtgagggtttgcttcctaaggcgttgagaacccttccattatcttgctaaccttgctacggattatcctgagggagtagcagacaaggtggtgagtggaacttggttaatggaatgcctataagctatgtttttgtttgtttgtttgttttttaaacatgaaaccttatttcttctggagaccaagttaaaaaaaatatggagatttgctcatgtcaacaaagttatgtgtatagcgtttaaaactatctaatgtgatttat

SEQ ID NO: 106347 - DNA, 4285 bp, Homo sapiens
tgagggctgacagaatgagtagataatgctcttcaaatgattataggatgttttagaagacattgatgtcactgtatgtagtttcaagatatctcatgtttgtatattgtgtcttaagagatacactatccaaggttaatatcttccttaagagaattctgagtatatatattgtcatggtggttgaagtttatctttaaaaagagaagctaaattcgtaccttctgttggctgctaaggtatctgttgctgagaacgggattccattctaattagaggacaaatgtctataggacagcagggttatgttttgatggttgcaatggtagtaaaccttttttttttttcctctcttgtggaataatttaagctaaattctgtgaatctggtggtcattgtatcaaaagtggccttggctcttaggtgattcaggagaaggtagccctcttattagtgctttgttccagaaacagtgaatgaggtatgcagagagcagcagagcttgcctcagctgacagtagagcgcaaaaatgaatgccattgcccagtaatggctttgtgcaggttggactaggagaagggcttgcctgagctgatcatttttgcttggttgacaagtactagttggtcaccagatctactgcccttgatgagacagatgttggctggtgcatcatggtgattctaatgtgcacaggcagaagctaagttttctagaacacattgctagtcaatgcctgccctgttttatccctcttcccaccagttgttttctcttctaaaactagtcattttctcttatttacatgtgtgtaaaggttacgagtggagggtgcagaaaatctcttgacagttttaggcactagcttctcattttcccagtcagtcaatttgggcagaagctgctgaaattatttcatgtgatagaggtttgcatgctagaggtcttagtccattttatgttgctgtaacattatctgagactgggtagtttataaagaaaagaggtttatttagcttacagttttacaggctgggaagttcgagggcacggccctggtgtctggtgagggcttttgtgctgcatcataacatggtggagaaggtggaaggggaagtggacatgtgcaaagagaggcaaaacccaagtgatgccctggcttcgtaacaaccccgctcaagggaactaatccattcccacgagaagtgactcgggcttgccagaatgagaactcagtcactgcctcgagaatggcaccaagccattcgtgagggacccaccctcatgactcagacaacttccactaggctccacttcccagcaccaccatgttgaggatcaaatttcaacaagatttggtgaggacagaccgaaaccatagcagcgcataactttagcgttagagttctttctgaacatattttaggatgtggtttttagaagaacacgtcagttgctagtgaagtttcttaactgaaatgagggagttgctggttcttgaaatttctgctgctccttatgatgcgaagtggaggtaaaattgatttctggggagtctaggggaaatgtaagcactctgaccacataaacaaaggattttgtgaaaataaatcttatatgccttggaacctttaaatggggttgagggaatgagacttgaagacaagtggattctgatgaaagaggccagtggcaaatgtgtatttaaaaaaaaatgcatttttttgcaggtaccagagtgaatcctagctttgtcctttgctaactttggccagttacttaactttattggttttcttacctttaaaatggggataatgagaatttcaaccttcttgagtccttgtgaatattaaatgagatgtgtgtgcaaagcaccagaaaagcattaggcacacagaactttttttttttttttttttttgagatggagtctcgctttgtcacccagactgttcagtggcgcactttcggctcgctgaaacctctgcctcccgggttcaagcagttctccctgcctcagcctcctgagtagctggaattacaggcgcatgccaccacgcccggctaatttttatattttacatagagatgaggtttcaccatgttggcaccatgttggccaggctggtctcgaactcctgaactcaggtgatgtgccttcatcggccttccaaagtgctggagctgatattatagacatgagccactgtgcccggctggcacacaaaattttataaatggtacctgtttttaatagccagtgtttaagattcatgaaacaaaagtgtgcctaaacacgctctcaacgaatgctatgccactgttgtgaagacatgggagagagctggagctgtgacagcagagatcccacagcgaataaagtggcagaaccagaatctgaactggcttttggctgttgtcatgctttcttctgtgcagagcaggagtgtgatgaattaaggctcacagggctaccaggaagaggttttttgtttgtttgtttgtttttttgacagaggtttagcaaagatggcttttaggatttaatttgtcctatatctcccaccttgaagaaaaaggttcatagctactcttcatattctcattgctgaaattatcagcacgagtagggtacacatgccttgctgtatatctttgtgttaatatggggccagtcacaccccctaggtgcatataaacagggacattcagtgaaagtgaacagcatatgtcttcttcctgtccctgtgtgttattttgcagtttttctacagaggaattggaggttggcatttgagccaatggtccccattcccatagctgtggtagatgttgctaattgatcacagagctttttgctactgaagcctgaacgaggtcttagaatcattttcaatagttggtctgggagaggacttttgtgccatctctgtgcctataataaggcagattaaccaaccttcgaaaatagcatgagaaagagaggtgtatccaagtggctactgtattcttggaaataggtgtgctgctacatgggcaatttttaaggtttgcttgtccataaaattgatttgaacttatatttgactcacatttgtttattcagaaaaaaaaatccagtctcttgatggtggttacatcatattttaattggtaagatccactaatggaggtatagggatctaaattcacttgcttatttttccttcaaagcccaggggttttgcatcagattatggcgcttgtaggagtgtttatattccgaagtgacacctttctgaattcttagctatttaagtaagtgttaagaatgggcttggtgacagcagtttttaaaactgtgattgacttattggatcttttccctctgttgtttatacctgacagagtatcttatgtttgttctgaataagttgattgttacctttagggtagcttgtttctcaaaatttgagtggtcctctgatcagtgttatttttgataaggaaattgaagagtaggcatgaaaggtgaaaggaattcatttgcaaagctgacatcagataaattttaggtgcttggtaacataccaagtactcggatgacatcaggtaatcccgtatttgtttcctgtatatgagtttttccacctcaagattccttttgatgttgagcctttgcttaatgaatgtgaaatgtctatagagctctctgttcaatatggtagccaccagccacctgtggctagtaaacacttcaagtatggcatgtctaaattgagatgtgcttcaagtgtaaaatatacaccagatttcaaagacaaatgaaaaaagaatgtgaaatatctcattaaaacttttcattgactgcctattaaaatgatattttagatatattaagtagaaaatgccattgaaattactgtcacttgtttccttttactgtttcatgtgactaccataaaattttaaattacacatgtggctcgcatttgtagctcgcattgtatttttatcggacggcactggtctagagagctctttccaaccttttctcaccttccagaagagcatttcacagctgtaatcccctgtgtgacattgattacctgttttctcttccctaccccttcaaaatgtagggctaagagaaactcttgtaattgatggagaaggttgtctcctagaagatactgcctctgggatattccgggtatgttaggatagcaggttagggtcatttagctttgtgtgcctgtttacccatctgtgaaatgggtttaacagtccctgctctgtgag

SEQ ID NO: 106348 - DNA, 1067 bp, Homo sapiens
ttctccctagaattggcatcttgagccacgtgacatgaagacatcctcatctttctcaattcctgctccctgaagctcagagccactctgatccttgccctttcaaagctggattgtttggttcttggttggtgtctctgagatgtccaaggttctctcaatacattcttttaatgcctacgttaaccaagggttgatttgggtcattttcaatcaaagggcaccaatatcagctggaagtacacagaaggatagataactagatgtgttgagaaggacaggaaccttctcccctgcctgccaaaaataatcctttaatagtggtttcatttctttgtttggtttttcgagttcattcattttgagctttttatcttcgggaatctgaggacttttattttggtgctagggacagcctctctggaggagacatgctgataacacttagccttaactgcttctcttgattttatttgtaaattagaatcctaaggatctgtaaggaaatgagtaaaacttaattgtacaacatttagagcctgaattaaaaataataataaaaagagtctataatggtaagaggccctggaggatgagatgaatgctgagctgtgtgtctgggcatgtattttgtccacacctaatcctttctgtcatgttttaactactccttagagtggaggtcagcagtgtctgattacctccagagttcctctctcttatcgtatcttgtccctcgctccatttccttttctggcattattggacagcaagtgttacaacttaaaatcaatacgaagcaatttcatttgtttataactatgaagatgagcgcttccagcagagcactgtactttcaagtaaagtttaggtttttttttttttttctactttttctgtctggtgcccaaaatgcattaatttttcattgtacgagtttgcttatgttatcccgctttgatctaaggccttgttaccatcatcatctctttaaaactgggattgttggcatctgaatcatttttgtgttttgtaggtccttagtaatcacagctccattgagtttg

SEQ ID NO: 106349 - DNA, 1341 bp, Homo sapiens
atagccattgggtgggttgttgattcattctaaaaaacaatattagaggctggtgtggtggctcccacctaaatcccagcactttgggaggctgaggagggcggattgcttgagctcaggtgttggacaccagcctgggcaacatggcaaaaccctgtctctacaaaaaaagtacaaaaattagccaggtgtggttccgtgtgcctatagtcccagctacttgggaggctgaggtgggaggatggcttcagcccaggaggcaaaggttgcagggagctgagatggtgccaccacactccagcctgggcaacagagccagaccgtgtctcaaaagaaaacaatattaggacaatattgcaaatattaaaacatcttttattcagcatgcagtttgattcttaggagatgaatgatgaagatccaagttctgttttggtcagtggcacaaaattcttgaagaaaccttcttttctctcaaacctgtttcatttgttggggacctactgtgtgccaggtgctgctgcctaccttggggaaccgtctagttggtaatcacagtggaatatgaaaagacactgattgggctattggattataacatgaatttttagtgaagcctctggacggttgagacaaaggaaattattaatgcattttgttttctgctttttcttttttattttttgccttgttttgctagtatggattttgatttaattgctactttaattgctttcattgggtgatagattcctctgattgagtagaccttttccatccccaaatatctaggagttgaaacttaaggtcaggaaggacaagttcttcagtgggaaataaaaaaaaaaaaggtggttgtcttggcagcggaagcttgctaattacactgccagttgtagtatctatttatgatggaggcactggggacccaattagcaggtcattttcatgtaaaagtttgggattggactctcgtgtatgaagatgatatggcaaccagtgagcaccttcccagtgcaggggaattgaaggtggttttagatctcattgccttggatctccacaggtcactgataggaaactaaagcttgactgttccttctgttcgtttgcaccaccagtttctaaagttatcttgtctgcagggccaacattactgaaaagttgctacttttgagagcctgacttcctgggaaggaactggtcatagtgatgagaccaatagggttgtgagaatttgcaaactggaaacatagggatgggaaaggcagtgggaccaggagggcattgacacatcccttcggtctggatgtcccatttgtttcggggctgcctcccaga

SEQ ID NO: 106350 - DNA, 1244 bp, Homo sapiens
attccttaaaaacaagctgtgtatacagttctccttttcttagctaaacaaaatgaactgggtttcaaaaattggagatgaatgaggttcttataataatcagttgcatttacttatcagctcttgttcctgttctcttcatttcctttcagattgaggcatttttaatgaggagagaagttagaaaagggggtcaggaaaactggaaaaaaaaaaaaaaagaagaaaaagccagaaaaactcttctgctgagctctgtagctgttctcagttctttaaagtgcttgaaaagtaatattttgttgctactaaatctaattaatagctagctggtactcatcaagacctcatttctttcaaccttgaaggcaattggaaagatacacagatctgtgtattatcacagcaaacgaattctcttttttccttaatcacttagagcttggtaaagcaatgtaggcagcagacggacagctgtgttttaaaaaataaaacgcatctcaggatgttcactgtggctcgtaatgaatgtgtattgatttttagaattactttttgaaaaaaatagaattttgaaagcagaatctaaactgtatactaggcatggttcttaacagaatagcctacctgttcctgaatgtttggattgagtgaataagtatttggaagcctgtcctctgcccagcacggactaatcagaatgctgtgggccaaaatgggtttaaacacaaagagaggatgaaaatactcctccgggaggagggcgccgggtggattacaatgcagagccctgcatctctgcctgtgtagggtgcagctgtgggctgttagttacatgggcatttcttccattctgagtggaccaagtgtgaattgacttggtgcctgaggtgcagataggctcaaggaaagtaggtcaggcctgaattgtggctgttagacgttgggagtgcaagcagaagagaagacagtgattacaaatactgcctatttagaggacaagagcaacttcggagagttggaggagcaccccccatctgcataccacctcctccatccaatcagttatttctgcggaagcacacccaggactgatgatgttttgtgtgttgttaggtagactgttactcatttggcagatatttattaggtgtgtactttgtgccaggtcctttgtttgaacctcaaacctgccttgggttggttgtgccagtggcgccgacatccatcactactttgcatgt

SEQ ID NO: 106351 - DNA, 1057 bp, Homo sapiens
tcagcatcctcacggtgggaccagtcaagtgtccagctacctcacacacgtgggcttctaattttctctgtgggtcacactaaatagtccattgttcatcaaggagagaggaaattgatttcaaattacgcctgtattggttaaaaactgaactgccatgaatgctttatgggatcagggagaagataggcccagggttttagctgcagtaaaacctgcttaattaaccagacactgtctattactatcttgacagtcagcaggaccccctcttcggcacaggggcttagttttgcagcccatgcttgcagggccaggcttggtttagacctataagggtggagggtttgggcttctcatctgttgtctacttccttccctgggtcactgcttgtgccggctggtgagaactgattgttacattttcaggaattttgagagccaattattaaacacagtcttttaaaacatagacttatgtaaacttacaattaaattacatttaagaagtgacaaatatctcaagctcaacacttcctaatgattttcctgcattttactctgatctgtgctccggaggttgtatctgtggtgtgtgtggtagtattactgtataatggtttgctactgcacatctttcctccttcacatttagtgatgttacttcattttggtgctttgaaatgggtcatcatgggaatatttataccatggaaatcagcaaacactataaatcagccaccctgctggaactggatggtaagtgtttaccaaaccaccactgacttggggcatcctctgagttccttagggctactgataaagtttggatgtttgtccctacccaacactcatgttgaattgtaattcagcatgctggaggtggggcctggtgggaggagtttggataataggggcggagcctttgtggtttggtgctgtctatgccatagtgagttcctatgagatctggtcatttaaaattgtgtggcatccctcacctacccccacttgcttctgctttgccttctgccatgattgaaagctccttgaggct

SEQ ID NO: 106352 - DNA, 1060 bp, Homo sapiens
agccaatttttttatttttttgttttttttatttttagaaagagtcttgctccgtcacctagactgaagtgcagtgctgtgatcatagcttactgctgccttgaactcctggcctcaagtgattctttcacctctgcctcccaagtagctgggactacgggcacacaccaccatgcttggctaagttttctagttttatgtttgtagagatggtgtcttgctacgttgcccaggctggtcttgaactcctggccttaagcaatcctcctgcctcacttctcaaagcagtgggactacagatgtgagtcaccacacccagcctgacttgtgaataaatatgaacagcttggctgccagaactagaaggctttggcatctcccactgccatgctgccttaaaagggcatgaggtcccacctctgtcttttccattttcctggttggtggcacccctcaccccatgtggtgtatccattttctattgctgtataacaaattaccataaactcagcaatctaaaacaacacacatttattatcttgcggtttccatgggtcatgagtctgggcattagctgggtcctctgctcaggctgaaattagggtgccagccagggctgtgatctcatcggaggctcattctctcccaggcttgctggttgttagcagaacgtagcgcttcatgtttgtaggactgaggcctcagctcctgaaggatgcctgcctttgcctgcgacgtggctgtctccacaatgtggatgtttgcttctccaaggccaacaaggtggtgggggtgcggggtgtcagggtgtctctgctatttgtagtctcttttaaaagactcacctgattaggtcaggcccacttagaataaattctcttcattaaattaaagtcagctgatcagggccattgatatacatctgcaatatccctaactcctgcggagctatatacagagcttatttctaaggagagaagttcttctggtgtcccaatgtcagtccatgtatgttgttataacaaaatatctgcaaccaggtaacttataaagaagagaa

SEQ ID NO: 106353 - DNA, 2643 bp, Homo sapiens
aacactgccctcaacatggtggaaggaagaaaggcagctttcctggaggcgctgtgggtcctcttttataagggccttaattttattcaccagggaggagccctcagggcctcatcacctcttaagggccctaactattattactatcacattggcaacacctggattttggagggcaggcactctaaccatagcaccagatatcatgccttactcttaatgatcaagatttgggtcacgttcagctggaccaataactgaacaggctcagatgacgtccccacctacgtgatagaagtgaggatgaaagcccccacttcagcctcagggaatagcattgtcttaggaaagaggactctctgccaagaggtgagagaaggagctttgggcaggtaaggataacacatgcccactttggaacttagagtgaccagcacatcctacacggatcaacttggttatcattctaggggtctagaattggtattctgtgtacctccttccttgacactgtagtggtatggacagccacctgtgaaataaagctgtgggtacagagcagtccctgttaggttttcattttggtgtgaatcctctgtctccttgacatgagtatcctttaaatacttagaatattgtcccgagaaaatgccatatgaattcagaaatcggatcaaactgtgttctttgggatccattaaaactgaaatgcctggggccaaaacacttaccagatgcatcaaacactactgtcagtctgagactgctcagccacatcgctaccgctctcatttcataggagttttctttcccacagaaaggcagctcgacaaactcttttaaaccttacttttttttggttttggtagtggtagagggaaggtctgagcaaagataacagagtggctacaaacttaattattaatctgactcttctctcctgcttctctttagaagtgacattctctgtggagaggccaggagggggaagttgtagcattcaggttttatcagtttgagggcccactttcttcagtgggtctctgtgatggctgaaacgggttgcaaataaataaatgccatgtgggctcaggaagctaaagtgaaagagtgaggtgcagagccacagcgaggggctggactgtggagaactggacgcgacttgcctcttctccaggcctggcggggttgggcttggggtgaggattaccctgttggaatttgagccagcattgttagatcattctaatatttccagagaaactagacatcttaaactttacctaattacttccaatttttatttttttttaatgaattcagcttttattactgcatgagggctgaaataattgtcttttggctagacttgtcctgtgggtggccagttttgatctctggtccgcaacttgccagggcagaaggcttatcggggatgctgtttgatgccttgtcagcatccatttctatcttccttcttcgtacagagcctcggttttgtacagatatctgtcctcctccataaagctgagcagctagggagaagctgagcagcaagggagaagctgagccactagggagaagcccagcagttgggtagaagccagaccctagctccaggttggctatatttggttcacagccatcattaaggattggttcaggagcaactatgtgatctcaccacgtgtgtaatggaattgggaggatgtgtgtgctgggcccttccgtggagagctgcatctttccttgaagcctgggaatctgtattctgtttgctgtgggtgctgccaggatgtgccacccacaactgcatgtggcagccatcctgctgccagcctgagggtacaaggttgaggagagctgacctggaagggaagggaagcacctggattcttgttcgacttctttgagctgctcaatcagctggctctggaagcctgcctttcctttggactcccatttgtgtgaaacaataaatgttttattgtttaaggcagcatgagtcggcctgggaagcagactaggagagggacctcagtccatttctagacttcatgaactattggtgataaaggatgctttccctgatgccaggctaagctgccactaattcagggctagatgatggaaggatttcatcgtctttacgctgagcccttgctattgtccctttaggggattatccaagataatactccatctgaggtctgggctcagtggggaagagcataatcacttacatctgccatgggggctcagcatgaggagtggcaggagtaccagtgtttgccctcgatgtgtgaggttgggtcagcctgaacatgatacggaagcctttggtctctagagagggttagatatagattgatactaaactatgaccttttccatttatgaaaattactcttcaggacgatataccttcatcaaggtataggaagttattggacttcccttaggccgtgtccccttatctgtaaaattgggctaaccatccctctataccttgctgtgtgggtcgaatgaagttatgtatgtaaagtgatgagcacagtgcctttctcattttaattttcatgttttcctgttccatttctacgtatcatcttggctaccaagtcagaaacctagaaagccttt

SEQ ID NO: 106354 - DNA, 1032 bp, Homo sapiens
tttcttatttctatcaatttacacagattattctttccaacttttttccaacaagttaacaattaaagacagcccttctattaataatgcagataacttttgattatatacaaattattttcacactttaaaatgtttttatttgtatctagtatggagaggcagtgaggcatgtgatgtaaggagtatgaactccgataccacactgcctgggtttgaatcccagcatggctacctagtggtaaatcacttaatcttgttgtgcctcagtttcctaatctgtaaaatgagagcaattatagtacaactttgtagggatgtgaggattaacagtttaatgcatttaatacatttaatgtgcttggaatagtgcctggcgcagtctaagtgctgtgtgttcacttctatgcatagtcaaaaataacagtaataaaatctgcagtactactactggctctatcatcagtctttgctaagagattttgcaagacccaaatcatttggtagatgtattgtcattgtctcttagattacaagtgatttactgctgaatataaaaaaattgcccaggcaggtaagcttaggaaaaggagcctccatggggcaaagatgctgggctatagccagcagtcttcgtagcagatggataaagagattatatcgtatgtttgcctacatagatttggctgtacttagggtgatagtaagaacaggaactgaatgttacttaagagctcaacactaatgcatatgcagcatttaataagacaaatattcctctgttaagtgaccattcctttcacaggtaggtagttattttcgtttcactcacttgagtattacttattctctcattgccttcctgcctccctgcctccctccctccctccctccctacctccctccctctctctctccatctctctttctctatctctctctttgtttttctttctttcttctcctgttgcccaggctggagtgcaattgcactatcttggctcactgcactgtctaccttctgggttcaag

SEQ ID NO: 106355 - DNA, 2591 bp, Homo sapiens
ctgttgcaatctgtgcagttgagaaggctctcatttaaagaggttctctggtgagcttcttggaatgcgaagcatctttctgtaacctttgtcgtgactctacaattccatccagttgagcaactgttctcttggatgacctttgcctaaagtgagatgcacatgtgcctccagttcagttgtaggtagttctcggcagtactgcatgtggcctgtttccagttagaaatgtcaacactgtgagcccaggtaggtgctgggcacgaattgcctgatggactctctgagaagctgttaacttctccactgcttttgaaaggatcttcacctttatgcattctctagcctattttgttcctctgtttttttcccccgtcttctctacattaaaggtgcattagtgtattctcagtgcaacactttagagttcttggaatgggcagagagcagttatgtcccataatggcaggataatcaatggaaagagatagattgccaggttgtaaatcatgtgagagaatttgatgatatcagcttcgggggaatgggatcctattactcgttctgaattctctggttcctggaattaatttgtgtgtgtgtgtgtgtgtgtgtgtgtgtgcgcacttgtaatcttttggtagaacagcctttgttgtgaaccagaggatgacaaaggacaggtcagcttgtctcaatctctccctccattccttgctgtctgtgctcaccttcgacgagaaatgctttccataaagccaccaatagcgcagcagagtggcttacgcttagactgtcagagtcaaaagaacatttatttctccatattcaagggaaatcacaccctttagactaggacactcaaaagcctagtagaatcctagcaaatgcatttgctggcaatagaaagcaaagggctttttctatttttaagaggaataaactgtgccttttactttctgacttaatgcagagagatgaaaatatgctaaaatcatgttttttttaaaggcatagaccagagacattttggaagcttttcatctagcaaagccagcgttcctttaagcaaagcatcaggattgcttcaatatttaggtattaatattcccttgtggctcaatcagctctttgaagatgaatttctcagcactgctgtcacaattaaagaaagacatgcaggggtgaaagggaatttgtgtgtttcttagattggaaggatgtgttgagtcaaatgaacattctctcaaggttaaattatctatttaaaacccacccaattacagtgccaggtacaatctttgatgagattcagggaaaacaaattaatctgtgtgggagagattctctttgtatgaaggcaagctatgaaatcagaatgaactgggcattgtttgttaagggggaaatggttatataaattgaagatggtgtagtctcaaaaaccatgatccattattaggttactgaagacctcctaatagaagagggtagaggtggtttattacagttgtgcttttgtattttgttgaaagaattgtgaggtgaccacaacacaaaaccatgagcaatatactgtgacctctgtgtgcggagactaatccaaggaatttagagtaatctcagggcatggctttctagaatgatcctcacatcctgttggtttcacctcccaaataaatcttgaatctccctgagcagtgctctctaaatttactgctattgacttggtgagctaccatcctccctgggttaaaatatggtggtagccctctaagtgatcttcctccttttagaaacatcttcctagtacagatgaaaaaatccaaactctcacccatgggcctgcctccgcctctcacctcttcgcctgttgttcctcactcactcactcactagctccagccttcatggctgggatggttcagcaggcctggctccattgtgcctccccatccttctgttagttgcttggggttgccacaatggcagagtaattaagtatagtctctggagtcaaactggtagattccaatcctggctgtgctactaaccaaccctatgaccttgagtgagttactaaaacctttctgtgtcccagtttcctcatctttaagttgggtataataataatttgactttaataatacctttttttttttttttttgagacaggatctttcccaggctggagtgcagtggcgtgatctcggctcactgcaacctctgcttctggggctcaagtgatcctgccacctcagcttcccaagtagttgggaccacaggtgtgcaccaccacgcccagctaatttttttggtgtattttatgagatggggttttagcatgctgctcaggctggtcttgaactcctggattcaagcaatccacccgctttggcctcccaaagtgctgggattacaggcgtgagccactgtgcccagcctactttaataatacttaataattctaattaggtttttgttgaggaatgaatgaattaaaatatagaaggaattttagaccactgctttgagctcagtagcactgtatagattgtggcacagttttgttataaaattagcatcctcat

SEQ ID NO: 106356 - DNA, 3108 bp, Homo sapiens
aggagactagtatttatttacttatttgtttgtttgtttgtttgagatggagtctcgctctgttcccaggctggagtgcagtggcacaatctcggctcactgcaacctccgccttctgggttcaagcaattctcccgcctcagcctcccaagtagctggaattatagtcatgtgccaccatgccaggctaatttttgtatctttagtagagatgggggtttcaccatgttggctaccttggtcttgaactcctgccctcaggtcatctgcccaccttggcctcccaaagtgctgggattacaggcgcgagccaccatgcccggctgagaatggtatttagaaaccaacatctgagcatatcttgggatattgcagcccccaggcccttttagtggacaaatctatgggttaagtatgtatgtccatgtccatatacacacattaacatctgtatgtctgttaacattcacaagttcaacaacacatgctttattttagttttctctttcatggatttgtgggactccttctgtgacaaggtgaaactgggctccgactgttttgaatatgtttatttactcagtccatcccactgtgtgttggaatactcttccgtgtagacacttctcaactccctcaaacaccaacctccacgccaagcccttctccctgccatatagacaccctcctcgtctcacttggttaccccttctggacagacggtactcttctgcagaataaggcatgtcttcctcctggtggagggcagccccatggcaaagtacttggcttggcaagcagggtgtgttggctagatttcattctctcaattgaccggacacctttgtgttaatacgcaactttatgtggcaaccctgaggactctgccccaccccagctctgcacccatcttgggactgaggcactgctgctgcaggggtgctgctctgttaaacctaggaacagaaagggtgttgttggtagttgactttccaccatcgatgccggaagataacagaaaactcagtaagaggggcataaagtaggtagacagagaagatagcaaaagaggactgctggagttttggtaaaaggattgtgtgcctgatcctggtttgtgtccgaggctagctgcatccctgcccttggtatttgagggacaatgttataaaagatttcactcttgaagttaagctaccaactgaaacaagtcacatggtcaagctccaagtcaagggacaggaattacactgtgtgggaggaactgcaaagttgcctgtagaaggacccggatacagacagggccaattacccagtctactatagagaggtcaacttgtttgccaagggctaacttgttaataagtggtagaatctaaatgaggtctgtccagccagggtgtgtcggtatttaatggctcttctactgcttctggataaaatagtcagggacttgttcggcatgtgggttgctcagggtgtacaggccatttataagggtgttcctttccttttgctttctcttgcctccttgtatgtaggaagtatactttcaagaagatagtgttaatcagatacagaacttccaagaaccagatggccttcatttctttcttcctgattagctatataaaaccaattgtccaactgagaaaggcttaattttacaggcttaccggggaggcaagcttattgtttacagctttcaacctccctcttgccttccttgccagaggctcggctccagcaagggaacctgaatctaacactgaagaattttggaagaagttggatttttacaaggagtcctcacacagtggatagatacgaaaacggtctctttacttctgtgagttaaaggtgtgcctgtgttgttcttagggcctgccttctatatcttctttgttgtgtcatattttaaatggcaaatgacattgactgacagtaagagcttgtatcgtatttttcagatagtatctgcattaatgtcctgtaggaaaacgtctgatagtgctgcagaccattttaaggaattgaaatctaaaaatttcactgaattataaatgtgcaggtacactatataactaattattaagcttacaaagcggccaggtggtacttggagaatcttagtatttagtgtggtggaagaactattcttgcatcagtggaaatattacactgaagccgtgtgcttttttatgcagagtaaagataatagtggctggaatacaggatcagccatgtgctatgtgaaagatggcaggcttaaaaaaatccatttgtatttctggcaaattgtcttaacataatccacatgcctttctaatttaaaatataaaaaattaaataaagtttatactgaagttatatccattaagaaactggtaaattagttaagtctcacaagcttagactccagcatgagaggggggtgtgtgtgcctgtgtgtgtgtcctgctcacatttgaattgtgaattcacattgcattcccttgcaaggatgtgccatttttaattaagactaaagcatggtggggtattctaaattgggcctgattataattgcagatggcaattgagcttttggaagctggtttctttaactgttaaataaaaattgtcttttttagtattggtttgcagaagtttagcagtggatgtcgaggggaaaaaaacggtaacctctttctttccttgaaactaaatgtcacagcatatccatcttctgttaaaggggtttagctctgaagaaatttttcttaaggcctttttaaacaattgatcagataaaaaattttggctcataaagctgaactttccagagactttctgttgatgagagtcaatacagtaaaaaatgacagtattcattgttattataaagagtacttttgaccatcacacttttagtgatcataattagtaccttaggctgggcttggtggctcgcgcctgtaatcccagcactttgggagcccaaggcaggaggaccatttaagcccaggagttcgagaccagcctgggcagcatagtgagatcctgtctcaaaaaaaaaaaaaaaaaaaaaaaagttaaaaactaccctggtgtgttggtgcgcatctg

SEQ ID NO: 106357 - DNA, 3783 bp, Homo sapiens
taaacaggtgctgatgaaagcatcttaataaaacacatcacacagttgtgttactccttcacgctgagctctgcctaatgaagattggctgtgtagagccactactgcttcattttgttgcattttgtatacacagttcagaaaattaagagacaagggaactagtattgagtagaataataaaaggactttcttgaatgatggcacttctgattttttttttccctgccctacgtgactggacgaataagggaggaagatgtcatggggcctctaaacagctgataacaacagggttcatttacattttgtagcttgtgtgtcccccctacttcaagcacatgcgtagggaattgaaattgcagtttgcctattacgtgttggcagtaatctttcaaaaaaaattttatgtttcaaaatcaggcagccaacagcagtagccagtgatatatggggctattgatgcggattgaatttgcagagggaaaatgggatttggttgccatatgaactcataatgaggtggcctcacagatttgtaatggtcaaccattatttgcacctggaatccgccaggaatcaaatacctttcaaggagagactgaaatgaaacttgagggttttttttgttcctcgtccggtgaatggagcagttccaaagtaatgtcatttggtttgtcagttgaagatgcttaaagttaacagttacttttttttttcttttttgaaatggagttaacgctcttgtcacccaggctggagtgcaatagtgcgattttggctcactgcaacctccgcctcccaggttcaagcagttctcctgcctcagcctcccgagtagctaggattacaagtgtgtgccaccatgcccagctagtttttgtgtttttactagagacagggtttcactatgttggccaggcaggtctggaactcctgacctctggtgatcctcccacctcagcctcccaacatgctgggattacaggcgtgagccaccgcgcccggccttacagttactcttttaataagcgtagtgtggatcagtggtcttcactgatcccattgccttatcagcaaaaaaaaatttggacccatgccccagtgtgtgtgtgtatatatatatatatatatgtgtgtgtgtgtgtgtgtgtgtgtgtatatttatttatctgttatgttcttatactaaaatcctatgaaaattataaaaccttaaaaatgtaaagcatgaggtcaaaactattctggatatagaaggctaaatattgtttcccacatcccctttgaattgtcttatgcacccctggatactcagtgctggaaatgaccagcaggaatcctgccttaggtgacgaggctggcactggagaatgttgggccgtccttccttccatcctgcagggatcttgctaaaataaatgacttaaccttgaaactttactgattacgtggtatgtgctatagatgggattggattaatactaaacatttcagcagcagttcttctccccaggtgtggggtgtaggcatgaaatagcttaagtcaactaaagctcacctcttatgttttacctggatactgtgctttagaagtttactttctgattcatctcagcaattttgtttttttcgcttcctccctctttctctctctgtcttccttaactccttcactctttctgttcttcctttattcgtgccaggggagattgggacacagtattttccaaatatatttatcctctcaggtcagttggagtttgtgggctaagagtatgagatttgaagttaggataattatagtatttggatgagtgaatgaatgaatcaatagatatgtcccttcatccaaactatgctggttaggtgattggtgggcaagctggtaagttcctctgattctctgttttcttatttgtgaagtggagatcgttgctaatgtatgtggttctctgtagaattaagtagagaacacgggaaatagccagcacatggtctggcattgtgtacatgcccatttaattttggggtaattattatctccacagtccctgtccttcttggaagtcctgaaagtatttcttgaaagtcatcactcaacttcagagcatcttagataccaaaataacagatggtacagtatttgcggggcatacatctttcacttaggtgttcttttactttccttttcccgcctaagttaactttctagagggaggaaaccaagtcttcactttattttgtggttgacttttcttgcctccctctccaacacctcgctcaacaggtaatcaaataactaatttttagttgtcaggtaaaaagacatttttgtgtttaagttcttcaaaccttagcttttggttgcatcagaagacttgctttgaaattgcacaaggtaaagaagggggagctggaaggatttcaggaaggagagtttgctatttgtaattagtgcctaacagaagttggtacatttctgtagttttccgttgtcagtcactttggatgataatttttttttttgctattatttttaagtgacagattgcagtacgtattttaggacctgccacccattttgatttgaaagattatgttgtcggaatttcagacactgcaggtaaagatctaattttactaattaacaaggatttacaaatcttgtaaattactttcctcttgcaatggaaagtgcttttctctgatttattatacaaataattgcaaatccttataactgaacaaggtaaaacttttcgtgtcttttggaatctgttttctggttttgtgccttcagtaatagtcttaccttagtagacaagatgtataaattgtgtaaattactaagcaaaggtgaagggaaatatattttggttatttccagttagtaactgcctcttaatgaatcacattaagtgccatagtcacttctttttttcccaaattgtctttaagaaggtacatttgcaccctaagtacaaaaaagggacagtattatttttctgcttttaataaaagtaataatgtcatatttttcctgttctagaatttcaggcatcaccccctggagctgatggagagactggtattccactgtgtatcttaatatcagggaaatatctcacaggcacatcaagctgatatcacagggtttccttgattgtaaacaatagaatggattatgactgacatgagccaacacttggatttggaagggtatgatagatttttttgctcagggtctaagaatcgtaagataccaaaccttggaaggggcaggaatcaggacagtgggagctaatggcaagttggtggtggaatacattggccctaccatgttttgtttttagacatggcattcccaagactcagatccctccttgggcgaggttctgatctgcatgactagggaggacagaacaactgcatggttaaggcagaggaaagttgggggactagaacacagagaaatcggggggaaggaccttgaggttaattacaactaggccttgctttctttaaggttatccagtgcagggctttgatcatagagtggattttcaaacattggagcaggaagaggctcccgactctcaccaaagccctggggaatgaatgacttgttcaggaggtaggtatagcttggggttacacctggttttctttagctttgcaacagactagagaatttggttcttaagtgatattatctaaaattgggaaagaaaatctctttcagttagcagagataaaatattgacaatgctgtggagggga

SEQ ID NO: 106358 - DNA, 1775 bp, Homo sapiens
gttgaagattttactgttgcagaacttactccatttaaacttgaaacccagtgttcctacagctgctttccttttctatgcaaatatttcaagcattgagaccattacctcctgagcaaagcagagtcatttatgcattaaataaataactttcctgtcccaacagggtttgtttgttttttttttttgggggggcgggagagatcacttttaggcgacattatgtgtttgtaggggcttgtcttcaaataaaaggcataattgaaatacagctgaataggaatcaagagtgtgattcaagtgtaaggtaaaattgatggcatctcttattgcttcgtagatgaattactttatggcagctttttcctgataaagcttttttaaaaactaaaaatgcattattctagtctctaattgtccatcctgacagcagcaaaaaagaaaggctgtgttttgctttttgtttcttttccctcccttagcagtgatagtagaaattgcttattgctggaaaatctgtatttgcctgctggtatgccattaaaaaagggatttggtagcctgaattccattttttctttaacgcaaaacataaggggttgcattttccatactggcagaatgtggaatgggtaggtgacttgaatgttgtcttttccacttagtattaccgttcaaaacccacgtacaccaaggaattggaatattcgaatgtgagacagaaagatgacattgcggttagcactgtctgtatccaccaaatcgtgaaccttctcagagtcatagtcccagccagggaagtaagagtgtcgctcttcactattgctgcacacatcctgctgctgggtgccaaagtggggcaggtgctcaacttcccagcagtgttaggagtaaaggctggtgggggagaaggctggttggcagattattaaatgtattttacatttgccatccagtttcattttcatggcccacatggccacctaggatatattcttagaaaaaggaatagtaactcaaatcaagatcaagcttctgatcaaatgctggggatacagcctgatgtaaaatgggacacctggatgcaatcagcaaaacccacaatgaggggaattctacactacaaatgatcctgttatatccaatttatgtatggaatggcttaaagaggcagagaaaagcctttggattaaaagagacttgagagacctgtcacccaaatgcagtgtgtggactttgaatttgaacaaatcaatgttaaaagcaaatttttttttttgaagtagggaaatttgagtactggatgttacctgatttatggaattattgtcacttttaagtacaggcaaaatagtagtgttggaattatactttttaaaagagtccgtatcttttagtgacagatgctgcattagttatagggaaattatgatgtctggaacttgctttaggataattcggttggagtaaggtgtgatttggggtaaaaaaacataaaatttgcctgatacgataattgttgagggtaagggaatggttatgtggggactcttctatctctgaatgttggaaatacaatagaaagttaaaacataatgacttacctgtgttctattctttatgatggctgctggctttatcaggcctacttcttttttaagtatttgtggggtaatgaatatttaaatatgtaacctttttacctcaaagtaatctaagtataaatatggtcactaactgcacaaccaggtctcacagaactgacaggttttatt

SEQ ID NO: 106359 - DNA, 1638 bp, Homo sapiens
gctttttattgatttcatttgggaagtttagggagaagtaggagggacacttgggaaatagaggcatttgtgccttcaagcagttcactcggggcacctgcatgaacttccaggtgtcctaagttagatttattttttattttgagatggagtcttgctctgtcatccaggctggagtgcaatggcgcaatttcagctcactgcagcctctgcctcctgggttcaagtgattctcctgcctcagcctcctgagtagctgggattacaggcacccaccaccatgaccggctaatttttgggtttttagtagagatgaggtttcaccatgttggccaggctggtcttgaaactcctgaccttgtgatccgcctgccttggtctcctaaagtgccgagattacaggtgtaagccactgtacccggcccctgagttagatttatacctcaaatgttttctgggtaaaagagggtcctaggaaggacagacactattaggtttaattgctgtgaaattaattgctagctgttcatctgcgctgctgctttgttttaacatcaaagttgacaaagtctccacggtgtagtagagagaggtctttgtgaagaaagctccttgccagctgtgggcattgacaggaaggcactctcttcctaaaccttgtaactgatattgcttttgcggtctcaggtaagaaggagaaaaagggtaaaagtttactgtagattctttagaaagcctatggcatttttgaagtcataataaaagatagattccagtggatctcctagaggctctctgtgttaactggcattgtttaagtgtaacatgtcttcagctttaggctccttagcctttcaagggcccttctgtcaagctgatgggctaccatgccagaaatgaagtccgatattaaaatgtttgttcaacagaaggtggatggagagcagcattttcaagtaatgggcaataaatcatggaattggagaagttactcaaattttggtaatgtgcccaaagaccctggccatggccttatgactgagacatgcatataagtggtggttcttggccttagggtgctaggaattggttgattggatgtgtgctttaaatagatgatattattggttcaaaataaaatgatggggtgagaactgtaaatgcctcctagaccatattctgggtcttttttatggagttgtagatagagcagattttgagataagtattcatttagttaaaggtgttgtcatgaaattccttctcaaggagttgacttgagctaacttgcatgttaacaaataccactgttctggctttccaccatcctgtatgaatatggaagttacatagaaataaaacatttaagttttcttagcgtttaaagcactaaactgtaacatatctggttaatactttagtattgtgtgctttcctattaatatgacttttttcccaagtaaaagatgttttctcctgtcttcctctctgatcagggaaaagaaaacagtttctgtttttctttggagagctcttcaggggatctttttaaggattgactcaactttaggaatttttcagttgagctgacattcattgcaatgtgtttgtggtttagcatggttcaaagtatttatc

SEQ ID NO: 106360 - DNA, 1067 bp, Homo sapiens
cccttatctgcggttttgctttctgtggtttcagttatctgcagttgcctgcattctgaaaataggtgaatatagtatgatagtatattttgagagagagagaccaaaactatattcacataacttttattactgtttgctgctatacctgttctatcttagtggttattgttagtctcttactgtgcctaatttataaattaaactttatcatggatatagttgtatagaaaaaccacagtgtatatagagctcagctccatccatggtttcaggcatccactaggggtctcagaatgtatccccctcagataaggagtgggtctgctttatattattttccaaaaattgcgtttgttatataaaaatccatgttgccaaagtttttaagctctgtgttttcaaaagtagtttaaatactataaaagtgcttattctactcagtcattggggagagtatttctggatcagtagagaaaagggaaattgcaagtacatgaaaagcttccccttattttttttgtgatgtaggcactggaggtacagatataaacaagatgtggaacctcccttcaaggaattcataatccagtgacaaagagggaaatgtaaataatcaattgctgtaaaatgatatagatgctctgattgtagcctggattggaggcagtgggagccacatatagggagtgatcaattctgcaaaggtaagatttcggtcaaaaatctatagtcagctgggtgccgtggctcacacctataatcctaacactttgggaggctgaggtgggcagattgcttgaacccaggagttcaagaccagccttggcaacatggctaaacctcatctgtacaaaaaataccaaaaaaattagctgggtatggtggcgtgtgtctgtagtcctagctactttgcaggctgaggcaggaggatcacctgagcctggggaggtcaaggctgcagtgagccgtgattgtgccattgcactccagtctgggtgacagagtgagaccctgttacacacgcacatacacacacacacacacacaaatctatagtctagagg

SEQ ID NO: 106361 - DNA, 1041 bp, Homo sapiens
acagtgaatgtatatagaggacagtcagcaaatgcttattgaatggtcagtttgatgatataatatttaagtttaattggattcttatagatgaactaggatacccttttcattctgagttgaccatttgcaccttgtaggaaggaacaggtgaggcttccaagtttgtcctccttcctgctctgtggaaccaaatccattatgtacacagcccctaccctaacagagacgatcacaatcacatttaaattatacagtgcacctacagagtttcagcagatgtgtgaatattaagttattaataactaattgggtgctaattatgtgccctggagttcttggagtgataaagaagtgtcacctactgtgtcaggcctctgtcttttcagctttggaaaatcatttttggcagatgtgccaaagttaactttggagctttaggttttgaatatcatttctcacaagtcttattttatttttttatgccttgtgaaaacttactgtgaaactgatgtgacttcccataagtaaaaattgcatgtaccgttttccaaagagggggtggcctgtgtgtgatgatagtgtttcatctctcgggagatggaagaactaacattaatcccaggggagaatttaaagctgctcaagggaattcagaagtgattctgaagcccagtgggtttttggtatattttgggagataactggtttggaagggctttgaacttggatcttgcaagtcttagctccatcactaaggatacgcatctcgtatttgtgcacacacgcccccactgccccctttttgttccatctctatccgaaataggactagtttggcttttgttaactggaagaaatcattgagttagaaagcctggataccaggttaggatactaggaatgtgatccatggtttctaagatttatagaatcctgttaaatttagaagaagggttttaatgagataatcattgaaaggctacactctcccctttctgtctctagttgcttgtaagctttagattgctggaactttgt

SEQ ID NO: 106362 - DNA, 1042 bp, Homo sapiens
cattagagctgcttggtttgctttgtcttttaaaattagcttcataaatgcacacaattgaagaggctcctgatcttggatattgcttttccttctcccactaagaacattaaaaaaatctcagtatttccaacccagggttaaaaatataatataaaaggtagaagggaaaactgaagatgaaagtaaacaaatagaaggccagagttaccaaatattgacaatgattaacacctgtttgttactggtcaagctggccaaaaacccagtgtttgcatttagccacagaaaataaaagctctcccagttgggttgtgattaatagctttgtccacaccccgcattccttttctatgctgtgtgtttgcccacctgttgtttggaactcctttctaggttttggccttaactgatagatgattcctggtgggatccagagactgtctgaggttcaggtttccagcctcccttgcagctagtgtgtgggcatgtgacccgggctccaccaatcacatgcatctgtcccagactttggatttactgctagttttgccaacacagacagaagaaaagacattttgccagttgctacaacatcctgttgacaagaatagcagtggtggtagagaagcctcgttgccttaacggggctagttcctgagctccattatctagcccacgggttggcaaattttttctctaaagggcctgatagtagatgctttagatcctatggaccatacaatctttgttggaattattgatctttgttgtggtgttgtgaaagcagccatagacaatatgtgagcaaatgagcatggatgtgttccagcaaaactttatgtacaataacaggcagttgcctgatttgactgtagtttgccaataccagatctagcctaaccagtgatcctgggagctgagctacccaaaactttcagtaaattctgtttcttagatcaggtagacttggtttattttccttgccactagggtattcattcctatttccagacttcataatctaacttactatgtgcag

SEQ ID NO: 106363 - DNA, 2234 bp, Homo sapiens
tatacttatagtgtaatatcaaaaccaagaaactgacattatcaattcacagactttattcagatttcaccagtttaacatgcacttatttgtatttactcagtggtgtttgtggtgtgtatgtgtatgtatagttttatgcatttttttcatatgtgtagatttgtgtgaccagcatcacaatctagatacaggacagttccatcactgcaaagatctcatatgctaccccttgatagccacccccacatccctaacctctagcaattactaacccattgttatttcgagaatgtcattatataaaggaaatcatacggtacataaccttttggtgctggcttgctttactcagtgtagctccccagacccatccaagttgtttgttcctttttattcctgagcagtattccatggtagggatgtggcagtttgtttatccgttcatctgttgaagaacatctgggcttttcctagtttggggctattacaaataaagctgcttatgaacatttgtgtacatagtttttgagtgaacctaagtttttatttctctgagataaatgctcaagggtgccattgctgggtcgtatagtaagtacatatttagttttatgggaaactgccagactattctcctttactaagcacgtgataactggaattggcagtgtttgaacagctcttcctgtctttcattttaccgtctttcacaccattatctggattaatttttaaacaaaagaggaattgcagttttcttacatgccagatattatactaagcaccatacacatactatctaatttaagcctcataacaactccccaaaggagggtcaataccattgtttctctaaagaaggaaactgagccacatggtatgtgcgattaatgagctagatgatcctgtaattgttcaggttcatccagctcattaaaagttatcaattggccgggcacagtggctcacgcctgtaatcccagcactttgggaggccgaggcgggcggatcacgaagtcaggagatcgagaccatcctggctaacacagtgaaaccccgtctccactaaaaaatacaaaaaaattagccgggcgtggtggcaggcacctgtagtcccagctacttgggaggctgaggcagaagaatggtgtgaacctgggaggcggagcttgcagtgagctgagatcacaccactgcactccagcctgggtgacagagtgagactccgtctcaaaaaaaaaaaaaaaaaaaagagttagcaattcaaactctgaccttggagctggtgctgcttttctgaaaccactgaatgtttggtgcccttgatgccttgagatgttcccttacgaagtgtcctgattgtgattgcggcctgtgaggcccgttatggcttgtctatctactgacactcccttgtacccatccgtgaatcctctgtcctcttgggttttatttttctgtcttgcttttgatatgcctgaagcccaagacaggctgcaacttcatgataagtggaggcttcatgtttgattaaaccagtcctatgcattgtcacctgagaatatcctgacagtggaattagtaaaggagactactgcagggtgttgtggacccccatggtgatgaagacactctgagattaaaataacatattaggagattcgttaacatagttgtccattcgttacccaggcaatccttgtttcattcataaggtctcatgactgcatcttagttggacttagcagcacctaacttctgcggattccctggcatccctccaggaccccattctttcctgccttgaatgccttcctgtgtttcacacataggcaccaaggatccaggtggaagacacctagcttgctcctaccaggctacacattttcacccgaggggaaatgaaaactgggcagcaaaagagaggttttcttttggaattacacatcttgaaatacctcagttcctctgtcctgagacaaaggcatttcattttttgttggcagctaaatgcagggtgtttgagtggggtgaccccaggctgatgcaccaagggaacgtctaatgcctgcacttcccaggctttctgctgcagaacacacactcatttggctgccatctgtaatacagtcagagagagagggcagacatttttctattaggttctattaccttgtattggaagaataatggcatgttgcttgaatgtttcccaagagaatgttttctgt

SEQ ID NO: 106364 - DNA, 1003 bp, Homo sapiens
ctttcttgtatgcagcccagggcttaatgggttgaccttctatgctgctgacaaaggaaggctacctgtgctttttctttttttttttttttttgagacaaagtctcactctgtcgcccaggctggagtgcagtggtgcaatctcggctcactgcaacctctgcctcccgggttcaagagattcttgtgcctcagcctcctgagtagctaggattttaggtgcccaccaccatgcccagctactttttgtattttttttttagtagagacggggtttcaccatgttggccaggctggtctcaaactcctgacctcaggtgatccacccacctcggcttcccaaagtgctgggattacaggcgtgagccaccgcacccggccacctgcgctttatcagcttattgaggtgtgcggcaggagtcctggttgcctggtgagtcatcctgcaggtggaatggttgagtcgccgagtcccctgccagattgtccagagttgtacaagggcacagtgctgcctctcaatgacaggaaataggtatgatttcctctctcttctttgtccttatttcatctctgattattgtcttcccagcatttaaccacatttgcaagttacgtttttcacttatttgttgacctgttcatgatattcattaatcctgtagattaagatcttcagggattgttatcagtttcacttattcttttatcatatggtcccaggatactgcctggcacatagtagatgttcagaaatatggactaaatgagtattataattgacacatctcagtcaagaaggagtggcagttatactcagttgtaactttttcttgaagatatgtatcttcaagttacttgtactaatgggtggttgcatattttggctcttttactttgtatttttttagaaacagggtcttactttgtcacccagcttggagtgtggtggcaggatcacggctcaccacagctcactcctggctcactcctgggctcaagt

SEQ ID NO: 106365 - DNA, 1041 bp, Homo sapiens
ggattcattgtgccctagtgtctcctgtatgtgccgtccctcatgccttcaactttctttgctcaaaatgaaaccaattgatgataaatgaaaggatcagtaggctttaaagcagttatttacaactgagcatttagagttcccacgcttaaaaagtgggagctgttcccatggctgctgagagtgctgcggaagctggttctctttgtccttaagttgatcgatagcaggcatcagcggggaagatgctttgtactttgcttgttaaacagagggctgctaagcagctgtggcagtgtgaccctggttgtgctgctgtgggtgacatgagtgtgcatgtggacagtggttatggtgcttccctacacactgggcacccaccctatggacagacacactccatgaaaatgtttgggaagtataagagctccaggccatgggatgaaatgggaaggacctaactctgatttctagatttggaattgaatctgcatgtactgttcaggtcattgttctggcacatatttgacggtttggttgtcttcaagctcaggggctgcgaaagttgccagaataggaatgttctggcctgatgcaagcaggcacccggtgcctgtggattcaggactggtcacactgcagctggacattatgaattcagatgtccctgatgagacggtgtcctaggacagtggctaggtgaggtctcaggatctcaggtacaaggttagaggaggcaacgtggagtcacagtggagagcctggttggtcccatagccagatagctacaggttcaggtaccagctctgccctcatctattttttgtgaccttgggaaagttagataacaatttgagctcctttttctatcttgaaaatagggatctaatgtctaacttagctccctggtgttttattctccccatctcatccacatcacacttttattttcaagtcttgttttctttctgtcatttattcccgagataagtgtatgcttgttttgttgtttattttcccagctaggatacaagttctttg

SEQ ID NO: 106366 - DNA, 1379 bp, Homo sapiens
ctgtgtacacttcttaaaagtgaaaaagcctttgcaggtttgtccagacagtggggtgaccaggaaggagagtcagaagagaaggtaggggtctggatcctgattttgagtgttcatttcccaaaaaatcttaggaagataaacactttcttggtaacctttgagtgtcatgttccttctctgaagagtgtattagattccatgtggtatacccagtagattgcattttgagtgtcattgatgattaatggatagagactgcttagaccactgtatggagaaggattctgaagtcatgtctgggtgcagtgggagagtgtcatgatacattgattattacttttcataaccgatttacctaaaccaaataatactagtttttaaattcctggatgtgatacacaatttcctttaaaaataaatttaattagaagaaatgaatggttttttttaaataaggaaaactagagtttttcagggggaatgtggctatggtggaaactttgaacatagtatgagaaagaatgaaattctggccgggcgcggtggctcacacctgtaatctcagcactttgggaggccagggcaggcggatcacgaggtcaggagatagagaccatcctggccaacatggtgaaaccctgtctctactaaaaatacaaaaattagctgggcctggtggtttgtgcctgtagtcccagctactcaggaggctgaggcaggagaatcgcttgaacctgggaggtagaggttgtagtgaggtcagatcatgccactgcactccagcctggcgacacagtgagactccgtctcaaaaaacaaacaaaaatgaaaaaagcacaaagaatgaaattctggaaacactaaggagatgaatgtttacctacctgacagaattgttttgggagttttaatgcaggtggcagcttgctgtgacttctaaaggcagtacagaagtatcacagtgtggttaaacttctttttttgaccaggaggtaaacctgaactcaaagtctcccaaagccctctctgaacaagaaaatagaatagtggtccagagtttggatactgaggctggactgtctgggtttgagccccctctcgcctctgttcacatagttagcgagtgatatatgcatttaacttccctgagcctcagtttctcatttgttaaaggcagtacctcatggtgttggtatcaggattaaaagaccatttcagaggaagcttctagaacagcacgtggttcagtataacacggcgtctacgggttgacaatgataatgatgattggatattaaaaaaacctgactggatgcgttggctcacgcctgtaatcccagcactttgggagactaaggtgggctgatacctgaggt

SEQ ID NO: 106367 - DNA, 1754 bp, Homo sapiens
gaagcctacttaagaaaagctgacagctgatgtcaggtgttttctttgttcaaaaatggtgtagaacagtacttggagtgaatgggtgacttcaatttagtaattgtttttacatttagtaaagaaattatgtaatggtagtgtctcctctcccttacccccccaattcatttgaattaataatttaaaaagtacttttaaaacttagacccagccatctgttccttcctgttgccttacagcagcagtaattgctttaggatgggcttggaaacaagagcggaaatggtctccagtgaccccaaatcataacagaactcgaatcctaagaaaaaccacaagtggcttatgaataagctgaaaacttaaatgcctcctcaacaatttaaatttggattgcatagcttatggatttggtgggacattctaacctcgatgtatctttaacattttctgcttttaagatgcaaaggcgttaacatagggatggagagaaaacttccttctaagttttcctagaaagtctggcacctttgacatagctataacagaaagaaaaatatatatatgtatttgatactggttctagataatgccattaattagatttaaaatgatgcttatagcaagcatatgtacaacgtaatatgttccagctacgactctaagcacttttcccattttaattcacttgcttctcagaacagttctatgagggaggctctattaggcctgactcatgctcggcattttgtacacgaggaaactaaagcaaggcaaagtcgactgcccagaattaccggctaataaatgtcagtcttgcctggtgctgcacacctgcagtcccaggtacttaggaggctgaggtgggaggatctcttgagcccaggagtttgaatctaactgggaaacatagtgagactttgtctctttaaacaaaatttttttaattaaaaaaaaaaaaaaagtcagtctggctactagtcttttaagtccattctgctgattctaagacttgatccacaagaccagggattggcaaaccatggcccatgggcaaacatctggcctactgcctatttttttgtaaataaagttttattggtcaaggtgtaggggtgggaaaaaagttttattggaatagagcccctgctatttgttgacttattgtctatggctgttttcttgctacaacagtagaaatgagtgtttgcaacagagaccatatggcttgccaagcctaaaatatttactgtctggctgttagcagagtgagtctgcctacccatacagaagaccattctcatccatatgtatagtccagaaaggtaggaacaaatttttaaaaatcttaattccatatactttcaaataagattgagttaaaactcatacattgaaggtccaagtatttggtgccattctccagtgttatgatgaatgtgaaatcatttacaggacacccctctatcaggcatttgggggaagagaaaggaacagataaacatgtgaaaaatgggagagtgtgtgaactctctatagtactctagaaagcccggctttaactctgcaaaatttgaaaatagcaatcttaaactttctgtttttctcgctgcttttctgcaacagcttcagaatagaaactgacaggcccattttagtagaaagcaaacggcagtgtgtgggtggcgccttataacacagcaactcaaggttaggtggggggagaccaagaattgagtttcttttgttaa

SEQ ID NO: 106368 - DNA, 1755 bp, Homo sapiens
acaggtttttcttaacgttctgtaggatacacattactttttctactatgtgtcttttattgctgcaaaagtcagttgtacttgagacagtttggcactgagaggggaatgtggcatatcttggcactgtggacagctggttgggtgttgatgtggtgacagggaggagggaagggctcacagaccagacacgtgctgcctttgaatgcaggtggtgatcagtgtgcttagtcatgtagggctgctcttcgtggaagaggtagcttggtagggtggttgagtttcagtactggagtcggcagaactagacttctgtccccaccctggctcactagctgtttgacattggacaccttgattcaatccctttgaacattagtctccttgtctctttgatggggataaatatctgcttcacacatagccctgtgggaagatgtgaaaagcccaactctgggtgtgttaggggcagataaatgctgagtgttagctttcctttagccgaatctgaactgattgaattgcattgggactcagtttgtagtcagtgacttatgttcaaaaacttgggaagacccaggagggggttgacttatcccgaaaaatcaggttctttttgaaaatgtgttaattctttcaggccagcaaggtgtcatctaagaatgtctgccagtaactagttcccagggagtcttaaagatgtcactgtagctttcagacatacctgagttactcttaagagcaccttgccttgtaggaatccattttgtgatatttgtttaaattatgtcacagcgcattgcagacttgtaatctgttttcaaaatggtattgtctgcgcccttattgatcagcgcgacatcttttacttgcttatctctgctttccatatggtcatactccaaagctagacctagagcagacccactaactcattaacctctctgacacgaaatagaaaccttctagaaggggaccagctatgggaggcagagttcttaaaatctctcgcagtcccccggcattttcctgagcctccggttgtaggtattagactgggcgcgagttttcacaacacggggaatttgtcatggttgagtctgctgtcgtttgaaatactgcttagttctttaagatataattaagtagaatcgcagaaaagagaccttcgttggcattttttgtttgtgttgtgactatcgaaatccctgctctccggaggcttgccctgacttggggtggggagtgtgacgtagagacactgcgaagccggagcgatcaggttaggtgaggccatgcttaagttggattcgttgaaaatatgattcaatttgagaacatggtagtgcccatttccaagctgtcacagagtccaggagatggggaataaaaaatcttcggcatctctcggggaagattattttgtttgaggtcttaggacttctcctgatactgtatgaactttctttttttttttttttttttaattgatcattcttgggtgtttctcgcagagggggatttggcagggtcacaggacaatagtggagggaaggtcagcagataaacaagtgaacaaaggtctctggttttcctaggcagaggaccctgcggccttctgcagtgtttgtgtccctgggtacttgagactagggagtggtgatgactcgtaaggagcatgctgccttcaagcatctgtttaacaaagcacatcttgcaccgcccttaatccattcaaccctgagtggatatagc

SEQ ID NO: 106369 - DNA, 1152 bp, Homo sapiens
gtgtatacctatgtaacaaacctgcacgttctgcacatgtatcccagaacaagtataataataataaaaaaaaaaaagaaacatggctttgcatgagaaaagcctattgaatgtctcagagatggacatgttaatgttgccttgagtagaaagatctggatactgatctccagctccccgctctttcagttttggattctactgttacctaatgtgtttaaagccatattggttagcagggagtagtgatcccagctactcaggaggctgaggtgggaggattgcttgaacccaggaggtggaggctgcagtcagctgagatcgccccactgccctccagcctgggcgatagagtgagactccatctcaaaaaaaaaaaaaaaaaaaaaaaagccatattagtactctataaatactccattaaaaaaaggtgggaggtaggagacgattccccagttgtccaaaaaattcgattgatgtgctgctgacttctgtttggtttagcagatgtttgttgagcagctgtttgttgaattggttgaaaatgaattaaaaataattttatcttgacctttctctttgtaactttaacatcacctcatgaggtagctggaaaagtcctggaatgtctttcaaactctgggtgggaattactgtttacaagttgtcagccagtgtcactaggtgataattcccctctgtgtgagtgtcatggttacagtatgcttttttgcctctaaaagaacaattatattcaagaaatttcctagtgcatttaaaaacagctgggtgaaagtcattttaaatccccaaatccaacacattcgttcttttgtgcatttaattaagcagaagttaaaataaattagaacaggagacattcagtgctgattgttgaatcaacaaagcaagaaacagcctagcattaccctaccacagatgtctgtcactcagtgctgttgccctataaatttccatcaactcttaccattttttgaataacaatttcttttctagtaaaaattggcatatgatgtatagcaagcaatattctttatgcaaatgatatttccatatatctctaattttttccccttaatgatacatttatgttggtggcttggataacttttccggaggatggaggatgtg

SEQ ID NO: 106370 - DNA, 1070 bp, Homo sapiens
gcagtccattgtagctgtaccctctgtctttgcatctttgatttctccagctcggagcatccccagacaagatggcctcatccctggtaaaaagttccctggccgagagatcaacgtgaatttcccatcctggcttccaggcgtctccgcttggcatctcacatttctagaaaaacagcacccaacctacttcccagacgtgtcataatcatgtcccattttgatacttattatacaaataaccccaaacacgtgtactctttctattggttgtttgtctaaaactttatttttgttctccaaaagtaaatgcccattgtaatacccaatagtctctttgaatttgcatcccccatacctaagttttgggaggcctcccaatgctcacccctcattagtatctctgtattatgtgcaatttttttttccttgaaagcatttctgcaataatggctttttttccccccgttaagtgacgacagtcatcctaagttaagtttatttgactaggagagggaagaatattcacaaagggcactggtctcacgtgattgagagactggtagaaacatggcaagattgggccacagtcaaatcagagtctggaaagcttgctgcctcagggatggctgtacatacaaactcccaaatgatacattaattgattttgattatatgactccaaagcttgagcatttcaaactgttttcaaactaatggccatcgcatttggcaaggagcccaactgcgcattgggttcattataaaaggagatcttgacagcctgtcaggaggacagaatgcatgctagggttttgagaagttgctcagtttcagaggacttggtggtgtttttcattaaaaggtaccagaaatttagcagcccgaccaagagccaggcttataagtcacggaatgaccctggtcagtacatgcagaaccttaacagtatgatcttaagatatctcattagattccagtgaataaggccaggtaccgtggctcacgtctgtaatcccagcactttgggaggtcaaagctggtggatcacttgagtccaggagtttgag

SEQ ID NO: 106371 - DNA, 1019 bp, Homo sapiens
ttagcttgtgaaaagcttcttttcttgcttttaaaaccttcactctgcgtttagaataaatggcattcctggatctgttaaataggcagttaataatgccacagaaactacccaccacacacccaaccacaaaacttgctcagaggcaggatgtgtattggaatattctgtaatgatccaatgctgaaacattacaatcagccttgaccctgcaatctgcatttttaattgcagccttcatttacagtggggtattggtctgctttcagtttgtcctgaaggttgactggatctcgtaatctattcatgtcagactgcctgctaggaccagcatgaattcagctcttcagaggaagcattgtcatacagagaggactcggccgtttgtttcaccttgatatatttcccaatatatgcttcattctctggggtagtttttattcctcttctatgaaatgtggattataaggactcatgccccatggaatttctatagggtttagatgagataatacatgtaaagtatttgatatgggcatgtaggaagcaccaaataaacagtagccattatgatttttcttgctctggatttaacttttttaagctcctgaattttggattagtaatgttgttgaccatggaggaaaattgaaaaaagatgttggcttcattttcttgatgactgaaaagtaaactagtggccgggcgcagtggctcactcctgtaatcccagcactttgggagactgaagctggtggatcacttaaggtcaagagatcgagaccagcctggccaacatagtgaaaacttttcgctactaaaaatacaaaaattagccaggcgtggggtgcacacctgtaatcccaactatatgggaggctgaggcaggagaatcacttgaacctgggaggcagaggttgcagtgagccgagattgtgtgactgcacttgggcctgggccacagagcaagactcctgtctcaaaaaaaaaaaaaaaaaagtgaactggtaatgagaaat

SEQ ID NO: 106372 - DNA, 2397 bp, Homo sapiens
ccaactcccagtcataatcctttgttcatgacattataatcatcaccacaagtggctaattgtgatgtcacaaatggaggattatgactcaaatgaggaataaacagcagtggcggattaattcctaagcaacgaagaagattctgttttgtgcaaatgccccagggtaataaaatttaaaaccagaaaaaggcaaggggaagacaaagctgaacatatgtgatctattagctaaattgtccttaagtggaaagcttttctttctctctttcttccttccttaattttccacgtggtatgaatagctcctctatggtagataaatcgatttggttttaggcctaacaaagctcaaggtgtcttgctgactaattacagggatgtcacacctgggctgaaaagtgagtcattatggaatctttgaggtgtttttattttccataaagttgaattgctcttttcagtcagcattgcaaaagtcaggctataaagatcagcacaatggccgaagacagctgggctgataattgacggcagtcccaacctggaaactctgggtaaggccagcagagccgaatggcgtcagtcactcaggacagttttctgaatgggtgatatgtaaatgaggcagtggtaacagctgttgctgtggattggcctagaaatagtagtcaattctctgtggagggtcaattttcgattctaagtcaaggatgtgtttttttcccttttaggaaataggtggttcccatactattcagttaaccaagcagccaaatccctctctacacttaacagctccctcatccttggggttacttggccgtctcaggaacactcttgagtttgtggccttttctaaaaccatggttgcagtagccaaactaaactggaaatccctttgaattgttttccttttcatgggacatagtgttcctttcttccgtttgatatatttcgttctctgtcgtgcttgagctctctctcgacttatgacttcaccgtcacttgaatattggaagccttcttgaaaaacattggtgaaagacttgaggctacagtttggcatcagcagcagagcaaataaaaccacactttaaaaacttggtaaatttagttatgaaggagacctcccattcgagtctaggcgtttaataatagcctgtatgcacaaagtagaaattatgtgattatcgtcttggggctgtgattagaatgtgttgctatatattggtaacatttagaaatgtgtaacttcatcccagctccatggtaccgtagggcaagcatgacataaacatggtcttgcagttgtacactggtttgagattccctggagactaaacagctatgagggagtcatgcttccgtttgccactgttgtctcctttgtctcgtataggctatcagagatgtttcctggacttttaagagtagctccaacagaagttttgccttctgagtagtaaggtggtcacaacttgtcctgtttcccctatgggagtgtatatgctggtggtgatggtgggggatctcacctttgtttccacatcagtatgctgctgccagctcccctccaggctgtgctgtcgggacacatctgtgtgcctgtatgtggctcattagggagcgggttgcctgttcttttgaggtgagcatacattttgatttttcttttggcatcttttggtttggaacatttacagccctttttaaaaatatagtcatttctgtgtgggttttctctgagccagtatttgccacactccagtgatattgagagaaacaaagggaacacgtccaagcccagaggggctctgtcttaacatctgacaggagcttctaagcccagtgtggttgttactgtgggaagtcgggaagtccattacccaaggctgtgggaaacacaggtcataaaagcgggggcctctgatcctggggcatttacagcttagtttgggagccaaaactggaccatgtgaaacagcttagaacaattgcagaaccaagaattagcaaatgtggattaatgtagattaaaacttgcctgtgagattccaaggtacttggaaatctgagttttacagttgactgggaaaggcttcctggagtagttgagtttgggaaccaggttttaaatgaaccaatatggggtggtgaagatgatcgtgatatctgtcaccagagacacctctgtgtgaatcccttccctgccattgactgaccttgggacaaattatttaacccaagtctagtctcctggagatgagcctttgtttctctctccccatctccctccctctctctgttactcctcctcccgctctccttctttcttttcccgctcctccgcctctctcattctctttcttaagtacaagactgcctacctccctc

SEQ ID NO: 106373 - DNA, 1412 bp, Homo sapiens
caggaaaagacgtaggaaatcttcaccagatttgaaggaaatgtttggaatggtttgacttaaacatcttattatctggcttatttggaattttctttagggggccttcagtgacacctcaagttggtccttagccatccaccctggtgggtgcccatagattcagataagcagtggagagcatgtgtgctgcactagccctgttcagggtaatagccagcatgtattcatacaacactggttaatgattcttcccggcagtcctactagggactccacctttgtcaaggccgtaaatggactttggggctgtacattaagagacctggcctgacttgatctggctaaacatggctttgggaccctcttgaagtttccagttgatattttttattcttttcaaaccaaatcactgcagtgaaaagaaaacaaaaaaaggagtttttaaatttatacaaaagtatgaaaaagaatgagaagttaggaaagtgtgaattatattttaagtaaggctttgtggctttgttgatcatggaaatctttttattaacacattagacaaattctttacatgccagtttgcattcacttaaacatttgtgggggtggtgtgtaaaatgtgcagcaatacctgctcctttttgggaaatccatttgttaaatagccctcagaatatgacagttttatagtaggattatgacttttttttgtttccatgtctgctaaaaaggctaacagaataggacaatttaatcacatgccattatgttcataggggtttgggaagctcagacatgtttctagaaaaggaatcgcgtacccagcttttccaagtttcttagcaaaattcgataattacttgatttggagatgtccccattcagccccttcttctgagggcatctggccttcctgagtgtggctgacatcactttcatgaccttggctctgttgaggtggttgtcagggaaggtgtgttgccagaactgtcctgtcactcttcgacagagagagacagagagacatttcctggactaatccatgtttccagccagatttatattatttacagggtattaggcaaggaccaggatttagccaggtgttgccctggagaattgtttcggacctcaagtcaaaaaaaggctgcatgctgactagcggaggaaacagctccccacgggccagcctagactctgtatcctggcatttgtcatcccagctggagttttttgaggcatcggagctagaataaagcaggagctcatcagaggctctcttttctcagtcgcctccatctttccagagactcagaggccaccagctgtggcagcaggtctcaagctttgtcggtgattagttgcacggcggggaaggctcttcgcattttcctctgttctggggctctctg

SEQ ID NO: 106374 - DNA, 1016 bp, Homo sapiens
agggaaaatatcctaacatgtctggcgtgccctttaacttgacagagagggcagaggctgaggaagtttggtggtacgactgcacttggttaagcagccagtgctggcgaaacaggccttacttagcccaggcattctgactgccatttgaggactgtttttactgtaataatccatcactctggactttatgctctaggaatgaaaattgtatttactattggcctaagaaaaacatattgcaattcatatttgaagctgcttagcaaagatccctaacaccagccagaagtgatttggctattggaattacctgttttggagagtgattcctataactgcttccctatcatcatctgtaatggttgaagctatgtgtatacattcacacgtttacacacaaaacaagataatttctttactgggtcttagcaaaaagtctagaagaattttcaataaaactggatgcatatttatgattgtctgacttaaaatgtagactgtgtggcatgtatgaatttcactttggagggaacagagtcttgagcaagcacctcaaataaatacataggccattactctctgctatggcagctgaaactaagaaacagtgagagggctatgtggctgcttatgtgggaagatttaatttctgttgtaggatgctgaggaccttggaaattgaggcactgaagctgaagtggcaagggcaagtgtgaattgcatcagatctttttctctcagggtaatttcttcatatcccaggtaaggtagcatttggatttctagtctttatatttattggtggtgagtaattctccccaaaaatggagggggagaaactagtatgcaaatgatgacaaaatagaagaaatctatctcattttgcagtgttcttatcccatcataaaaattagttgatcagataaattgaagttttaacctgattccatttatttcctactagacgcattttggaaatctcagtttgtgttctgaagattttctagctagaa

SEQ ID NO: 106375 - DNA, 1024 bp, Homo sapiens
ggctcacttgctgcttttctccaggataaatggcaattgcttgatgcttgatagggacgtattaaatacaacggctgtctcaggaccctgtctgccttgtttttcatcacctggacgtctgatacatgcaaagtggaggaattactgcaaagagtggaagacaggttaaacaaacattcaccacaactaactgtttaagcttaagtcactaaaacactcattgtgtttttgctctgaaggtccatgaagggatagattcgtccatcctccttctccgtcatcacacatcaaggccaggattgtgccatttatggattccacatcctaagagaaaactgttcactcagatggtttctggtagtgactcctcttctctttgaaatgcccttcaaagtatttagccagaaacaaagctttttggtttttgggcttgtgtcaggcttttgctagagagtgatttttttttttcaaggaaattaatagatgatacagtcaatgctagacaattttagatctcagagctgtcttccttgaaaggtacattactgtttcttttacatctctgagatgagactgctcagagaatgattgattttggggtgaattgctatgtttttacatagacaaaataaaaccacagaatccttcaatagaggaaataaaatatggcacgccatcaatgtggaatattaggcaccctcaagtgtaagtctatgtatatatgacatggaaaaatgtttaagatgtggttgggtgactttaaaacaagttgcagtttgggcacagtgcctcatgcctttagtcccagcactttgagaggctgaagtgggaggattgcttgaacccaggagtttgagaccaccctgggcaacatagagagaccccatctctacaaaaataattagctgggtgtggtggcacatacctgtagtcccatctactctggaggctgatacaagaggatcgcttaagcccaggacataaaggctacagtgagttgtgatcacaccactgcactccagcc

SEQ ID NO: 106376 - DNA, 1081 bp, Homo sapiens
cgtccgtgtgaagagaccaccaaacaggctttgtgtgagcagcaaggctgtttatttcacctgggtacaggcgggctgagtccgaaaagagagtcagcgaggcgaggtaggggtggggccgttttataggatttgggtaggtaaaggaaaaacgggggttgttctctggcaggcaagagtgggggtcacaaggtgctcagtaggggagcttttgagccaggatgagccaggagaaggaatttcacaagataatgtcatcagttaaggcaggaacaggccattttcatttcttttgtggtggaatgtcatcagttaaggcaggaaccggccatctggatgtgtacgtgcaggtcacaggggatatgatggcttagcttgggctcataggcctgacagaaatgagcagaattgaaagattcatgacaaaagttggctacttctgtacatgcacctattaagctttttttggtatgttgtacattttcttcttcagggtcttcccagccctattagtaacagttgtttttatagcaattggataagatatgaaactaagaactttattattaattggttgctattccttggaataaaaatgaaaaaaagattaacaatggaagaatattaaaagtacaatttgcccattcattatatcagatgtctcagttttatggtgaggtaggcatcatattaaggtacaactatttagcgagatgtataaatgattaatatatgagaaattatgaatttaatacccgtccaaaacttgttagaataaatgacttttatgttcccattaggttttgtgatgggaaataatatattttatgtaagagaaaattcagatgcttctacttattacccatgaggtgtccgtgaacttggcacgatattccttttttctaatatattctgaactctcatggttaaatgcataggtaatgtgtcataattgaatacatgttcttatcaatagtgtctgtcagccagtttccagtagattcagcagacattttctgcctattagggggctggacttggtgctgaggagtacccagggagggttaagttcttgcccttg

SEQ ID NO: 106377 - DNA, 1075 bp, Homo sapiens
tactcttttgaactgtttggctttttttctttttctttttttttttgagacagagttttgctcttgtcatccaggctggagtgcaatggcgcgatagtggctcactgcaacctccgcctcccgggttcaagtgattctcctgcctcagcctcctgagtagctgggattacaggcgcctgctaccacgcccagttaatttttgtatttttaggagagacaggatttcaccatgttgccaaggctggtctcgaactcccgacctcgggtgatccacccaccttggccttccaaagtgctgggattacaagtgtgagccaccgcgcctggcgtgtttggctttttattgcaaggtcctccattttttcaaaatttggaaataggagttcctgcattggcttgaggctcctgatgtcttaagagcattgaaatgggtggaccaccattggttagggttatgggtagggtcctgaaaggcttaatgtagtagtttctaggtctcaattttctctctatgagaacaagttccgttgactaaaggatttctgttccctttctacctctgatatccagtcccttgcagggtccaacttcatacacctcggcattttaggaattaattcgggattttacagtttggcttgatttgattttattttgttttttgatttttgactattcacaagatttttaaaaatgtcatacatttccgttgaagatatgatgagttctacagctagtatgacatgttccaggttgcagtggtgtagttcaagttttatgtttgtttggttttaattttattgtttttgccaagtgaacaatagttcgaatcaaggatgctaattatatgatgtacagaattaatcaattttgagattaaaacactactgtatactatatactaaatatacattaatgttaataaatacatccctagttcaaaaatgttagaatgagtgaatgagtatgttggcaagagggatggagtgagatagggatttaaggatgtgttttgacaacattctgtggcacagtcaacatgaggttgagctgattgggatgtaactacatgttc

SEQ ID NO: 106378 - DNA, 1022 bp, Homo sapiens
actctttagttattgattatacaactatacaacagtttgccagttttcttcttgttagaccttttgagttctttctagttttaggctttcatgagtaaagctgtaaagagcaatcttgtaaatgcctgttggtgcacatttgtatgcagttccctctggtgcctaccataagggataaggttaaatgtaattcatacggtgggtgcagaatttgcatttgaaccttgattctctataggcagagccttggctcgttaccactaccctctgctgctgcctgtaattttaaagcctgtatttctccccaggtaaggaagttgaatcttttttttttttttccccctgtatgaaagttcagtggactggcactttaagatggttcttagcagcttgtgtttgccccacttatataggtgccacaccattaaactgcctatcattttccgactgatgcctttctggaaaatagataaaggacatcagaagaatgcatcttatcagtattgatttagccgaaagggttgtaaagaaatcagttacagtaatgtcaaatttcataagattggttttgagagagtagctgtgtcaactaggctgacattttttctcttttggctttatttcgtagtatgggcattaatggtggagtgatccagatttggaaaccaaaaatggtatttctaaggcattccacagggctgggggagttgatgctgtatcttttcatgctcccttggtgctaactggctgtatggccttgggaaggccacttagtttctcctgcctcgctcatttgtaaagtggggggcataggattgtatcagtgaaacttcaccttttcttggtaatctgatggatgaccctctcctttgaaaaacaaacacaaatctgtgtaaatttcaaacccatttcatatgggcttgttgatacctgttagctcgtgatttcttaattataaaggaaattcccaattctattattaatgaaagttcagctctctgcattttggagaagtcttttat

SEQ ID NO: 106379 - DNA, 1038 bp, Homo sapiens
tgggtggctgagccccaggtatttgcttatcacctgttaatgaccacataccccataggcatccaccacgaaggggctcttggggcacctgagagttgaaattaagttagtgaagatgcctgcgctgggtgtgaggaacaagtggaaattacagttctgaaaaggcacttggaaagcagggagcagaataccagtatctgatgggttttgtttgttgggagagggagttggagggtgggagaatgggtagattctgattcttcttttattctccattatttgctcaaggctgctattttgtcaggggtttcaggctttggattttgtggaccagtttaaaactggaggcctgctgtaaagtagctaaataacttttaagtttgtccaatagagatgtttaaagaaaaaaaaaatactatttactgtcgccatcaccgcatcaaagaaaggatgctttgtcaccaaaggagtaggaggtgtataactgtgcaataaagaagagtcattgatgttaaatgaatcaggtgttatgggccttattcttggttattttaccaggacccgggaacgatgtcatcataggctggtccatttgtttcactgcacatagtagggattaaatgcttattactgcttagatgactgaattaatgaacagtggtaccccgtattcatcattcttggggaggactgatgcttgagcagaggccgtgaggtgccctcttcaatggcacccatcttcaattcttcctttttatcttttgcttttgacctttcctgaagtggctgaagattgtagcaatacacaagcatactccgatttcccctaagatgttgtgcctcccatctgcttcttgtttcatattgttctgttttcatgtgccctaagggacagttatgttgtataaagagcaagtcccccaagtgtcctccccacttcgggtctgcagaaaaatgattgattatgaggaatgtgatttcagtaatgcaggcaggattaaatgcttgccatctatcgacactttgcagtgccttaaa

SEQ ID NO: 106380 - DNA, 1027 bp, Homo sapiens
acatttgtctgtctctaaaacattagaaaagttttactctggaaaaagatatggcccatcagatacaaagttagtgatgttattatagtctttttttttttttttttgagacggagtttcactcttgttgcccaggctggagtgcaatggtgtgatctcggctcactgcaacatctgcctcctgggttcaaacgattctcctgcctcagcctcccaagtagctgggattataggcacctgctaccatgcccagttaatttttgtatttttagtagagacggggtttcgccatgttggccaggctggtgtcgaactcctgaccttaggtgacccgcctgccttggcctcccaaagtgctaggattacaggtgtgagccaccgcgcccggcctgttattatagtctttaaaaaattgtcctttaactgccatcgattatttttacaaatttgaattatgtaaaatttttatatagaaaaaatatatgagacatttaacagatgctaatatcttgtcacagcggcttaagactttttttttttaaagagagaacactggagaattggcaagttcctaaacatccatatccctttcttccccattgatattgtttggctctgtatctccacccaaatctcatctggaatataattcccatgtgtcgaaggagggacctggtgggaggtgattggatcacgggggaggtttccctcatgctgttctcgtgatagtgagggagttctcatgagatctgatggtttaacagtggcagcttcccctgtgctctctcttctcctgctgccttgtgaagaagatgcctgcttccccttcaccttccaccatgattgtaagtttcctgaggcctccccagccgtgcggtactgagtcaattaaacctcctctctttataaattacccagtctcaggtgatatctttatagcacggtgagaatggactaatacatctatctcaaaggaatatcttcttttgcttatgcatacttttatctagagcaaaactacaaaaac

SEQ ID NO: 106381 - DNA, 1050 bp, Homo sapiens
tagggtacatactagtttaccaccaatggcttttttttttttggtccttaaatctctaccatccaagaagtgagtgctaactctgtatttattagtccctggatagataagcagagtcagtactcactgctttgtgtagagtactctcctagacataagaggagcataatgacatactggatggagagggtctcctgtggtgagggtgctgggaacactgaaatgcatccagaatcacagggaagcttcagaaatggctctaagctctcagctcactgccaccgccacgcccctttcctttataactctttagggaatggtttgtttgcttttttccccagaattggggatcacgtcacaactctgaggttcctctaacgtcatcttgaactctgcagaagtgtgtttcttcctctgaagtgctattttgtggtaatttaatgtatttttttcatgaataatttacccatagagtcctaatatcttaagacagtgaattttgttgtttatcaaagatgtatctcaactaggagacagaaatcaatttcttattacaaagcaaagacaaaacacaagatcatctaccctgtgggataacaatctgttttggaagcattttggattattaatatttaagtcaggaacacatggataaagaaattattgtccctttttataaagaaagtggtatatttattactcatcttatgtgtccccattgcgtactctttttttctctcattatcttttcttattgttgggttatgaagtgtcctgaagtcacagcattttagggctaaaatacaaactgtacttaaactacctggtaaaaatacttgcttactttttaaataaaaactcccagctgggcatgttggctcacgcctgtaatcctagcactttggaaggccgaggtgggtgggtcacgaggtcaggagttcaagaccagcctggccaagatggtgaaaccccatctctactaaaaactacaaaaattagctgggtgcggtggcaggcacgcgtaatcccagctactcaggaggctgaggc

SEQ ID NO: 106382 - DNA, 1063 bp, Homo sapiens
accatgatgacaagggaattttttttttttttgagacacattcttgttctgtcccccaggctggagctggagtgcagtggcaggatcttggctcaccactgcctccacctcctgggttcaagcaattctcctgcctcagcctcccgagtagctgggattacaggcatgcaccaccacgtccagctaatttttgtatttttaggagaggtggggtttcaccatgttgaccagtctgcttttgaattcctgacttcaagtgatccacctgcctcggcctcccaaagtgtggggattacaggtgtgagccaccactcccggccaacgggaatttttaaactcgtatttaattgtaacatgcatgtggaaaaatgcatgcattatagtgaaccgctcaatgaataatcacaatatctgaacacagccatgtaaccaactcccagatgaaaaaacagtatcactcccgaaggtctccccatgctcccctcttcccacttcaagggctactaccgtcctgacttctgatatcatagatgaggtttggatggcaagaacttctgtcagtttatttcactgctgtatgtgcaggatatggcaggtgcaaagtacacattgattgagtacattaaaataatactggaagagagacctgtatttctgatgtagctagatttctaaagctgacctccattgatggattaatccccgccaatggaaaatgcagttagaggctttagaaatattatccagtggcaaaacactggccattataacttagacgattagatttgtcacttgtttctgctgcgttggccttgattatgtaagtattttagctgtgatgtctttaagtccactcttcttgcttgtaattttaatttattgtctgttctatttgctggcacttaatcagacatctctctggtgattgtcttacaggattatttaacttcttcttgcctttcaactgcattgtaaatttaaccaagcataataaatttgcaccaaattttacccttcagtgttgattcttccctagctggaattactgtacatttctgtttct

SEQ ID NO: 106383 - DNA, 1058 bp, Homo sapiens
gtttcagtactttattttacttaaaaaacatcatggctctatattaggtctctttattcatgtaaggtgatgaaaaaaactttttatagttgaaacagtaagtatatttgaatatgataaaatagggaatctagtgtaatataatctattgtatttgaggttagctcagtattacaaacaactagaaggaccatttataatgcagtgcttacaaaggaacacactttttcattttactttttgggacactcaccgagcacattttactacaattgattgaaatacaggcacaaaggaaatgagaggttgatcagaatatttaattacttttaacttaatttgatacttttgcccattgtaggcataaaaaaagattttcattttagactattgtgtgggatttaatgttcttaaatgctctttaaaatttagagaaaattgtgctcaatggagatttcaccatccttgagggatctttaatttgtttgttgatgtgccattaaaatagatataaacaacctacttaactgcttgtctgccattctggatatcttcgttctagatttgacaatgtgagtgcctgttgcttgtttttagttggcttatgttttggcagtatatctgggagaagaactaggactctgtatatgagaaccacccacccatcaccctaagtagttttcattttggcactggagaaccagaatttctttgttctgatgttttcaattttatatggaagctgacctattctcccaggcttctaagtcctttggaatgacctagaattggacatacagttaatgagaaatacccttatgtgttactacgctgttttgctttgatcataggatgtgcagccatattgtagatggaactttgggatgttctcatcacagacttactctgctttcacctttgcataacctttgtcatataatcacttttccctgtaggagataatgacatagcagaggtcaagtcgacatggctggttcaatacagtcagatgaaccagtgttgtggatgaatgccggggttattttggaatcctttgt

SEQ ID NO: 106384 - DNA, 1487 bp, Homo sapiens
tctcctcctcaaagaggtcatctctaatgacattttaaccaacacacacacacacacagacacccatggcctgacaaacctgagcatcaggaatatcacatttaagtagtctgaatagtgtaataatgaaatgggtttagaaaggaagaatacagtgactcccatcatacaggaaaatctgagtctctcgattttgacaaggtaagagtggagatttcaaaaccaatagtattaactagccaatgatgcttacgtctcactcagcaggaggaatcttaagtcaagttggttgctaggcagagagctgaatgagtgacaggtattttcatcagggagtttccataaactctgtctcttctcagaacttctactgagcctacctcatttccagcccgaagcaaaaaaagataaaaatattaccagacccgctcttttccggttagcgcggcgtgagaagccatgagcagcagtctctcgcaacaccctgtacgaggcggtgcgggaagtcctgcaccggaaccagcgcaagcgccgcaagttcctggagacggtggagttgcagatcagcttgaagaactatgacccccagaaggacaagtgcttctcgggcaccgtcagacttaagtccactccccgccctaagttgtgtgtgtgtgtcctgggggaccagcagcactgtgacgaggctaaggccgtggatatcccccacatggacatcgaggcgctgaaaaaactcaaaaagaataaaaaactggtcaagaagctggccaagaagtatgatgcgtttttggcctcagagtctctgatcaagcagattccacgaatcctcggcccaggtctaaataaggcaggaaagttcccttccctgctcacacacaacgaaaacatggtggccaaagtgggtgaggtgaagtccacaatcaagttccaaatgaagaaggtgttatgtctggctgtagctgttggtcacgtgaagatgacagccgatgagcttgtgtataacattcacctggctgtcaacttcttggtgtcattgctcaagaaaaactggcagaatgtccgggccttatatatcgagagcaccatgggcaagccccagcgcctatattaaggcacatttgaataaattctattaccagttcaaaaaaaaaaaaaaaaaaaattccagacccaaaggcccaatttcttcctataaaaatgtcctaagagtcacctactactgaagatatcaacgcaactgtttcctacgtgcctcatttaatttcccagagccaccggacatagtttataagaataaatgtttttattccagaataaaaaagcagatgtgtatcccatctgccttaactgtgtcttcgggaggattctgtgtaatccttactctcagtgtttcacagaaatattgacttccggggaaaaaaagacttgcaagctgtgttaactcttctgtgttaatttgcagtctaaacatttttcatacaaagagc

SEQ ID NO: 106385 - DNA, 2618 bp, Homo sapiens
tatgtatgaccttggtcaagttaaagttctttctgttgttgaagcttcagtttgcttatccataaaagggccccattattgggatcactgtttgtactgcttggtggtgttttgcaaatcaactaagataatgtatatgaagtgcttagtgtactgcacttcttggcacaaagtaaaggttccttgtcaacgattcctaatattaataataataatttgtctggactttcctatagttttttttttttttgtaaaataagttggttctagtcagtcatcctcaaggactatgattctacgaagtcacccaatggtgttcatttgacacccttcctgtatccagtggggtgctgcctttgtctcattgtgggttttcctctcttccagcgttgacagaaggctacgttggggccctgcacgagaatagacacggcagcgcagtgcagatccgcaggcgcaaggcttcaggcgacccgtactgggcctactctggtaagtccagttgttctaatggagatcacacaggccagttaacatcccattcaactcacttgaaagcacactttgaatcacttttatgcctgagttctgtttgctcaaatctttcgtagttcactaaaagttgaaatattcgagcctgtttttcctcaaggttataagcaccttaatttatctctaccacctgtttcctcaacctgttttcccctcaatttgcgtttatttctgaactttactgttaatgagttattgtaccaaacttgtaattttctgaaagacgtagtcttgtcttttctgttttttcaggggctgtgatttcagagagcagaaaatatatggctagtcttgagctgctaaatgtctgctaaacattacaaacatcacatatcagaatgctctattaggctctaagccaagaaatgcaactttatttttaaatcacatcttgttctttgaatatattttagctgtctactcgatggtaatctgcagtccttttcatttttatttttacttttacccttttgagctaatgaagggagagagcattgttctaactatgttgaatgttacattgcaaataattttcttacattttaaggggacaaaaatgaagaccgaaaactagggatagacttttctggattaggcttcccaaaactcccaaaatatgagaggtggattgttatttctagaagagatttttgatgctcaaaaatatatggaaaatgtattaaagctaattaaggaatgcttgagtaagatagaccactttggaaattactttggcactgaataattcaaactccttctatgaaagagcttggaggcatggagtattagtcttaataataaatctatgtattatgcaatgttgttgcatatagaactgaaagtattcttttcataatgatgctcgggtttaaatcctgaatttctcccagcaaatcctgttaaatttatgccagtgtaaaatttataggtctgatctttaattataccttatctattggctttttgcatccttttgtctattgataaatctgctgcccctgcagggagaatatcctatctgttttgttttgcagtgaacagatagtgattctgaagttttccatcacacccagtaccttgtgattagaattatctaattagaggctttttgtcaccatttctgataaatgaaggaaattggcagatgaaagccaaaattacatatatatagcatcttgccaagaaacccaaagaaaatttatcattttgtactctgtggctctgacatcagtcaggaggaggcacaaagtggcttgctatttacagttcatcagtttagaataataatgctgttagtcaggaaattggaagttatatcccattagcatgtccaattgcaaatggcagtgaagagatgaaagcccttaaacttttcccattatgtagttaagaatgaccataagtggtgccatctttgtgatggagtgattgttgatgtctttaactttggtagagttcagaagtctccattttgtatttctggaatgcattgtgtctgaatttgggtattgcctccagtagtagaaggactaatggttcaaattcaagagttggcacactttttctgaaaagatccaggtaacaaacatcaaaagccatgtcgtctttgttgcaactgcccaactctgccattgtagcttaaaagtacccactgacaattctggacagactggctgtgctctgataaaaatttacttatgaatactggaatttgaattttataattttcatgtgtcaggaaatattcttcttttgatttttttctcattcattaaaaaatatacaaaccattcttgctttgcaggctgtgcaaaaacaggtggctggttggatagggtccacaggttatatagtttgtgaacccttgttccagttgatttttttcctagaaatcagataggagagtcatttgaggaattgcttggaaggatgtggactggtttggaagactgaatgaagtcatttgttaggcataatggaaaaaataagagtaaaagaagaatagaatgggacagatatcaactgatggtataaagttcttatgcttgcaacagttcttcctgaca

SEQ ID NO: 106386 - DNA, 1685 bp, Homo sapiens
taatatagcctgggtttttagcagatgttagtctggtataacttttcacttctcattttaagactagcctactttatttccacttcactgcatcaccttggaaaatgcagacaccttatttatttttgaaatgttaaactttacctttataggcctatcaaacaatgcctttgtgaatacctgtaattttagcatagagaactatttattgaggaacctggagatatgtattagagttctcttgtggtcactggaagatttgttgtttctctggatcttaaatttcatctgctagtaaaaaagggggacataatatctgattttgacatgaaaacatcatagaaggtatgaaatggaacataaatataagttattgttgacataataatagcaatgtaatttgatgattgatttatatctttggatttctttttccttgtaccaacatagtaggcaaaaatgggaatgagttaagtttcatatagaattgtactgaaaaaatgcagtagtttaatagtatctcattggaaataataaaacaatttcttttctattaattttactcagttaaagtatatttctgtctttcttgaggtgatggtagctcatgaattttggagtttgcccagaacttctataattattgcacaaagagtaacacatgctaggcaggtcatcaatgcaggaaagagaaatgaaaaataaatcataaatctagagtaacttcaagtagaaatttgagggttttttttttttttttggagattggatcttgctctttcacccaggctggagtgcagtgcctcgatctcagctcactgcaaccccccaaccccctgcttcctgagttcaagcaattctcacgcttcagcctctcaagtagctgggattataggtgtgcacaatcacactcccagctaatttgtgtatttttagtagagatggggtttcaccatgttggccaggctggtcttgaactcctgacctcaggtgatcggcctgtctcggcctcccaaagtgctgggattacaagtgtgagccaccacacccggccagaggcatttttatatataaagttattttctctcttgccactcaaagactagagaaaaacaggtggtagtttcttcccttcctctgcttttttttgttttaacttaattctgtttcatttttcacaattttaataatctctatctcattttcccctgtgtagaaatagcttctaagaatcagtacaaggagaccatttctcattgttagagaaacccagaattgaaataggcagtgaccaaaattccccgtaagacatttctggcattgggctgggtgaaggtcaagcaggattattctaagaggcattcctgccatagccaggggccatccatggtcctctccaactgtcctgggatttgaggaattgctcagctgtaaaatggagatggctttgaggattaaaggtaatatatattggcacctgtagtatgtactttttggcctccaccctggagtagagtaggtattacctgtgtggctcttcattatatgccacctcactacactgttcatataaacatcttgttttataacatgcatgtgtgtgtctgggcgtgtgtctcatttccccggctaagtgtagaatccttgaagacaaggattattgcttataattccttgtttctcct

SEQ ID NO: 106387 - DNA, 1584 bp, Homo sapiens
gccctttagagttcatgctctttgaacagaacctttgtctgtaattagtcattgtatttccctgttgctacctaaatgtttttggataggagggcttcaagatagagaacaaattgtagaataaactgtttcttcctacagatactatttttcttttatagttcatgtgtggttccaagggtagatggtgtaagaaaaaacacatatggtcacacactaatcagaactttatgtacaaaggagaaaaatgtgttgccatatgcttaaggtacctggagaatttttcaatacttggccaagtttgggaattgcctctccagtgtttgaaagacgttgttctctctacttagagttcttttcttattttttttaaactttcatccttggcacctgagttctaaagtttcttggcattttctctgtggaggtggtttcacaagtgattgtaaagttaatggatgctaatgcattaatatattatcagaggacatgaatacattccttaggggccttgtgaccattggaaaagtctagcagtaagatgaaatactgtttagtgctgtgttgttatcaagtggtacatatcagtggtaacaagatttcaattgttgctgtgatggggtatttaaaacatgggtaaatggaatactgagagtttgggttttaaagtgactctgaaggtagtggggtgatggatcctttttggaggagagctttttggcaatatctgtgaaaatgttaaatactgctcatctttcatccagcacttctgcttctcagaatttctctttctgaaacacgtgtgcatgtctccaaagtagcattgtgtttaacagcctaagtgaccaaaatagggacttgggtaattataatacatgcttacaatgaaatgcttacctgaacatccaccaaaatggaggaggttgaactacaggatgtattaaaataatatgggtaatatggtcccattaatgaataaagctgaagaatccagagactacacccaaaagttaattgcggttatcattgagaaatgagggatactaccttttaatacttatatttctataatattttaatattttatagaagcatatctagaatatttcaatttcttctaccagtagattcataattttttttaatgacctttttattttagagtagatggctaaatggtatcaaattcaggcagttttctttgtaacaattttgagggggagaaaaagaaaaaaacctaaaagggaagccagaaggaaagcaaaaacctttttgtctctttaattggctgtatctaaattttttaggtgaaacattgtcagtggcatttcatttttttataaaatgctgatatgaaccttgcagaaattaatgaactgatattgacttagtttgaaatgaacatcaagatttattgagcaaagcagtaaatattgacccagccaaagataaggtcaatatttactttgacatagcataaatcctaatattcattaatgtataaatttattgtgtcaacacaaggcatacagaagttgtatataaatatttttttcatatctgcgatgaatcagagtcaaacat

SEQ ID NO: 106388 - DNA, 1008 bp, Homo sapiens
tatatcatactttataatactttattggctgaaatttcccatgttgaaattatcttagtttattattattatttttgagccagagtttcactgtgttgcccaggctggagtgaagtggcacaatcttagttcactgcaacctctgcctcctgggttcaaacaattctcttgtctcagcctcctgagtagctgggactacaggcgtgcaccaccacgtctagctaatttttgtatattttagtagagacggggtttcaccatattggccaggctggtctcgaactcccgacctcaggtgatccgcccacctcagcctcccaaagtgccaccacgctcggcttcatgttgaaattatcaatttgagttgaactctcattctttatcttgtgccttctcttggtggggtggtcttggtagcagtaagaagaacgtaaggaggacccatttcactggattgtgaacttttagaattgccaatatgtagttggaataagtgtctaatatatgcttaaagactgaattttctcgctgttcatttaagcgaagaaagtaactcagtcacaagcttaagtataatcttgtccctatgcaatagtcttatatgatcctgttgtgctcagtccacctggcatgttctttgagtgtaaagtggtggtgttagtttcagtgtttggctgatcttgaaatgaccatcacttctctctctcagctggtaatctcctatgaccctgtttgagatcagctacctgaagggtggttatcttcttggttgtctttcttgctattaaaacttaactgtcctatgtttcgtttactttaaggcccattttctgttatgtaactgataacttgtgtaggttaaaaacttatcagtggtgtgtatataacatagaactttgccttcttgagaaatgctttctaataacttcaggaattctcacttttcattcatgtcactatagtatataataatgttttccactgcgtgtagtggctcacacctgtaat

SEQ ID NO: 106389 - DNA, 1293 bp, Homo sapiens
gggaaacaaagtgaggacctgtctctacaaaaaaattaaaaaattagctgggcatggtagctcacgcctgtaagtcccagctactcggaaggctgaggtgggaggatcgcctgaacccagtcaaggctggagtgaaccctgatcacaccactgcattcccagcctgcgtggcagagtgagaccctgtctcaaaaataataataataagaatactaacaatgtattccttgagtgtagtattcattggcatttttatgtcatgtgaaaaatgactctatgactctcctgtgatacaaatatttgactttcacataataaagtcatttcttcttgaggttttttttttttaaatcaaggagaaagtgagttttgtactaataggtctttaacatctctctgtcacttgctcatacctctttttatcaagaagagataggactgacctcagtctgctgggagagtatcttagaatttgatctcgtggatttcattataccctggtacccttcatgtctggcaagccatgttagttttccgttttgatgtgttacatttcctattaagtcatatttgagattttataaaaagtgggccagtttaaagaaaaattttatctaagcagtagtacagctggctttccaatatggcaaaataagtctttctgtaggagatatcaccattttggcaggattgaaaagcctcttgttttgtgccatataatcaaactatatctgtgatttgaaaaatgacaaagggtataataattcctagaattggttttaaaatgaaggaaaatagtatcctagttcaaaagttatggctcattgtaagtgctggtctggtataaccatacagattgtttaaaatctttaaataaatacttggcccaatcccttttgttccccctttctcgctgccctggaaactccttctcttattttgggaccttttaaaaatcctaccttagacctgtaaacccactctgtaccatctgctgtgactgattattatctctgatttgttaaatgatttaagtttcatttctgcttatcatgacttggagggaatttcagagtgataggcctgacttggtagggttttgggatatgtattatactctgcaacccattcctttgtttttttacattttattttaagttcaggggtacttgtacaggatgtgcaggtttgttacaaagggaaagtgcgcctggtgatttgctgcacctatcaacccatcacctgggtattaagcccagcatgcattagctattcttcctgatgctctccctc

SEQ ID NO: 106390 - DNA, 1802 bp, Homo sapiens
gaagtgaggaggcatgagggcatcctcataccagtcttcattcattgagtcattcagtaaaagtgtttatcaagcacaagccaggtggcaaactcagttcgagattagggctaactacaacagagaacaaaacatacacagttctattcctacctggtggaggtggacagagcagcatatacaaagtaacatgtagtatcatcacatcattctgtgaaataaagtgtaaagtgaggtggtgcctagagagggatttaggggagagagttgttattttagcctgggaagacctctctgatcaggtgatacttgagcagacatctgaacacagagggactgagccttgtggctatgtgaggtaagcattgcaggtagagggaagcgggggagataatagcacttggaaaggttcaatgttataccttaaactactctgtgaattttaattaggcctccttctagaaccttctggccctgtattcttgcttaggataaattttgcattgttctagagaagtagttctcaagtggggactctttcctttttgtggaatatctgacacagtctgcagacattttttggttgtgacaattggagatggttgggtggccaactggcatttagtgggtagaggaacaagatgctgttgaacatcctacaatgtacagaacagcccccacaataaagaattatctggacccaaatgccaatagtgccaagattgacgaaccctaaactgaaggctcaccagaatccatcgtttttacacagttggtctccatgctgctgtgaggttctacctttctagccagtccttaattgaatgagtacgtggcacaaacacagcaaggtgtgttgtgcacagtggctaaggtattagagaataaagtgagtgtcatggtgttcaatcatctttggagattaaagagtagaaatggaaagcttggcaagttgaccatttcagaaatctgtgcatgaaatcataaaggaatgaatcacacttctggtcgtggtgaaaagcctacctcgtaatgtcacatggaggtgatgaatgttgattgtgctgcagtaaagaggtggtgagattgcttttattattattgttttatttttgaggtctcttgtgactatgccatttgtcaactctttgatctaagaggccgttaggaaataatattcatcttagtattgctaaccatgaaggaccctaaaggatcagctggccaagcccctacagcaccctgagaaaatttatagttacccagttgtgaaccttgacatgtcacttcagggctggcagggaatagcagtttcttaaatgatcacttttcactaaaggagtggaaaggaaaccagagctgtgaatggtgattgacaggctaccgtgatccagctttttgtcaagtgtcagcaccttaatatttgataagggttacataaatgtagtagtaatggccacagatatcttccagaatagatttctcacttttttgtataaattaagcaaagctaccttgtgatggggtataaatgcatgtatatttatctacacgtgttatggtggcctgaattttccacagagcagatggctgtttgtactcatttgttcccaaaccctcttgtagatatttgagtataaagatagattcatgtggtcaccgcttctatggagctcaaaggctctctttctcttttctctattgaaacccaatttttattagcattgaaggccactgacgttgtaggttaaacataaaaacgtctaatatatctatctcaatactcctattgcaggtctacg

SEQ ID NO: 106391 - DNA, 1357 bp, Homo sapiens
attttgattctaacatctctaattgataatcacattttccagatttctatctatatattaaaggagtagatctggaatttcagctctctttagtagactgcattatagaaaggaaactttgttcgtatcacacatgtattatttaacaccattattaatgttaaaaaaaattttttttttttttcgtttaagacagtctcaccctgttgcccagattggagtgtggtgtcataatctctggtcactgcaacctccatctcctgagtttaagcaattctcctgtctcagcctccctagtagctgggattgcaggcatttgccaccatacccagctaatgtttattgtatttttagtagagatggtttttcaccatgttggccaggctggtctcaaactcctgatctcaaatgatctgcacaccttggcctcccaaagtgctgggattacaggcatgagccatcgcgcccagcccagccattgattattaaacatgttacttagaaagtagaattaggacaggagcactggctcaggcctgtaataccagcactttgggaggccgaggcaggcagatgacttgaggtcaggagttcgagaccatcccggccaacatggtgaaaccccatctctactaaaaatacaacaattagctgggcgtggtggtgcacgcctgtagtcccagctacttgagaggctgaggcaggagaattccttgaacctgagagacagaggttgcagtgagccgagattgcaccactgcactctagccttgtgacagcaagattccatctcaaaaaaaaaaaaaaaaagaaagtagaattatcaaactccatttttttaactaattttttatgttaaaaaaggcataccattttcttttactctcattttgtttttgcttattctagtacatgatgatttccttgtagtaaatagttttttctaattttccccatgtagacaaatccaaaatgcatacatgctcatttaaataatttgtccactggtaacctcagctgagcgctgcccttggcagaatatgttttacaggatattaaatgtgtttaaaatattctttcatattaattggttggcatttagatgtcttaagttgttttaataaattagggaaagctagaatataaaaggtagaaaatatatacattttcagtgttccaagacactttggtggactatagaatgctttaaatgcaagttaagatgaatgttttatatttggctgggcataatggctcatgcctataatctcagcactttgggaagccgaggtgggaggatcgcttgagcccaggagttcaagaccagcctaagcaacatagtgggatcccgtttgta

SEQ ID NO: 106392 - DNA, 2193 bp, Homo sapiens
aggaaaatagttgtgtgggggagggtgtgtttgcccagggaagaggggtatgggggaggagaaaggttgattctcctgagttggctcagtgtctactatcataatgatttccccacagctttatgagggctgtgctgctgttgtgaggtgtggtcacagggaaatttcagtctgaaagatgagttccacatgattcacacacctcctatgaagtagtaaaaggaaaaactatgccaatttacattagaagtattttcctttcttctttatttcttggaaatggagcatttgtgtatgaaagagttccttgggggataaaatgccatttagtttaatgtgatgacaatatgtatttaagtcaccatatgaaaatatttactagaaacaatgacatttgaatttatggacgtgaattttgcgtaataccttccttaagagggtgatgatatatgggagtgtgggatggttttctttcactgaatttgggattaatagaattgtcacccacaaatgtttgttttttttgtttttgtttccatatagggttttactctgtcgcccaggctggagtgcagtatactttggcccagtcatagcccactaaagccttgacctcctgggctcgtgattgttccacctcagcttcctgagtagctgagactacaggtgtgtgccaccacgcctggctaatttgttctttttcatagagatggagtctcactgtgttgcccaggctggcctcgaattcctggccttaagcgatcctcccagcttagccttgcaaagtggtgggattataaatgtgtgacaccacacttagatgcccactaatggtttggtgaaaggattaaaccccccaagaactgaattttcagtaataaggaattgaagattttagtcaagccagagcacacatgattgaacttcagcagtgagggtaccaaagaatattacatttggaaattaaattttaagagagaagaggaaaaaaactgggcgtagagagtatggggagagaataaaatatggtgaatatggtgatgtgattcttgaactgtccttttgtttttttctgactgtaaagagtagcacattccccaattagacaatcagaagtgttttcagatgttcccacctatcccctggggagtcaggggcagactcctttttggtagagaaccctctgctgtagaacgtgcaagaaataataataaatagtaatagtatggaagagtatagaattattacatggtaaaggtggctgtgatttttgacctgataagcttatttagccaattccagaagtttccttattgcaaagtgggcggattttaagtgttccttaccaattgttaaatgtggtgagatggattttatttcccttggattcgtgctatatctgccatggaaagcctgggtggtgttgattgtagctcagattgaaaatgacagccaggagttgcttagttaatggggtatatgttggtcctcaatttgtgcaattcattgtttaatgtgaatgaataatttagggatgaatgattgggttcatttttagacactggctaccttaacaggatgatagttgacagagcttcatgttatatttcctcacgtgaagagctaaagttgttgcccaggttaagtcaaaacattagacaaggtcataatgttaattatttgaatatgttaaactgctgaatatacatacgttggtgcaaaagtaattgcaatcttttgcaccaacttaatatatacacaagtgtatatatatttgtgtggtggtaggactaattacttaaataatttttctcaactttgcatatacttttttcttcctgcatttaatctagtttcatttggattatgtctagtttctgtggaagtagcttcataaataatttaaatgatctttgatttgagactgactcttaaaaatggaaattgcatttatctgggttagaattttatctaggattttaatttaatagctgttatttttactttcaaattcatattttaatacaattaaaagttgggttttttaatttggggacagacagcaagctgttttattttatttttgcctgccaaggaatgctttttccttgacacggacaagggtgctctttctttttctgttctagctctcctgtgtcttggacttcttaattctttctggtgggatttttc

SEQ ID NO: 106393 - DNA, 1481 bp, Homo sapiens
gaaaatctgccaagtttcttactctatgttcagctcaagtttgctctggcaccaaagaggagagaaacggggggttgcagaaaacagggggttgagagctttatctttttgtcctttactttcatctaaaaaaaaaaaactttctatgtaagtcaaaaggcatactaattttatatttcagtgtttctttgagtttcatttagaccatacaagctgaccatgacatatgacttctatgtgttcagtcacttaagatcatcaaatgcctagactttttatttgaaatctttggcatcccttctaacttgtgttttgcagttaaattactttggagatgagatagaaatctgaaccaaaaataattattgtaactatgcaactcttatttcctaccttggcttaatgtgttcctatgtgaactgtgtttgtttggaacaatttaaaaatatatctcctctcatcctttttctttcctgaaccatagtaggctttggtgagcagatatgaaaattgtgatgaccaggctgggcacagtggctcacacctataatcccaccactttgggaggctgaggtggcgggtcacctgaggtcaggatttcgagaccagcctggccaacatggtgaaaacctgtctctactaaaaatacaaaaattaaccaggcatggtggtaggcgcatgtaatcccagctactcaggaggctgaggcaggagaatcacttgaacctgagaggcggagggtgcagtgagccgagacgatgcctctgcactccagcctgggtgacagagtaagactctgtctaaaaaaaaaaaaaaaaaaaaaaaaagaatgaatgaatattgtgatgatctctgaatcatcttcatgttccttctttgccaattcccatcggggccaaccagggacaaactcaggacttcctgggaaattatacagttgagggagggcgttaagcagggaggtgtaaaatatgttcttggagactactttgtctaccagaatctgtgaagcactcgtttagtgttgaatgaggaatttaggaatgattggcctttgttgctgccaatcatggtgatgtgtgtataggattatcaaaatgtgttacaaatcaacctgctcattcacattactccttttccgtaatgtctaatttttgtatcattaatatttttatattttataaagtataaaatattaatattgattttcttattatagctgatcaatcagtggaaaaatgaataatgtaacctgctattcctttcccccaagcctactttcctgagatcatgattataatctttgtacatacactcttttctttttttaagcatttgcctttggtgacatcattctcttcacaatgtagagtagatatccatctgagtcaatacataaaaatccatgtttttaaaaataactgcatctgttctgcagtgtagatagaccatatgttattcaaacatttccttcatgatgg

SEQ ID NO: 106394 - DNA, 2042 bp, Homo sapiens
cagtatggggattttcagatttgattatttctaccacaacgaatgggagaaatgagtggaactccataataatatagactgaaaataagtgaattgatcaacaatgaaggaattgcttttagaggcaacatttgaaaagcaagaaagacaagataacatttgaaacattagatgttggtttgctgaacttaaaacaaaacatgcaggtgtctatcttaggaaatatgtgtgttatcggctggtgtagggtagggtggtggtaggtttgcagaggggttgaatgtatgcaataaattatttggaagagtgtgttattgatgcagtcaggtggaaattgttcagaaaaaaagtgacaaagaccatacaatgatagttaattactaattagaaatttagaagatgaaattttaccaggtagaatatttgagaaataaaagtgatctgttgcttgagctgaagaggaagaggaaagataaacgcctaactacagaccattggtagcaatgtaataataataaaagattccaatttgatagaaagaagtggtgaaaactttcagggatgctgtggatttggaagatcgatacatgtggccaaaataaaagacttttgggattggacatggttattggataaataataatgtattgagcatttcttttgtgtaaaagtgttttaggttagtaatgtcttttaattcctcctatcagtcctaagaggagagtatgattactgctgttattatatagctgtgaaaattgaggttcataaagaacttgtccaaagctcactgctgtatcctgagatctcaaaaaagagcctaggatgctgtgtatgcttagggaaaaaaaattgtcatgtaaataaaaaagttaaaaccttctcccccattgactttttttttttttgagacagagtcttactctgtcacccaggctggagtacagtggtgtgatcttggctcaccacaacctccgtcccccgtgttcaagcaattctcctgcctcagcctcccaactagctgggattacaggcgtgcaccaccacgcgtggctaatttttgtgtttttaatagagatggggtttcaccacattggccaggttggtctgaaactcctgaccttgggtgatccaaccgcctcagcctcccaaagtgctaggataacaggtgtgagccactgtgccagcccagactttttcattcattccaggcttagagagtatctaagagactacagtcctttcccaaagttgaccgcatagaacacagcaaagcatgacattgaagaaagattttgtcaaaaatcgagttaattctcaagtacaaagtgcagatgagtttgatgactgaggggttcccagaatgggagacattcatgctactctggccagcacaccgggaatgtgtgcctgggaccaggagtagtagttattcatttatatgcattcagctaatcatttttgcagacgattgcatgaatataagtaccccatttggagtttgcttgctggcacttgaaaatttggctgtcttatatatacgaaatgtgagagttggtactggaactgttgcataagagtccaaatagtttacaaatgcagtgagatcaattgcagcctaaccagagtagcaccagaggacaagaaggccacaaagactctggcaacttcagttggatgcaaatttcaagtctgttccagtttgttttctgtttaaaaggctggatgtgtcttgcacactctcttgggagatttcaaagttaaaattattgttttataattagcatcaatataatcgacttgagaggaatgttgcatggattagtgcatgcaggcagcagggagtgaaggatgcttgcctaccggtgtctctgcttcattcctcatccacatatggctattgagcagcttctcgggttgttaagaaaacacagccttgaaaaggttattagttaaaacaagatgggaatggacgactgagtgacccagagattggactgtgtttgaccttttcccaaagtggagaatgtattcttttgtaa

SEQ ID NO: 106395 - DNA, 2154 bp, Homo sapiens
tcattgcattggtcaggttggtctgacccctcccacatctccaggtttgtatctagaatgttagcatcaagagtgagtgggagcgtaaagaatactgtttgctaagggaatggaactgctggccaatccagaagtctttggtcagtttatttctttgggtgagtgagacctatgagcttgacttacttccttaaaggttagatgatttttttgaccccaagttctcatttttattggaataaaaaaattagttgtatcgcatagattaaaatcaacacaggcgctttcccctgctgtgcgaaacactctttgaaatcccaggtgtcactttatgcttatggtaagaacccgtttgtgtctgttgttaattattttctcttggtcagaccagttccccagcctcagaaaatttcagaggagaaagtacatccatagtgaactgggaaagtactttctgtcctagaacttattagggcggcacctagtttactacacaagaaattctatccttttaactggaacatctgggttcttaatgctctctgcttgcaattatctgtagccttatattttgccacggtctgtcttgtcattcttgaacattctccatctgaatgctaatttgcacacattctgtaattgtgtgtaactgtgcttcttcttgtgtattaaagtcctccctgtctttaagagtaacttaaaaactacttctttgcctaagtgttgccagattttttattttgctccaccccttaatttgaattaattattgcacgcctgtataactttacttactatttctgcactgaactgtagctaactattgactggtatgttttctttgcatactggtttgtgaaatttgtgggggtcgaggttcaagtctcattcctctttgaatctttcctgggcctagatcagtactgcatatgaagttctcaaataaatatttgaagcatttcgttgaattgtgtgtctctggaatatcagaaatgacatttctcttagtcaatacctaataaaattttactcggtagctttattttttaaagatccatacaagtgctgtccaacagaagtttctacaatgatggcaatgttctatgctgtgctgtctaacacagcagctacttgccacatgtgaccatggagcacttgaaatattgccagtatggctgaggaactgaattttgaattaaattaaatttaaatttaaatagccacatgtggctagtggctaccatattgtacagcaaaggcagagaaataagctttcaatcttgatcttttcctctttcatttcagcaatctttattaagcacctattaggtggcaatacattttctaggccctgggaataccaagatgcattggttaattccaggactgagacaactgtcacggtactgcagagagatcaacaggatcctatcattcattaacacaggacagtaaatgcagtgctgttagggttagcagggaatcggagacatttagaaaagagtggtgtaaagccagggatcattttcagccaaaaccgtggaaatccgggaagacttttaaagaggtcaaggagggtatcacacaggaggattacgtgacaagaacatattttatgggccctcagtggggaggccatttgtggttgatctgtttctagataacgtgaaacatggcagagggtaatcacatcatctgttcaccatatttttattctgaagaaagtctcccataataaaagacagagtgaagtcctattactttgtccatttatttgactctaagccctgacattgttaaatttccagagtttcagataccaagtgtatttagcttatagttggttcttcagtgcctagtacaatacgtgccattcactcattcattcattcatgtaacaggatacttggaggcctgccccatgccaagcactgtggctccactggaggttgtaacccattttgttattggtagagggtctcaactgcaagttatccaggttcttggtgttttgatcaaagaattggacaaaacgctcagaaaagtgaggaaaagaacgaaggaatgaaagctgagatttattgaaaatgaaagtatactttacagggtgggagcggcaggggctcaagggctcctgttatagaatctcatggg

SEQ ID NO: 106396 - DNA, 1527 bp, Homo sapiens
aagttacaaagctgcactcctatgcaaacgtctgattgggtggggaaaagcaactaatcagagatactttcaattttccatctgctatgcagaaaacttgggatgggggtgggtttgcaaagggagtagcttctggtcctcttgttacttaggcccggaacgttggggtttttcttttgattttgttctaggaagtcagtgtgaatcagccttaggttccctgcccccagaccctattctcctgcctcaacttggtccctgctactatcctgagacccatcttagttggcctgtcaggtgagaaactagtgaacacatcaatagatagtactgacctactgtagccttgaaggagtgaaggatctcagatagataacagcagcaggattgattttaggcaatggtgaggggaaggtctcccagtcatgtgatgagtcagggaaagaattccaggcagagggaccaacaagtatcaggaccacgtggtgggaaaagcacatggtttgttctagcatctgagtgcagaccctggaagcaaagcaaagtgagagagagaggaatagtgtgacaatgaggtctgagagggagggaaggaggaaggaaggagctggatcctgcagagtcatgtaggatgcattaaagacaataaaatcctaaggatgatgaaaaataatcatttcaggaggatttacacacacacagacacacacacacgttctaagggagggaagtttgcaaaattttagtttacctttgaagttactgaacacttctcatggtcagtcatgttgctcttttgagatacctcattttggccatagattaaaatgcattaagaagctgcacagagttgtacattctcctgagagtgcttgaagctgagcaaactggggaaacatcagatgaatcctcggggaggaaaaagtggaagatataatgctatacaagtaggttttgactcccaagtctaattttaagagtaagcccccctatgagtggcagtaattggctggaagagtgtgattgcttctaattgccttcctaatgacacgtggcagtgttgggagctgcaggcttggtgcctggcactgtacatcacagatgacttgaccccggggagatagggctaaaatatctccctaaggtgagcctttttttgcagtcctccagtcagtgaagatggagggatgtaggttatgtgaatggtcctttaggcattttaggtaggcatgttccacctcagagggtagatatcctaccaaacctttcagctttaggaagattagcttcttaaattttcatattttagctcttgtttagtaatcagtggagtattccaagaagtttatgttgcatagatgctgttaatatcccacccacattttcttattttcaagcacttatatttttattttttgcatgctgacctgctgtcctcctgctggcacttgcaactctttccccaagggctctatggggccacagatgacatgttgccatccagaagggctgggggaatccatgtcc

SEQ ID NO: 106397 - DNA, 1022 bp, Homo sapiens
acatgaccattgcaacctcattgaatgggtataatccccagatctaagtggagatactttgtgggttgttattttgtgcagctactttaaaatattgggaaacaccactgttgagctccactgtgactttgagacctttaaggccaaggggcaaggtactttatatttccatcttcctttggcttgcattaaacttgcttaaagatgagcttactctagtgtagttatctcttctactgtctcctcaatgtcagatgttgtttattttccaaggtatcacttggctaatttgacaaaccaatcagtgctaatttaataatagatgaagacaatgctttattcatcaatttagtcgtgtgttaaatcggtcagtaaattgagtgtgaaccatcagccaggctgatgaaccctgccttcacaaaacttggtatgaaagacagacattggacatataatttcactaatctttgattttaaaatgtcatgtgtataaagacgtctggtgtacagctaaacaaaagtgctaggtgagccagaaactgtgaagttttaaggacaagagtaattgattttgttaattgaggcagagtgctctgatgaaacaagggctgaaagagaaaactgaagacgaatgtttaacctagttgacctggcgcattttagaacccttcgttttaagctgaaggttatgatatgctctttcattcatggtaataattgcttgagtctggatgagtatcgtgttttgttttgttttgttttgttttttaaatagagctagggtctcattctgttgcccaggttggagtgcagtggtacagtcatagcttactgaagcctcaaactcctgggctcaagtgatcctcctgccttagcctcctaagtaattgggactacaggtgtgtacaaccatacctggctaattaaaacaaattttttttaagagatggggactcactatgttgtccaggctggtctaaaactccttgcctcaagcaatcctcctgcctcagcctcctaaa

SEQ ID NO: 106398 - DNA, 3572 bp, Homo sapiens
tgagtattccatttgtaattcactttttaaaatatatttcaacatggcaagaccctgtctccactaaaaataaaaattagttggacatggtagcatgtgcctatagtcctagctaattgggaggctgcggtgggaggattgcttgagcccaggaggttgaggcagcaatgagctgtgtttgcaccactgcactccaacctgggtgacagagtgagacccgtgtcaaaagaaaaaagtgtatttattgattatctgcttcatgccaagcattcctaggaactaaaatacttaaagagtgttcattgtatttagggttgagtagatatagatgccagttcacacagtatcaccatgtgataactacaataatgcagaaatgcattggttgctataggaaccagctataatgtgtcctagggtgtggcttggtggacagggaagatgtctgtgtgtctgggtgatatgtgtgctgtggttgaggagggttgagatggtgtgtgctgcgggttgagattgacgttgagttggggtgggagtggggagctggcagcagcatgtttggtgcagtagagaaagtatgaacaaggggtggaagccaggactagcatagctcatgctgggtggagggccacagtgaggtcctaagccctggaaggaatgtgaaggcaggcactggagacagatgaacttgggttgcatatcggggccttgtcgtggagagccttcatgccaagttttggactctaaagtggagacatgacagggatctgtgcagtgattgactgagttaattggaggtgctagctggatgtactgttggaaaagttcatctggccattgggcatttgaacctgagcatgggatggggtcagaggtttgggattagcttagatgactgaaggaaaattatagagcaatatcccctgagaaacaccaatattaaagaagctgaaaaaccaagaggaacctgcatagagaaggctaggaatggtgaaaactacactgtggacctaagagcagtgggtgagccagaaactgctgcagaatttggaaggaggtgaataattggtgatgtcagcggggccacactcacaggagcctgccatcctattcccagcagctgatctgaagggcaaggctacatgctgagtggcagtggggttgggggacggggttaggtgatgttggattgagcgagaagcagccgtcatttaactaatgattttcccttccttcatttttttcagatacttatttcttaatgcacaccataatatgtaaatatttttgattctataaagacatagttttaacctaattgggtgggggagagagtttgtgtgagtgagtcaaatgaatcatagagtttattcctggaatgagtacggactgtggttgaggatgttgagggtaagttagcagctgacatctgtgtttcactttaagcttccacaagacttaagccagatctagttagctgatcatctgcatagttgttctttaagttgggtatgcataacgctggtagattaggagcttgataatttcattaagtgatcatgatctatttcttctgcctttccatttttacatgtagaagcaaatatcgttaccaaccaaaatgacccatttgctctcattatgaattacaattcttttaaagaatttagtatgcatatccttgaccttttttgaaattaaaaattatcttgaaaatttacctctccgtctgtaatttctgtggtgtgctcaagaacagcttaatagtctgaaaacggatgaatttaaaattagagagttgaaggtcgtaacccagcagtgataactcagctaatgaaatattcatttccaagtacgaagtggcactgtatatcaatatgttgtcactgtctgtcatcattacgtagagcacaggtatatttatgcatttataaatagctaagggaaaaaagaggctaattacatgcagaaatgctacagaaatttccgtggctgtgcttctaacaggcaactgctaaccatttttccaagccacgtttgtgaattaagtataggttctgcacattaacctctgccgtatttggtttttagaatgatgctcttagggggaggacaattcaggagatatacatactttttaaggtcatgtccacactagggatttgtttatacaaatgtaaaatgaaacgtgcaatttagcacctatctagaaaaattaaaccgaaaactgtttggtttgaaaaatctagaacattgtagaagagagatatatttatataattagcatcaccaattaagaatgaattgactttagcaaaaatcaatgtaattatctagataattcaggctaattaaagaccttcccaaatccttagatcttcattagctgcatgcttctggtaaaagcagatttttggggtgtcacattagctttatattttgcatcagtcttgctctattctgctgccgtagacctggcttcaaatgatagtgcccacttgataaacagatgttgttcaggagaaaataaaataggaaatataaaatattctgtgtcgaattgaaagcatgagggtcctcatgttcttagaatcttcttagaaatacagtataaaatctttatatacagatacacattgacaacaatagagaactcataagcagttacctgagcagggttgaacatataggtagggtcatgatgataatacactaatgaacagcctgccttacacacatgcctccaatacacagacacatacacacttagcttagggaagtagggccacttctctcctgtttgttcttttccttggattcctatacttccctgggcctgtcagtaaccatcccttctccccagtcacactttttctgtagtcccctctctaaacaggaagcgacaactactaattagacttataaataaaagccaccttaaatgaacatcatgtgtaggtttcccaagttatacgtgcctctggcctttttctcatcatttactatggaaataaagacaaacaaacatattttcccccataatctttggagggtagagtaggtagtgtcagatgtgcctgttatggtggttgttcagaaattaaaagagggcaatttgcattggccaatggacactttagcttctaaaaaattcattttattcttcttctttgattattcctagcttttaatctgagtaaaggacatagattgtggcttggccttacttcatggcatgggaagcacatgatacgaataaacttgacttagtactgtatttggccgtggcttgacttgataccttgagcctcatgagttatttcatcagttggtcgctagttatggttctttatctttcaagggccttaacaaaaatttttaaagagccaggctggttatcgtaactattataggaattcaagggtggttggagagtcaacgtagcgaagagttagaaaagaggaaagaaatccacccccagactgggtatgtatcattgatagtgtcagaaacaggcaggagtattatttttggagaaaagacctacttttacctttgtgcttctattttta

SEQ ID NO: 106399 - DNA, 3641 bp, Homo sapiens
tttattgacttgatgggctgtaaaacagtttccgtttattacgggaattaccttcttaggtagacatttgtgaacatgacggctttagtgatacccctcgttacccagtggagtcctgttaaaattcctgaaattaggccatttattccctcaaggatatcgtctccagtggtgtctttttttcttgaagatggctcccgctatctcagacaaacttgtgagtttgtctgaggaaaataaaggatttgtagcagtattcaaaatgttcccagtttgacagtagctcccagttagagaggctcctgctgcttgtgtctacctgtcctcaaaggacacacggccaacttctttccttttcccagtttaaaagtgatttactcccatggttgagactggttttcagcatcaacgtgtgctgcatggcgtcttctaagtatcaaagcagagattcacttttcatttctgggtatttggaagatgatcaggtgcctaggactattagatgtataataaatatgtttcacttctcaaccagagtacacagggttacagagggaactaattttattgagttatcaaaatattaaaatttgtgattggcaatgcgtgaacattttattaacacattacaagatctactagcacgtataacaactatcataatattaaagttgtcatgaatgcctgtgacattttgagatacctgcagcaactgtaatgtgagtgatttctcacaatgacaaattctcaaatattgctaatagtactgtggattttcctacattggtaaattgaaggaattgctaaatgctgaattcagcaaccagtttgagattgttgaaaataaagattgtttctttttcaatgcaagttcacagatcactggagttctagctacagtttgttctagaccagaggttgcagatatttttgtcctataaagagacacatggttaatatttttggctttgtgagttgtatagttttcgttgtagctgttcagctctgctacatgaaagcaaccatagaccataccttaacaagtggtcacttttgagtaccaataaaactttatttagaaataacagagggctggatttggtcctagtttgctgaacccttttctagatgaaggctcctcttgccaagactggctccctaccttggctgacaaattctcactttgggacttagtcattgttgctgctctctgttattttgcatgtcttttctcatgtttaggtgctgtgtcttaatacttttttcttacatttaatttaacaatcattactgagcgctggtatgtctagtttcttttctcttctttcctccttttcttttctttttttctttttctttatttgaaggctctcactctgtcacccacactggaatgcagtagcaggatctcagctcactgtagccttgatgtctcgggctcaggtgatcctcccatctcaacctcttgagtagcaggaacaatgagtgcatgccacaatgcctggctcattttttaaaattttttgtagagacggggtctccctgtgttgcccaggctggtctcagactcttggtcctgatctcaagtgatcctccagcctcagcctctcaaagtgttaggattacaggcatgagctactgtgcctagcctctagtttcttataatacagagatgattaagacatacttcttgcccttacagaaattcatactagttgaatagaccaacacacagatgggtaagtgtaaatatagtgttataattgctacagtagtgcagcataaagtgttgctggaacaatgaggacaaaaataacgtattcctccctcatgggacttttcagtactttgcattcagtactttatatggatagtgttcctttctttccatgacctgatatatctaaagatcaatgtgtctgtatttaagtaagtattttatttgaaaaggatgaagagttctgaaaccctaagtgtttgtatatggtaatggaagtttattcacaggtaatgataacttactgctttggaggtactttgtttcacgagttgattgttatttgaggcttctgttgtaagtgaggtgagataaaaaataatgcctaaaacctagtcctctaatctggggacagtaaattttgtgcatggagtgaatttccataactggcatatcctgtcctggttgagatcttgtgcatcacatgatttagtgcttcattttcagcagctgtttcctggtaccatcagggtcggcatggccgtgggattcagctgatgtgcttattccagtgggtggtttctccctgtgttgcagagttcacaggctgtacctagctcagtggagtagactggtgtgatcacttagccgtgtctgtcatgggcagtggagtacagagggtggttgccctctctccatttcacacttgtactggaggaaccctgaggctagatggtttttctgttaatttagaaaatctttgtcccctaatgttgctggacttgctggggtggtgaaccattcgagttgttgccttctcttctccgtctgtcccttccttaagcacagagtacttcgggaacaccatcttgtcttcatcactatcttgggcatctatttattacaaacttggaattgaacaaaaatgttttagtccagtggtttggattaaaatcaaagttcataacaaaactcagaccatgttctattttactgaaaacatcaatagtgagtgtactagagcttttggagttagaaaaagaaccatggaaagcagagttgctgctgatgtgttttgcttcttggctaagtttgtgtataagtttatagatgtatactttccctatgtatacacatgaggaagtactaaagcagaactttatagctatttactttacccttggtttcacaaatagcttcactgaaacattacaagagaaattctcagtctcagaatccctttcatttcagaaattctttgacttctgtgatttttttttttttttggtttggtaatttttcctgaaattcagttattcactttgtgatttaattatttcatctaggaaaatatgtcgaataagtcattcatctctgacataggtaggtacaaggattgatttgttgatacttttttgaatatcaataagattaaagtatatataaaatctgagtttttgatctgttgtatgttagcaaggatatttgtaattaaaatgaattatcagtcagcacctcctttttccttttactgtggttaaggtaaagatgtcggttaacagtttaaaacaatagtctaatcaatggttgccgtgttgctaaattattaatgaaacagggaagaagtatggtataatttttattatttgacttgacttctgcacctgtttttatgtataattgatcctaagctattagagctgaagctttgagaatagttttgagaagcaagaaactgtcctttcttagtgggctggaaaaacaaagtcagcatttatctcaggtatttacaatgtattgtttcttagatttgtcatttaggcttactcccacagagtctgggaaataagtttctgttgcaacggtttcttgaggcatgctgttccagcctttgagtcaaacttaccaagtgactttaggaacc

SEQ ID NO: 106400 - DNA, 1014 bp, Homo sapiens
ttgtagaaacttgccctgcagcaaagattattgatatgttttcctcttacatgactcaaaaccaaaaaggaatgtaataaataacggctgtgactcctggagtgattaaagagcactcaggagccaggagagctgatagctgccagctccagagcctgagtgggcagaacttggttccttgagacagcagctgcctaggaaggacaaagtctgcatgacgctctgtggtgctttgtgtgcaagttgaccattgtggcaaggtcataggatagcatggtggggagggggttgcccctttgtgtttgttgcccgcacctttgcccttgtgtgcaggattctctctgcttccttttgtggatgaatccttctgactttttaggtcatagattttgtgttgattcttaagtgtggcctctacagaggtcgtttgccccttaatatgtttatattgttgctgttaactttattgtttttgtctgtcttaccagacacaaggcaagattttgtttctctcttcactctcttttctggcttaacccaagacctggtggtggcacatactaaccactccaaaatttttagaggctgaatgccagctgttggcttaatccatatgttttcatgaaaccattgtgttcatctgttttctcccgggtgaagggttagttgttggattcagctttatatatttggaaataagaaatcaagtgagggactgtaggaaaacgtagagcagctcctggttttgcgaggttgttagaggccagccggcacagaaatgttcgtattcttcccaggagctaagatattcatcatgagctctttgagccaggtttccatcatctgtgaaatacagaaatgatgcttactgtgttctagctccccttaaggattaaaccatttaacagatctcactgatgcagaaatttcttcttcacattttaatatctctgaaatcggaatatacttttcattgaataatgtttgaaaattgttggatttttttcccccata

SEQ ID NO: 106401 - DNA, 3171 bp, Homo sapiens
gagtagagttgtaaagccaagtcctgagtttgtatgctggtgttagatcatgctgactgcccggagtgtggtgtggagaaggagacttgacagtgccctcagtttcccctcctgggttacctgatcctcaactctaatttttaatgtcaaaaagaaggaaagatgaaggagggacgaaaagagtgggagagaaggagaaaaaaatgaaaaaaacaagaaggatgaggatgaaatttttaaaaaaccaggtcaatggactattcttcccagcataaaattaaagaaggcagagagatacttgagtctgcctgctgaatccaagcatgtagtaatactgttgagacagttatggttgaataattttttcttcattcttaaaatgctcgtctgcattttaatacagacaattgcataaattatctcttataggaataaactctctttccacaaagattaaccctgcccagtatcatggggagcttttaaagagtttattagctgtgatataggaaataaacacttcagatgattgtggaaagaaaatagatacaactgtagctataaatgctaaaataccaactcagcatgttaggatcccttccccaacacacacttcaccactatgtaggttcccaccaaaatcccgtatgtgacagtaaatgacaactagttaattcttttggtaggttaagaagggcttttagggtatggacagtaatatcaggcatgaaattactttatcagtgtaatgtttatcagaatcacttgccaactcactatgcttcctctgagacttatatccaaaacatttccctgaaaggaataaaaattttttcacagtcactttgcattttaaagagtctgttctttaccacctcatcaggcattcaaagtgctgttgttgttgctgctggtttttttttttttttttttaaaccctttgagttattttgaatcttttcacttttacctttggaagggacccttagtgaaggtcttgtcttttcatctgtagcatcttccaataaaagttggctcaacaacagcccatctgataactcaagagtcggagacaagggcttgactagtgaatgaaatgttctgcttttgtggataagcagcaagtagaaaaggaaggtcagtggaacagaccagaggcatggtgagtctttggcctcctgttgatggggtagagctgtgcggtacagagccagccttccgttcctgagcagagttctcgtcattactagaacctgaaaccttgagggtttcttggtctttttcaccttctctccacctgttagggacataaacattaaaaatttttttttattttaaaatagtttttgatttatagaactctactattttcataatagtgttatgaaatactattatgataattgcatgaattatctcttacaggaataaactgtctttccaatagtagtatgaaattctattatgaaaataaagagttcccatataccccaaatccagttttttctattgttaaccatttacattaggttggtacatttatcaccagtaaagaaccaaaattaatacattttgattaaagttcatacttaatctgtgcagtacaaagccagccttcccttcctgagtagagttctcgtcattactagaaccagaaaccttggctattcagatggccttatttctacctaatgtcttttctgttccaagatcccatacaggatgccacattgcatctagtcatcatgtctctttaggttctgctggactgcgacagtttctcagactttccttgttcttaatgaccttggcaatgttgagtactggtcacatatttcatagaatgtccttcaatttggatttacctaaagttttcctcataattacatggggcttataggttttggggtagaagataacacaggtaaagtgccattttgatcacaacctatcaaaggtacttgttttcaacacaatttatgaccttgatctcctggactgagttggtatttgttagatttctccactgtaagtttgccccccaccatactgtactccttgtaacaaagtcactatgtgcagctcacactttaggaggtgggagttattcactaaccccttgagagtgtggacataacatttttccccagaacagtaagtgtatttattttattgttcaaggggttgaattctgaatttggaagatgctgtactatcacagttaagagtatggacactaaagccagactagggtgggtgtgaattccaaccctgctaacttcctagctgtgtacctggaaggtaatttaaactctctctgcctcactttcttcatctatcatatggatctaacaatggaaatagagtgaaaaataaagactctgtggtacaatgcttagaccagtgcctggaaaattgtaattactgaataaatattgtgtgactgtgtccatcagctcgttgtggggtgggagggtaggatggtgacagatatattactggttttaagctgatttggtatgttttttcatagagccagtgttctagaaggtggtaggttttccaggtgagttgaagacaggtgacatgttattacagctccaatttcaaaaataaagacagaaaacacaaaaaaaattctttgggtcaaaaataccctgagcactagtagaggataaagagtttttacttgaagtttagtaggtacaagaacttggagagtttcccaaggaggcttctcggtgccttggctgggttagagattgttgctagttcttgatggcgtccaagttacctccatgccagagacttccgtatgaggttggcacaatccctagtctgatttctcaggattagtgtttcaagttgggtgaagaaagtcatgtttcctgaggtaataggtgtggagaaagaagggtgttccgtggtggggacagaactgtgcacggtactctgtttttttttttttgttcttgttgcccaggctggagtgcagtggcatgatctcggcttactgcaacctctgcctcctgggttcaagtgattctcctgcctcagcctcccgagtagctgggattacaggcacccgccaccacgcccagctaatttttgtacttttagtagagatagggtttcgccatgtttgtcaggctggtctcgaactctggacct

SEQ ID NO: 106402 - DNA, 1034 bp, Homo sapiens
aggcaggagaatcacttgaacccgggatgtggaggttgcagtgagctgagattgcaccattgcactccagcctggccaacagagcaagactccatctcaaaaaaaaaaaaaaaagactcagtgtttcaggtcatgtcagttgcatcctaactagctccattatttgtgcagctggttatcttagcaccaagatacatgctgcaccctaccctacagtctgtttaggaccttaaatcaatttttaaaaatggaaattatcagtaatatacaaaagtaggaggagtaggagaatgagccctggtgtagtcattgccagtttgggtggaacttttaaaaatcaccagttcatgatttgaatagggaaggtgtgaccactgagacgagaaccagcattattttccagagatggcaaaatagagcttgagaagctggccaaagagaagatgaaatgaatgctggttgcacagtgttcagtatgtagacatcaagggattctggccctgttagatatgttagaggaaaggtttgtttaacattaatacaatgtgctacaggggaagtgttgtcaaacagttatgccggtttcttaggtaaagttggccagtattcttcttgcaggcctagtttgcttcatcattaggataactgtatgcattctcattggagcctattatccagatataattgttaattatgtccattctttcattctcaaaattgatttggtttggaccatttatcagtcctgggtagaaatgcacattttctgactttctgactgtctgtctctgtggagagcctctttgtatgacaccagctctgcagcaggagtgcttgtgcacatggccattatgagaaggccagttagatttcaggagtcatggggactgtgaggacctggaatacccatgcccagtataaaggtaattcaagttcagatctgtgcaaaacccacgctggatgcaaaaacacatttgctggccaaattcagatcacaggcacctggtaggttcatcttcttctttatagggaac

SEQ ID NO: 106403 - DNA, 6204 bp, Homo sapiens
catcatttcaacctgcaatcgataaaaaaaattattagtgaaatattttacattcttttttttcctgcgaagtctttgaaatctgatgtgtattatactctgtaagcccatcccatttcttactaagggacattgcaattgcttaattggccatatgtgcctggtagccattgttttggacaacatggttcatgttgtccatgttgtccaacatggacaacatgtaatgcctcaaacattctgctaagcacactgcaacccacagtactatttcaacttatgttcacgttttactgcatacttgatgagttattttttcccccaaaggatttttgttgttgttgttgcttcctgaatgttgcacttttacaataaaacaatgttgaaatgtgaatgtctggtggttggctgggctctctcactgggtgacacaccaccatatactagctttcaggtgctcaaaagtaatttcttcctcaagagattgaaaaatacctatttgtcatgggtcttctgggtctgttagaataattaccaagtatttggatagttaaaagttgcaacgctagggtcttttatacttgctctaggacatagttgtcaggtatgaaaaatttaccatggcaagatccatttgttgtattaatcactacctttcccttagagttgatttatggttcagagggatattctggaaaatgcttagatcaaacaagaccacattcattcatggagaaagagtggaatgcaggttcgtagtaaagaaaaataatttccagggctcctgggaaaaagctttggtcacttaaatgcccttgggctttctgtaagtaaacatctgcagtcctctctattggttttctagcatatttcacacaaaagcaggggagcagagtagtgttaattaccctgagccaagtcagtattaatctcaggtctccattgttgtttaagattgatggataaagatgtgactgcccagaactacctttgttctcttactggaaagatgtggacttggaggggcaatctggagttaatagtcagaactagattgtatcctccttactgggatgtgagctctgtcacctgagtaaccaatttctttgtaaagggatgtaatctcaaatcttagctttcaagctgccaggcttggtttgcttttatatccccaaatggaaccggaaccttctttattccaatggtacattgtggtagactgtattcggcaaccttttgtatgaaagggttaacatagatctgtctcatcagtgtctttctgtttaaggatagcataaaagtgctgattgttaacttcacttggtcctatgcttattctttatttttactgtaggatttactttttcttttcctgtgtctttctctctccaaaaaaaaaaaaaaaataaaatctaccttgatgtgtcaaagagataaagaagatgttataaacattaaacaaaagttcacgtttctgtttctttgtgcccccggtcccccttttaaaaataggcctcacagcatcaggcatttgccagtgcagcagttttgaagcataggatttttccccttcctgatgtataaatgccagctctcttcccccctttgcagacacaggcattttcctcttttgagttttagttttatgatagcacattacaaagagtttgacagatcctttaagatgaagatctgttgatgtacttcctgtttatggtggctcccagcttcactggtgatgaggacacaggcgcctgaaacccagaggcagggtggatctgcaccacttctctgaccttgccagggctgaccttcatcattctaagggaactttttttctttttttcccctccctaagcagtggttctcaatttggggctattttactccagaaggggcttttggcaatgtttggagacatttttggttgttacagcaagacttggagctaccagcctctagtgggtagaggccaaggatgctgctgaacattctacaatgcactggactgtccccacaaaagaatgttctgtcctgaattgttgatagtgccaaggttaagaaaccctcccataagggatgttttctaggcttaaacagtggcctgtatgtgtctttctccttatttctttatttcaagaaaagaaaaacgctgccaaagcaaaagccatgcagtatgttcataataaattaccttttaaaacaaatcccaggcctactcttcccgaaaatgggaaagacaaaaaaaaaaaaaaaaaaaaatcaaagtgccccatggcacaagttatccactgatgacatttccctctgaggactgttttctgggttagggtaattaccacaacccagaaggtcatggagtctaagttaaagggcgtcactgattcagctctcagatgagccaccccactgggatgtatgatggtataaactgcaattaaatcttgtgctgtatttactgtgtgattggaaggacagaagggagatttccctttagtcattcttacctagagcaaaactcatgtttttttagtgtaatgtgatttcttgagaatggtagatgttagtgaagtggggcagggagatggatttacaaatcttggagtttgcaaaatatgacttgaccttttgttcttatgttgtgggctgtgttttctattaagctctcgatcatattctctctttgccatttaagaaaaatacagcacaaacctctgtcagattttagtatatggtgacctaatttggtgggatgattgctaaagttctggaacaggccctttgtagctgatttttgttgaattgataagcatcgaatatactaaatataattttttgtgcctaggtctcttccaaaacttgcataccatttttagcctgaactcagtgttatcattttggtcttttaaagtggagggagggggagagggagaatccaattatagcaagcctgacttgattgaatgatcttagaatgaaccttgtgggaaataatgtgttggcgagaaagaaagttgagtttctaaagttacagaatctgtagatctgttacacaagtgcatgtaggtaaagcctccctggaatgattcaaaaggtagttgtaatggatgggttaaagacttcatttcaccatcatccttatccaggttctgaatacacatgccctgtcgggtctgtggctcattttagatacagtgagtggaaaattgaatttaatgattaagtctttttggtttctgatttgtggattttcttgtgatttttgtacttctggatttatattgcatcttagtgaatatcattttttttcttcttaaattatctaaaatatgtgatagggtagttagcaaacctgtgttggttatacctattggcaaatgaaaggagatgacagaaataggctccgatgggcccatggctgaattacagagtggtaattattctttaaatactgaaataagagttttgcctattagaagcctcataaaaccagtgtctacaatctatctgattttgctgttgatgtaattttaggaaatcaaatgaactgggatggaaattaggtttcatactccgtggcttgtgtacccctctaagttctattaaattttataggagttttacaggtggaaacacagcagcaccacagcttttgtcacttcaaagagcagccctttcataaacagagaatacagaatcatgccttttatcttgccatttaaaaattcttcattttctgcacccaagtgatttatcacatggacggagaggacaattcaggatattgtatttcgaaaaagggaaagagaagccattcaaattcctattaaaatgaattgcactagctgtacatcattttctaatttctgagacgacttgtaaatcacaaggagagagggcattctaccattggtcaggggaaaaatgggaaatttaatagtttgtcaaagattgataagaaaggattaccactctgagagaccctaacttgatgagcaagtacattttgaagttcatcagacgtataagcagttggagagtttaattaaagttacttgtcattactcaagtttacatccggtctgtctctgggccagcgtatatggtatgccagtgacattgtcagaacttagttttgaccctgagagctgtgcgttgttcttttactccctcttgattcctctttcatcatgtagaagctgatgtgtattttaacattgtggtcaatttggtgacagaggtcttgatcagtgcaagttccagtagttagctgaattttatatttttctttattttttagctgataatgattcaagttgttggaataatctaagactgctagaaaataacatatatacacatatgtacacttgtgtaaatgccatcttgataacagaatcataaatgtgttcatgtaagggtatgtgtgtgtacgtaaatatgtattattgaatcgtattgggatgatttttttttgccctttcagatgtcaaattgtatattgagactatttattccattcttataagcaaagcccttcctttccctcttgttcctgcaaagcagctcagagaatgacttttaactgggcaaccatatttttgatcttctgcagagctaggagcactctgacatatggttcaacaaaggctcgcagaccggggcatccagtacttgtggtgcttctgttaacgcctgtttatcagattattgaagggcaagctgctttcctcagaacgtgcttgctctccctgactctgtgtaatcctatccaggcacggagctgatattgttatacaaacaaaactcaataggcattactgaaatccagagagtggattctttaggattggaccttttgtgtgtgtaaccacatttgaaggagacctaagaatcatcatctggaactttttaaaattgcagttactggaaactaaagccagaaactaggagaaaaccctccgattttttgtttggttatttttaagtggagaagttacaaaggtgttagctgttaagatgtggagtgaactggaatccagtggctctcaaatcttgcagctcatcagaaacccctggtgaactttgtacgtggcactcacccctattccttaactgtgaaatctatacatttttttttcatccaccccagataaatcatatgtaggtgggctcttggtccagtttgggaacccgtaaaagaagttatcaacctcatcataaccttcccaggcaggaatcaatttctttgaatataagccattcaaattccataatatgatactggctctaaaggcacatttaattatgtaggacacaccatccctttcgcaaaatcgcacaaagatttcaacttaggcctaaaatctttggcacatacgttgcactgggcacggatcccttggcctagataatactgaattaaactcctccctttcctgccctcccacacagaatttggccagagaagctcagtgaaggttattcttaaacccatccccgttgttcaaatctggcagtaaaaaaggctttacaacttgggtcaactcctaatggggccttttgatccaagtgctttaaagtttagaccttttgtatctttgttgataaaaactgaggtgtagtataccattaaaatttttaaaaaattatttctactgaacctgttggatttaatctgtttttgctatctagtaggcttgtgaccttgagcagatgacttaactttgccacatttttttcttttcttgtaaaatgggggtaatataatccatagagttatcataagaataagtaaaagaatgtgtaaagtgttagttcactgccttccacatagtgaaggcccagtaactgttgtttcttattattatcacggtgggggaggttagtgggggaaagttacaaaatgaataagcagcagactttgccttagtcaagagcttgcatcctcaaatttggagtaaggtataattatattaccatactagaagtaggaaggattaaaagaagaaaataaagatgcactcttttttcagagaaaaatgtgatcactgatggctttttgctgcatcttgaggggagacattgcccatgaaacagttttctgagctgagcccagaagaataaccctaaaggagtgggacagatagaaaatccaactggaagaggaagtggtatggtgtactagtgtctgacacacagaag

SEQ ID NO: 106404 - DNA, 1033 bp, Homo sapiens
gagtgcaaggctgtcaccaggagggcaggttagggtgaatgtggcagcccaggtgaggtagacctgatgattgttcgaatgtgacactttctccctgtcatagcccagcagcccctttagtttgtgactctgctgtgcctcccaattaggcctgctgtggacatctcacttctggctgaactttgggctgggttttgtgatgctctttggtcagtggaatgtcatggaaggcccatgaatagagtgcttgaatgtgcttgcatgactttacttggcctctctgttctgctaggtaccatgagaaaagcatgtcctagattcacaggtggaacttcctggccccaacctgttgcttaactctcagtcacccagtgtacccaaacaccagtgagcaagaaataaatgcctactgttgttcaataccaaaatccttttttcccctcttgcttttggtcccacagtattgttgcagtagaaatctgaccaacacagcagacaagttgactaatatgtctgctctttggccagaaaaccaacaagagccagaatggacagtgatgatggaaatgaattagttgcatctagggccatgtaacttgccctccatttgaccaaagctgaatttcattgaagtgtccattccatcatgcctgagttctatattggaaaatgatctgctttttcacaaaacacaacttcagctttcatatcctgattaacaaagacaatatgcattattagacttaatttaaaggtgtaatcagccatgcgagtcagataagggaaaaaatagtaccatggaccttttccaaattcccacaggcttaaaatataaaaattccctcaagagtgctgacagcataccttgcctgttattacagcttgagttttattttgttcctctgccagtaccagaataaaattaggttacaaatcagatctaacggtttagattattgttcatcttgagctctgcgctttctctccatttgttgtggcatagcagaaataattaaatttattagtaggcctg

SEQ ID NO: 106405 - DNA, 1162 bp, Homo sapiens
tgggaggtggaggttgcagtgacctgactgtcacactccagactgggcaacagaacgagaccgtctcaaaaattaaaattaaaaataaaaataaaagaaatcttattgtttcattttactgtcttgattggctttaaccctgtttccaatgcagtcttagagatggaatacattataatggggataaccatgtctcagtgtcatctctcatttgatctaatcagagaatacgaggttatatattgacaagattgtagggacccagatgagggggctgcattgttttactgtgcaaaagtagtttatccgttttttattgtgagtgcttattgagaacctcattgctctgtgatcttaatcattactaagcaagttgaaagatacagtggctgtttattaggttaagggaagcccacacatctatccaataaatatctgtaaagcacctgttacatgctgtgcactgttacaggcactggggatataggaatgaatacagcagaacatgttcctcatttgccctaaaaacataaccagtgtttggaaattctagaatggacctctcattattttcatttttatttcattttaggctattttatttcctaaagtcactggtgactggccatctttaacccttgaaaatattactacaagtgaagatctcttgatagcaaaactgatgactttaggtcttccctgcctgctgttgaataactcttttaagtttgttatgaaatctgtaacatgacttcagtatcatctagtcaagctcctacatttacctggtgaggaaattgagatccagggatgaagttcaaatagcaaggcaactccattcaaagtaggaattgtgacatgctgttgttttgtgtcttggcattcttgaacagaatttcaaaaacccagaaaaaggctggacgtggtggctcacacccataatcccagcactttgggaagatgaggcgggcagatcacttgaggttaggagtttgagaccatcctggccaacatggcgaaactccatctctgctaaaaatacaaaaaaaattgctgggcatggtggtgggggcccgtaatcctagctacttgggaggctgaggcaggggaatcacttgaaccctggaggcggaggttgcagtgagccaggattgcgccactg

SEQ ID NO: 106406 - DNA, 1051 bp, Homo sapiens
gaagctttttggtagtacctgagagtttcagtaatcacttatatatatattatatatatattatataatataaatatatatactatataatatatagtatataatatataatattatatataatatataatacatatattatatataatatatattacatattattacatattacatattacatatgtattacacataatacatatattacatatatataatatataatatataataatatataatatataaaataatatatataataatataataatatatataaatatatatttatagagagctgttgggaatctccatcaaaagtaagtgctgaaccttttaaatcactgaaatttttttttaaatggttcaacaattttatagaaaacattggtagggggagatttttattttggggggagttggtaatttaatgtaccttttcatatttctaagaaaaataaaatatttagttgattgttgttggctttagaatcattatagttgagttttcaatgaattctgagaagaaaacaaccaataatggcagtttttaaatcccaaattcttccatggaaaaataaagcaactaggaaagctaaactataaactcacaaacaatatctgtaatgaaactaggttatgaggtatctccatcagtctcagaatatgtgtggatgggacaaaccacctacagctacgagacctgcgtggaattggccccagagggaagagacagaggacctgaagtctcaaatcagctgcatattgcagatgcccatgggaaagtgtgctgggcctacttgggatgtgcattgaagagtaggcatgcttccatagcatacctagttcctggatgagtgcaaggagactgcagtggagcaagatgtggtgattttggggctctatcattttccaaactaataacctgaatctgccttctaaggtaaaacttgcaagaggaagaactgctgggggtagaagtcagaatgaacaagatggggcggtgagagtcaagtatagacaaggttcagataacagtgtggaa

SEQ ID NO: 106407 - DNA, 4759 bp, Homo sapiens
tgtttcagataatcataattggagtgtccagtgaatttggggaaggatagcactagaggtgacacagttttgtggccctgaataaatttgtgtatctaggcaataattatcaatggccactagcatcacaaatgggggagacacctagactttatataattctccataggagaatgcagtactacctataaggtagttctgccaacaaaatagggaactttagtctgatcaagcttctacatctatcaatttacagaaattaaactgagtatcatgttaaatggcaccatggggatgcaatcagcaaaacagacaaaatccataacatgggaatctttatacaacagagggtacaaaatgtttttagcacaaaaaggggtaaatggagataaaaggggaacctatagattaaatgagattaaggaataccttgatttatcttaatgtgtatggcccttatttggatcctgattgaagcaaacacgttgtaaaatggaaaacattataactagttgggaaaatgtatgtgaatattggatttttaggaacggatcattcatattttttaagtgtttcctgacattttggtttttattaataataaaaaagaatacattggagaaaaagggtttgagtcatcagtaagcgaacataggatgttgaatcactcatttgaaattttagtagatatgtgagttagggttcttcagaggagcagaaaaaaggagatatatttttaaaagacatttattataaggaattggtgtgactgtggaggctgagaagtcccacagtctgctgtctgtaagctagagacccaggagagccaatggtgtaaattcccatctctcttggaggcctgaagaaacttatggccctggttaagcttaaacactcaggcagagagaagatgttttcccttcctctgcctttttgttctattcaggcactcagggtgccctgaatgggtacctacccacattgaggtacccactcgtattaagtggtgcccacccattgaggaaggccatctgctttaaacagtctattgaatcctaaacaccctcgcagacccactaagagataatgtttaaccaagtatctgggcaccccatggcccagtcaagttgacacacagaaatacccatcatctcagaaaacactcccctttttaatttcttgttcctgtgtctctgttttttttttttttttttttttttttactgtggctttagggataaaacagtaattttggtgttgaatcacggtgttcattaaaatggagaaagcaggttttgctcttgggtagatagaggcgcctggctgctggggattgtttgagtaacagctagctatagcattcatcttcaggggttcctgttttgcacttcctctgtgaccgcagtgagaaattgtatatgagtgagacttcctagggttctttggccacactggagagcttgattacttgttacctctaacacctttattggacatggtgtttttttgattcactgtgaacatttatggattttttttcattacgccaagcatttcaaatattcctttccttatccaggatttttaaatgctgtgtttcttttggactttgtctacattttgcagtattctcctcagcatagatttctccttttaatggctacttcttcagctttatgagtttaactttttcaataataaaaacagcacaaaacatattaatcatattagttatgatcagttctcatttgtctgctcttcttgttttctttttttttttgagaccgagtctggctctgttgcccaggctggagtgcagtggcgtgatcttggctcactgcaagctccgccgcctgggttcatgcccttctcctgcctcagcctcccctgtagctgggactacaggcgcctgccacctcgcctggctacttttttgtatttttagtagagacggggttttaccgtgttagccaggatggtctctatctcctgacctcgtgatccacccgcctcggcctcccaaagtgttgggattacaggcgtgagccaccgcgcactgccgtctgctcttcttaagttgacagaaaaggagttttacagtttttacatttcttaatcctttatgggaaatagtatttctttcgttttgcatgccagagaactgaggcttaaatgataagtaatgtgctgtgacttataaagctaataaaggaaggctaggatgaccctaagcatagaagacagaggcaaaagaagaggggaaatatgaaagttaaagagatataaacagtagagggtaaggggtcgtgaggtgagtgtatgaatagcagtatgagcgatgacaatactgaatatgataatgattgagaacatccgcccaagatgcatgctaagcgctttactagtattatatcactggatttcacagcacctttatgtggtagtcacagttattttctccattttacagatgagtaaacagagctgttagaatattatgtaatgtgcactgggcaggctctgccaagtgcgtgcagaagcataagctagcaatttaactgcctctcaaatgcatcatagtaatctatcttcctccttcatcatcagggattaagtaactgcaccatggacaatgtaagtaacttgcctaagtaattagtttcagtcactggcacagccaagtggagaatctctcttttctgacctggaagtattatgagtttgctcagtgagtttgtttttggaaatgctcctctatggcaacattcttgcctattcaatactgtttctttgacttctgtgtctgtttttaattgttcagctcttctctttccacccacatccccaaatatgcagtgagtagccgttgggtttcacgttgtaattggaaaaggtaaaagccagcctgaaaataattctggcctgttgggaatgttggcttcatgttttgagaatttccctcgtgtccctgacttcagagttaactatttctttaatgaggactaacatgttagtgttgtctctgaactttatttgcagtaattcactaatggaagctttcacagccaactctggtaatgaatgtagaacagcgaccttctgtagaaaaggaaagaaaaaaaatgctttctgtcctcagagggatctttcctgtttggaaaaaccaaatggacaagaaaaataaatcaagcatttgaaggaaaggagctacatcctttagagtgttatatttgtgaaaattctcatagcctagagattttctttccaatttaagcaaggaggaattttccaatgtgaagctatttttacatggccattaatggggtatttttggtgcaaaaatagtttctggtccttggtgtagcaacctttacccttttagtcaaatgttttattcttccaaccacacacagtaggagaatttcttctctaacagtcctcataccttccccaaaaaaggagacagaggaaaggcaatatttgttttgagactgattcgttacatggccgatggtgacttgaaaacacctccctgtgtgtgttttctgggaaagagaggaacaagtgagtgttaattctccactctgactgggggccaacatccctttgatactcattgtgctgcctttcctggttaggagttcttggggcacttaattaccctgggctgaatattttttaccatctactccatcccatcatgcgtagtttgcatttgcaagttcggttactttgggagattgatggagttgaaattgatgatgagccagttgcacaggtttgtttgtttgtttttgttttgagatggagtcttgttctgtcgcccaggctagagtgcagtggcaccatctcagcttactacaacctctacctcccgggttcaagggattctcctgcctcagcctcctaagtagctgagactacagacacacaccaccacaaccagctaatttttgtatttttagtagagacgggtttcaccatgttgagcaggatggtctcaatctcctgacctcgtgatccaccgcctcggcctcccaaagtactgggattacaggcgtgagccaccaggcctggccgcacaggggttattaattagtggaatcatattgctcattgcagaggagcaagtagaacttaaatgtgttatgcattttgggtgtaacaaatttatgcatttagaatagatgttaatgtaacaaaagtgatgaaaaacttaaagattattatggtaatttatatattttttaattttgtagactagcttaataaggtgaaaggaaaaacaacttgttcttcatggagtttaagttcacatggatttatagtgcaagtagaaatcaataatgtaggacaacggagaaatgccttcattcttggatatgtctgtccagcaaatatactgataataaatatccctgttataaatgatgatgaagctgggtgcagtggctcacgcctgtaatcccaggactttgggaggccgaggtgggcagatcacaaggtcaggagatcgagaccatcctggctaacacagggaaaccccgtctctactaaattacaaaaattagccaggcgtggtggcgggcgcctgtagtcccagctactcaagaggctgaggcaggagaatggcatgaacctgggacgcggagcttgcagtgagccaagatcgctccactgcactccattcagcctgggcgacagagcgagactccgtctcaaaaaaaaaaaagatgatgaaaaatgagttgacagttgt

SEQ ID NO: 106408 - DNA, 3634 bp, Homo sapiens
ttttgagacaggttctcgctgtgtcacccaggctggggtgtagagataggatcacagctcactgcagcctccatctcttgggctcatgccattctccctcctcatcctcctaagtagctgaagactagagctgttccctaccacatccagctactttttgttgttgttgtttggtagaaatgaggttatgctatgttgtccaggcttgtctcaaacttctagactcaagtaattttcctgcctcagcctcccaaagtgctgggattacaggcgtgcgtgagccaccactcccagccaatcttgttaataaatgatgataacagtaacaattttggaagattcatggaaataatgcataggaactacttagcactctgcatggtacatagaaactgctcaaatatccttaactctcattatcattaccagctgtcctattgttttaggaggataaaatacatatcttaagttaaaatgtttttttatttggttgtgtcgttttgcacggaatagtagggagaagcctcctgatttgtttctctcgtggaaatttgatctgtatctgctaaaaaatgtttatcccttcttctgtaaaagggactctttcccctacggtgagtagtatatagtgaatatcaatgctgatacatttaaactgtggaggcatcaggggaccaacctgcagtgatgctaagtggaactgacaagataatgacatgcgggttattgttgattaatccagttcactggagaatcattgggaaatgcatttatcctttcacctgaccctcccaaccccacaaaaatgatttacagtaatcttggagtcacccagtcctttcttccacatcttccagaacttaaaaaaaaaaaaaatccgatgtttgtactatttcccctcttccctacttttgatgacggccaatttgttaaaaatgtaagaatggccagatgtttggtgtttgtgttagtggcagcctggagctaagtatgattttttacagtgaggtaaaatacttgcttcttactctaccaagtactttttacacctccctttatagccctttttgtaagcaaagatgcctgacttctgtttctcatctgtgaagtatcataggtctagagtccattagacatgatagccaaatataaaacgttctaaaaatggaaaggtttttttttttttttttccgattatgtggtggcaaaacctaacctgtcctgaaatcatttggtgattgaagtagtaattactatgcttctagaaatatttttagctctccatctccaggcgtatggtagccttacttatcccgccctcttctaagttgagcatgactctcaaactcaatcaggcaactagaatgagaatatcgatatgaatgaggatatagacgtttgttgcctttagttggaatctttcagagtaagggcatgctttgctgtgttcttctatcctctatagtcagggaagtgtgaaggtggagctaccctctcagcctgggtaccccagtaagggagatgttgggcctagtcccctaagtggtgcatttgcagcatgagcaagaaaacatcttgctgttgtaagattctatttggaggactggtttgcggcataacgtagttcacccagagaagtatgtggtaaatatagggctttgatttttagtctttcatgtaatcagatgcactttcggagaagggtttcaatctcacttccaacctttgtataccttgttcctaatcacaccccatcatactataggaaaggtggaaggtggacagaatctgggatcccagcctcactcatggatccaaggtcagaaatcatctcatgtctttctgccagtgaatgtccttctcgtgacctcatgatattttgtgacatccctgatctgtccttcagtccatggaaatgcccctggctgtagtcatatttctctgtctatctaaccatgtgtctatctatattttcatatttatctggttggaagcatatatatatatctttcaaatactgggaaggcccaatattttgcctcattaggttatacatacatgataaacagcatgatatacattttaatatcaagtagataaaatacaagcttttctaagctataggtcatcactggtgaccctatcctgatacagttactttagagatctaaagagattagatattatattttcttattatatagtaccttaaatatgtctataacagataataaaatagtgcattagctcatatatactacctaaagagagacacttaatcttactgtatttatttggaaagtttaggtaatttcttacattaaaatatttttccttaaattaactgctgattcttagatcaagtcagttatgtattattgacctaaattccacgtacagtaattagtttttgttttgctggtcatactgagtcattgcgatatttctctggtatgtgattttagtcttctacatgccctttttttctcagtctatcaaggtacattacatagtttatttattctaagcgtttctacgaaatacaataattgtcactcactttttaaaggtttaaattcctaggctagcaaaggagtaagttattttcctatatgcagtcaaacctgggtgacacagtatggaagatgtttaatatctgtccatatgtctgtttattctttcatacagcgacacatgtgttgcacaactataacataccaggcatagtcagtagcgtctgggaatattcaagtgaagaaatctaagttctagctactccatggagaagatgcttttagactagaacaaggtagacaaggtgtgttttgcacgtagtctttcattttcatagtgcctggcccatgcttaacaccaaataggtagaaagtgaatgcatggacttgtaaccaacatgtgtctcatctggcctttcaaggaagtgctgtgtgaacccagaggaagtgctgtgtgaacccaggggaggagtgactacacatggttggcgtcggatgcattggaaaggcttcagataggatagtattggacttgagccaatgggaattggcttggtgaagacctccaggggacagggtgacaagccttgcctgcagtgacagcagcttgtgtgaaggcacagtgacagggattatgtgaaaagaggtgagctgtggttttcatgtccctgagggatctgtttatttgggccaataacctatatttcctttttttcccttggtcatgggtggaagatatttacctatatgactgattctgtacccagaagaggtgaaagcctagaacagatgatttctccaatatttaaagtgtaggttttgtcagcatctgcatgtgttatatagatatatatccttagcacgtggtgtgtatgtgtgtgcatgagcttgcctgtgtgtgcccgagtacgtgcctatgagtgagagagaaggaacttacttggcatgggatatgaaggaagatactcagtatttgttccgactcatgcatcccaacaaaggcgaagtaaatgtctctgtggtgtcccacataaaacatgaagcactaaataatattgagagagcctcgctgagccctccacaaatagtacattaatgtcaaggaagtgttgaggaattcc

SEQ ID NO: 106409 - DNA, 2161 bp, Homo sapiens
ccgtgatctcggttcactgcaacctccacctctcaggttcaagtgattctcctgcctcagcctcccgagtagctgggattacaggcacgcgccaccacacctggctaattttgcgtttttagtagagatggggattctccatgttggtcaggctggtctcgaactcccgacctcaggtgatccacctgcctcggccttccaaagtgctgggatcacaggcatgggccactgcgccctgccgatggatctctttatcgggaggtataaatgcatcaaaatttgtggagctgtagtgaaatttgtgctttgtttttacttggtggcttcctttcttttttcaaagacctaatgagaatgtttaaataacagacatctgggttcagcctttgaagccttagcttgtactgtctgatattctcaagtttttgaggaatatcgggtcagtgatggacatttagctgcaaaatatattcctttagtgatccatctatttaatctcactgataaaaagatactgatactgatgagtatctttcctattttcatggaggcattattcaggcataacccaggatactcctagctgctgttgcagaatttttcactgaaatatagaaatatgtgtgtaaacatctgtctcacaacttttgtgaaagagcataatacccatttatggtgaagagaaggaataagcagttaagaaaggaagcagttgagtgaataattttgtcatttgacttgcataaaatcattgggataatttttacttataaatataccacacacaggaaggaccttttgttccattttaaaaattgcaggtgacacctgtttttttgtttttgtttttgttttttttaacctcatgttacttctcttgcttgatgttcaacccagcttaaagttaaagcagactcaagccaccattcattcattctgttgaggacagcatccatctggtatcttcttactttgttaattcagttattctatctacaattgtttctcacattgatgacttaggaatttcaggaatggatgagttaggaaaatgccaatgaccatggaaatagagaaaaaggtataccaaattttgggtgctttttgagttttctgtcttatgggtaaatgatatttttgtgcctttttctccattgcaaaaaggaaatagtttttcataagaattgctggttcaaactgtatatagataaacacacacataggatagatattgatgggtggtaaaagttttctaattggttcagatgagaagatttaaaaattacttaaaagagaataaacaacatcttgtctataactattctaggtggtttgtttttctaaaaataatgtaatattttaaaaatgtttctagatgatttcatttatacatggatttatacatttgtatcttataaatatcccagaaagagtcaatcaaaaaattatatctgccaaaataagtgtaatcatgttgttcagcctaacaagaagggggtgctttgcatgcacaattccatgcaaatgaattcacatttccatttagctgtaatgggcacattctccccacagctgtgcttttcgttgtgacatggagatagaagctccactttcaaaattattggatttggaaatggagttagaatattgaatttggtgcctaaaataataactatctctttttaaaaacattattatatgctcaaaaccccttccctggactaagtcatttaattctcataaccctatgagataggtactgtgatcatcttcagaacagagttttggagcatagagagtgggtaagcatctggggcagggtcatacaactgggaagaaactgacctggacttgaacccaggctttctggctttggaactagctctgttaagtgctgtgtgtacagccttcagggtatcaggtccttatctgacattatctcaccctcttcccccagtggatcttgtagggtaggtatcattatcttcattttatagctgagaaaactgagatgcagaatatgctgctctgatctttggtttttacttacttttttaaaaaaaatatttatttctagtttgtatttcagtaggtttttggggaacagggtatttggttacatgagtaagttctttagtggtgattcatcagattttgctgc

SEQ ID NO: 106410 - DNA, 2272 bp, Homo sapiens
tgcctgtaatcccaacactttgggaggccgaggcaggtggatcaggaggtcaggagatcgagaccatcctggccaacatggtgaaacactgtctctactaaaaatacaaaaattagctgggcatggtggcgtgtgcctgtagtcccaactactcaggaagctgaggcaggagaattgctttaacccaggaggtggagtttgcagtgagctgagatcgtgccactgcactccagcctgggctggagtgagactccatctcaaaaagaaaaaaacatgaacattttggttctgatgtgagctgccaattttttctcatcctggaagtttcctaaggcaaacatattgggaatccagctctcagaaattagacaattgaattatatttcatctagattgcccacccaagctagtgaaagcttgggttttgattttggttgtgtttaataattacaatccttttggctgtgttttctatctgaaattcagctagatatagaaataaagtccaaatatacctaagattcagcatcataaatgtcaggttcatggaaggattatttatacttgtattgagaattatgctgtccagtttggtagtttccaggtgtctcattgtggcagaggcaggctgccttcctttggtcgttactgtgcctcaattacctcaatattctcttgagagaaaagggcttaggttattccattagcctctggtcagcccttcctgactctactgttactttctcctgctccagcctcctttgtaaatgtggaagtcaatttcctattcagtgggatcatgtcattcctactccccccttccccaggctggagtgcagtggtgcgatctcagctcactgcaacctctgcctcctggattcaagcgattctcctgcctcagcctcctgagtagctgggattacaggcacacgccaccacacctggctaatttttgtattcctagtagagatgggatttcaccatgttggccaggctgggctcgaactcttgaccttgtgatccagccacctcagcctcccaaagtgctgggattataggcatgaaccaccacgcccagcccgttcctgctatttaagtccttaatggcctggccttgttggtagtctgaagtgtcacatcagtggttcttaaaccaacctttttatcaggatcactttgggcatatgttaaaatatacacacgtgggccgggcacagtggctcacacctgtaatcccagcactttgggaggccgaggtgggtggatcacctgagaggtcaggagttcgagatcagcctgggcaacatggtgaaaccccatctctgttaaaaatgcaaaattagccaggcatggtggcacatgcctgtaattccagctacttgggaggctaaggcaggagaattgcttgaagctgggaggtggaggatgcggtgagctaagatcgcgccattgcactccagcctgggcaacaagagtaaatctccgtctcaccccccgcgcccccccccaccaaaaaaaaaaatatatatatatatacacacacacacacctgaaccccactgcagattaatggctctttggatatttgtaggcctgctctttgttcttacagctatgtgtaggaatcactggtaagtctttaccttccttgtctcttctctttccaaaccattgttctttgtttaggcctttgttatagaacatagcccttttctgttcatccactaccctctgacctctctgattcatgtacccctcaccttcctcattgttttctgagtgtgtagtacatagtaagtgcttgaaagtggttgaagtaatgcagtttaaagttgtaacattttgaggcctggtgttgatctacaaagatggtaggctcagttccaaacaagacactagcctttcctgtctcctggaggccagctttacttagggatagtgataataaaatatagcagctactatttactatgctcttactaccttccgggtactttgcataatgcctctcagacattattgacatcaaggcctgaactaggaatatcagataataatatctattgccatcactttgtagttgaggaaatagaggtgcagtaagttttaataacttgctgaagatgatgcagtttgtaaatgggtgaagttctgtttgaaaccagtttttttgttgttgttgttgttttttgtttttttatttgtttttttcagacggagtctctgtctgtcacccaggctggagtgcaatggcacaatctcggctcactgc

SEQ ID NO: 106411 - DNA, 1055 bp, Homo sapiens
atatctcctaaaatgtgggatacagtaaagtaactggaagttgagtcacaagcagggctcctgtttgcccatgtcttgctgaatgttcggcatgcagggggtactagactattaaaggctgaatacggaggtgcagcctgaatagtacgtcatagacaagagcggatcagcagcattgattgaacaatagcaaggttttagcctggatttttgtgtttgaggtgaaggaaggggatgaggaatgtctgtacacgtacacatgtaccatatttttcacttgagggtgctttcactgatcaattttgagggattattgaaaataagtgaagacattgaaaccagatgtattagtccattagggcagctataacaccacaaactgggtgacttaacagaaatttgctttcttacagtgcaggaggctgccagtcaaatatcagtgtattgcaagtttgctttcttctgaggcctctccccttggtttggagatggccaccttctctgtgtgtcttcacatggccttccctgtctttcttcttcctcttacagggacatcagccttaatggatcaggcccccgacacttttgcccacatttaaccttattcacccctttaaaaaccctgtctccaaatacagccctgtgagggcttcaacatatgaatgttgcaggggaggcacaattaagttcacaacaccgggatggttaaacaactgccctgagatttcagatggtgaatgggagggaactgggcctaaaagctggtttctaggacaagtggtgaaggtgctcagaattattgtcctgaactcagtatgtgagaaatagttaaatggggaaggttgtgctgttgggttatctacctgaaatcagttgaagaatcgtttttggtttcaaataattaaccctagaagttgggcctgactggagacttaggccaccaaaactagacaggtttatatagtttcttttccctttgaaaggtcccttttggatttagtttcaaaataagatggccaaatttaacctccctgaagtttcatcataccttcaag

SEQ ID NO: 106412 - DNA, 1067 bp, Homo sapiens
ctctcaactctcacccccttccccctcgttgcctacacagcattttttgtcgttataaagctcacacccttcaatgcatttggtatttattttgtaatcctaatgcatcttagagttgtgtgtattttatgtggtactatttctttttcctccaaaaaagctgctattaaaatgactgcgtatttcagaattcatggagtcttggaatttagagaatatagcacacatatatttatgtatacacttatagtttatatgcacatatatatttagatgtgtgcctgcattttccccttgatattatatcataaacatttcctggtagtattagggtctaggcacttgtaatgtctaaatcatattaatttatgtgattgtgactttattgatatgattttgcttcagtcacttaggttgcttttagttttttgactaagtgtagttaacattcttaagaatattttttgctagttttctgtctgaatatccaggacccatttcgatctgtattctttagttactaaatctttaaaatttaaaatattagggtttttaagcccatataattcaagaagtaaatgctttatatgttgaattatgatttgggcaaatgcatcttattgttttagggcaaaaaacttaagctttcttctattaaagtgatttaataagcactttgtaagtgtgtaatgaggatgatttgggttttattacaaatgatgtcagtgtgaattgtgtaatgatttcttgctttggtcatactaatttaagctctaggaataaatattcttttatcaaagaatcattgatgactgggcactctgtgggtgggtacatgggacagagaatatatttttacctttggagtttatattgggggagggacaggtcatgtggagacaaacaatgcacaagtaaacaaatatataggatacagaaaatttcagatggagttttttttgtttgtttgtttttttttttttttttttgagatgaggtcttgctctgtcacccaggctggagtacagtggcaagatctctgctcactgcaacctccaccacctggg

SEQ ID NO: 106413 - DNA, 1025 bp, Homo sapiens
tgatttgcagtggcttgggcatgtattaataatgatggtggccgtaataggctctcaaatctcagtggttcaacagaataaaagtttgttcttaacttatgcaaagttagtagcacaggtatggtgagtcagtatgctcccctccaggttgtcattcagggaccaagtctccttctgtcttgtagctctgccatccccatctaactgggaacattttatgggtcaggcctagaagtagtaaatattactctgccactttccattggctttttctttttctttttttttttttttttttgccacacatacattgccctgagagggtttgaaaaattcactttatctgtgtcatccagaaaaaaggaaacaagttgtgttgtagcagtagaaatctctgttacagcataatttaaatgtgtactgcacatactaaatgtaagttgggttgatttaatgtgggccttcaatatcttttctattatctttcctctcttgccctggaatacaaggaggggaacatgtaatgaaagtaaatctgaactgtcttcctaaagggacatttctggtactttcgaaggtgcagactgaagacttgagtcaaggattgctgctcaccagactggcgagagagcatataaatgtgtttgtgtgtagtgtgcatgtatgtgttgcagtgaaattacagctttccaagtgtatggcattgcctttagaagcaataagaaacgttattgctgctgagtgatggatgcacatagaattgtgatatttgaaggaggaggttgctaaccttggctgttctgaactaaacatggtatagggtgtgatgcatactcagagacaggctcatttatctcttgtcctgttcagtgctgcattggttcttataactgtgtttattaaataaaactagaaattgcaatcctataaagaaacatttagctaaggctttcatttcttgtatacttatcagggttgctgtgtcacaacaaactctgtgcataccatctacaatgactgtcata

SEQ ID NO: 106414 - DNA, 1005 bp, Homo sapiens
gctactcgggaggctgaggcaggagaatcgcttgaaaccgggaggcggaatttgcagtgagacgagattgtgccactgcactccagcctgggcgacagaatgagactccatttcaaaaaaaaaaaaaaaaagagttgtaaaatgtgaattttccaagctatcaatgacatgaacataaactataatattattttacttcacctgaaatttgcagcattttaagtgcatggaattggtgacttggaaaactgggttttttgtttttttttttaaagaaatgtccagttttaagagattttctgctggtgctgacatcaactaataatgtttttactttcactctgttagaaaatgatttgagctacgatttcagagttgtaaagaaggaaatttttctagtcactggaaacctgccgatagaataaacatttttggtagtaaaaaaagagaagaaaattgccttagggataaacctcttagttttgagaaagactgtagaatctaggaactgccaacattattaaaatatctgacatacaaccctaagtcatcattttaacttcttcttcaccaaaacttttcaatgaatgtttcattttgcccaccttgaattgtctcaggatactccctgaagatagatactatcttacattgtattcatttatatctcttattttttatttgtacatgggtctgtttctatgatccgtgtgtatgtatgtgtgtgatatacatgtgtgtgtatatatacaatataataatctatattggcagtaccacactgttttaaataccaactttattctatgctttttcttacagtataaacccttgattttgtttgttttgttttttcaagttatttctgatggttcttgcttcagatgggctatagattaacttggccattttcaaatattggtgggattgtggcttatcaaaatttaaattgacattcggtaaaactggattttctttgcagaatgaatcaatatgaaactgaga

SEQ ID NO: 106415 - DNA, 1248 bp, Homo sapiens
acattgaatggttagatagtaatagggatacctacatcaaataactggcaatagttgaaaggttttttaactatataaactagggcaaggctatatctgccttatttgttgtttctaatcttattacagtgcttggcacatacgtgctaaatattcagttcttacgtggttgtttatcaataaagggaaaattgattcattcattttgtcattctctttcttttgggtttgtcacactttccccagcaacctaccttaagcattttatgagtggagttgtttcatgttcttcttttgtgtttttaaagtattagtgatttaaaaggcacctgccaaatacctggtaggtgcttggtgaatgaactgtcaaggtttttaatgggtgcagaaaactgagggaggtgatgggagagcagcttgtggttaccgtgttgaaatttaacaaataattttaggttatagatgaggacaaataacttaacagtgaggacaattaaaccgtggggtggcctcttgaggcaaacagcagagactgttgctttaggcagccaaaggcaaatgtttccactgggaagatgtctattgatcctattatcccgggacttgaaataacatttccattttccccttgaaaacccatgatgctgtttttaaaatcacatacttcatccttaaactctcatgcaaagctattacttgagttaaacctctcaccagaaatgtcttcaaggagtattctctctgtaaaggtgtatattgtggaagatgaaaaaaggaagctctctttggttctctgttacacggggtggctgctttgcaaggtgaatcacttcggagactgtgaaatatttcatgtcttataatgtattttccattatttttggtccataagcatgtatattaataagttgtacgaaatcaaatgtcagaggttcagggagacagttttgaaatcccagcattttgtgagtggaggttgtttcctattcttttgtgtttttaaagtattagtgatttaaaaggcacctgccaaatacctgataggtgcttggtgaaatgaactgtcaaggttttttagtgggtgcagaagactgagggagggtcccagtttgggatgtgaatttgggttccagatgtaacattaatttgcgctgtcaccttgagcaaagtgcttaacctttgaaagcctcagcttgctcatccattaaatagggataataatagtaattattgtgaagattaaagaag

SEQ ID NO: 106416 - DNA, 1140 bp, Homo sapiens
aagaccaacctgggtaacatggcaaaaccccgtctctactaaaaatagaaaaattagccaggtgtggtggcacatgcctatagtcccagctacttaggaagctgaggttggaggattgcttgagtccaggaggtggaggttgcagtgagctaagatggcaccactgcactccagtctgggtatcagagctagaccctgtctcaaaaaatagagagagagggacaatattttgcgactgtgctgtctagtacagtaaccactagccacatgtggctattcacattcaaatagatggaaaaataaaattaaaaattcaattcttcggtgtttggagtggagttgtttcccctttcccccagtcatatgttgaattcctaacccctagtacttcagaaagtgaccttctttggaaataaggttgctacagatataatgagttaagatgatgccatacgggagtagaatgggcacctaatccagtataacaggtgtccttatgtaaatgggaaatttggatggagatacaagcacacggggagaacaccacacaaatgttaaggcatggatcagggcaaggcatctactggccaaggaaccccccgaagattgccatcagcccacgggaaacttcaagaggggcatggagtagatcttcccctcatggctctgagaagggcccagtgctgctgacaccttgatcttggacttctgccctccagagctgtgagacaacaactgttgttttaggcacccagtttgtggtgtgttgttattagcaccccaggacactcatgcactcagtctcaccggctgtattttgagggctcaggagccagtgtggctaccatcttggacagcgaggacactgaacatggctatcactgcagaaaattctaatagacctccctccttcggggattccaggttgctcattgctccaaaaactcaagccaagaagatagaagaggttcaaatgattgtatgaagcatgttctttgtctggaaatccagaacaaaacaaataaatgatctttgaaaaaaaaaatctctgccttaaagttgggctggtcaacatgtccagatattcacagagacttcctgttctggaagagatgcagacagaggcttaagacagccttc

SEQ ID NO: 106417 - DNA, 1387 bp, Homo sapiens
taaacattgttcaaacctaaattgcgtttgttcttgcagtctttggagtacactgggccttttgcagttgggacaaacccatttcctctctcagtgggaaacactccaagtattcctcttgaaacaaaacgtcaaagattatttttgcagacttctgtggagtcatttttggacaacaccctggaacaggaaaccacagtttctcctaaatttgtacaggatggaaatagataacattcttcataaaaccatggccacaattaatgctttcaaatcaacataatggtggatggtttgttttttgcatttcttacctgaatagattatgggaacctgcagcatgggaaatttcatgaataattttacagggttttattttataaactggaaatgcggtgaaaagatatgtgtaggtgatgaaaaagagtgctataggattcaacgtatttgaaagctctccctgaaagatggatttgaaataaaacagagtctcgcaccctaagttatgggaatgagatttacgctcgctgactgaagcccaggtgctgctaaaggttaattagtgagagaatgtgatgaacttaatgaaataggtgatgatgcagtgtgagggaagcccacacagtcatcaaaagataaatgcactgagacattgtatttttcttttctttgctacagaggagtagcaacaactacacatagaacaaatccagaggagtagctacagctacacatagaacaaatcctgcgtatacccatagcaggtccggaaggactggggtgcttaactacagactttgctgggagccatcgttccataactgctgaaactccttttattttaggtctgtttctgcgaagtcctgatagctgagttgacttaagaggagttggactaaatttttaaggctactttatttttatgattgatttttaattattctaagcaatacatagttattttctctgggcgaaaagttgaaatgtttcatacaaacctcatttccttgtttcctaaccccagacccttctccccttcttctcaaataaaagctagcactagttttgtgcatatactactagtttgcttttaacgtgtatgtatgtttatattttcttaggaaatatttaatatcctgttcttttatttatttatttttattttttatttttgaaaccgagtcttgctctttcacccctgctggagtgcaatggtgcaatcttggctcactgcaacccccgcctcctgggttcaagcgattctccctgcctcagcctcccgagtagctgggattacaggcacccaccaccacacccagctgatttttgtattttttagtagaggtggggtttccgcatgttggccaggctggtcgtgaactcctga

SEQ ID NO: 106418 - DNA, 1071 bp, Homo sapiens
gcttgtccttgcggagcttacgttctactgtgggaaacagacaaagagtaagaagtatgttgtatgatgataagttctaaatagaaaacattaaagcagggaaggggggtttgagaaaatggaaattttagagaaggtgtgtgcgaggttcagaatggcccccataatccccacttccaggtattcacacccttttttagtcttgttaaacaaagagagctggtttgtgtgatcagttgacgatggcagaggtgacactgtgtgacttcttaagaccaggccgtaaaggaattgcggcttctgcctttgggcttactattgattgtttcctttggaacaagctcactccaatatcattagaacgctggggaagaactgaggctccaccaacagctggtaccattttgctggccatgtgattgaaccacttaggaaatggatcctccagtccatgttaagcctcagataactgctgacccagctgacatcttgactgcaatctcatttagaaaacttgtttcagaactgcacagctaagccattgctacattcctgacctatagagatggtgacagataataaatgtttattgatgttctaacttagtgagttttgggggatttagttacacagcatatgacaactaagatgcagagtgctaggaaagtctttacataaaatattccttttggggaattcactgtgacccctttgttttctcctccaagttgatgtgttctggggtgagctgttttccttctctgggctctaggaatggacacatgacccaggtctggtcatttaggttgttaagattgctttgattggattggagatgaatatgtggccatggccatctaatgaaagtctcctgtgctttacttcaaatggccacatcaaagtccttcctgtgctgaggcttctgtgcttttcagaacataagctcagaggaaccggtggccattcaaaagagaaaggcctgtttgagagtgcagccagcactggaatgcagaactgagttgacagcaagagaatgagatctcttgagagaacagcagccctgtgctgcta

SEQ ID NO: 106419 - DNA, 4834 bp, Homo sapiens
tttcttttgtttaggccactttgaggtgggatggtttcactttaaaccagtgccctgagttttcaccataattataaaaacattgagcctcggtttcttatctgtaaaataggtctgatttcacctattctcatctataggctgtgagaaattaataagggaagacaggtaaagtacctggcaaaaaattgattcctctgtcttctctatttactctgtttctccttcctgcaactatgtaccccattttgtttgttctcctaaggtctgtgcctgttcagtgtgtacacatacatattcatggacatatgaatacatgctttttaaaacgtgcactattagggaaactgtactggtgcactgtaatatacatgcagcattgtcagtctgctggcttatcaagcactgtgctagtggactagatatagatgagatacaggaaggtcttttcccgtaagaagagcagtctcatgtgagtgggcaatacttacctgaggtttaaactaggtatcaggtaagattatagctatttgaagatccacatatcctaaaaacctgtaatatgagggtcctagagaaggataatgctgacagtgtgatagagaaggttccgttatattgctggcttattaataaaattgcatattacaattttgaatttaagatgccaaattctatgttttagcatttttttctttggtgcctaaatcgcacatttgcattaatttttctagtagagggaatgccgctggtttatagtggtatgaagtatttttggagatggctgtgatttaatttcttcttattttcactgcatcagaaggtgaacgcagttactgagtggttctcttgtttgacaacaagcctttcccttgcctgttttgttcccagccttgtacttaggtccctaaaagtgttactaagctctctgggattgcagctgctgaccttaagacatgagccacctgtaaggtaaaagtaatagtatagaaagctttcataactgggctcttgttctagattagccgcctttccttttcttgtaggaattcttcctcaagcagttctctcagaaccatgggttttgtagtcatctcattgcagattgtaccttcagtgttttgtaattaatctcctctagactttcatggtgtagagaaagatgttctcataccccttccaaaacagcaggattcttgcccaagtctggtggttttcaaagtgtgttctggaattctgtggttgcttggagtcttctaaaattttactttctatattttggtcttccatgtaaaacttcaaaactcagtttcaagaaaagcttctaaaatagctttaaaatgttcatgttaaagtagactttatagtcttgtaatgttttactaaggggtataaaataatatgaaagggtaggccttttttttttttttttttttaaaagcaaagcactgatttaattatagtaatttcttacttttatttctctcttagtacttctcatactcttggtttactggtgcttcaggcctcacattaggaagcttgctgaggtgtaagcctgaggtagttggaatgctgtcttgctggggggctctgggaccttggaggttggcattaaaccaaggaagtgtggagcaacagccactagatgtcaaggtgttgtggaatgggggagtgggtttcccttgaattaggaagaaacagatatctctatatccctctggccacataacttaaattttacttcttcctatttccagaagaactttcccttcctcccatcatgttttccttattgattgggaggatgctagtgatattgatgggtgggtgctagtgacagtcaagtgtgatgccctcagtctcttgtacttacgtagaacattaagactaagggtcttttaaattgtaaaatacacataacataaaatttaccattttaaccacagtgtacctctcagtggcgcttagtatattcgcagtgtgatgcacccatcaccattatctagttccagaacattttaatcactccaagtggaagcctcatacccattgagcagtcactccccacttcccatttcccaccgccccggcaaccactgatctactttctaagaccaagaattttacaaggtattttagaaattacaaaatttatattttaagctctagcataagaacaagccaaaagaaacagttacatggaaacgaagcccacagtttgcaccatgatttcattcttcttttcatcatttctgatttgccatctcaaccttggttccaaaacattttgaaatatatccttccatactttttttctcattgcatgcatacaagtgtattcccgtattttgattcattttctgcactgtttataaatatagaactatagtgtacacatccctctgcaactagctttttctgaacaggttttgttaacatgtctccaggtcattaacaaacaactctaacttattcactctgtagctgtgtaatatttcataaggtggctgttccacaaattactcattatgctgctcttggaggccctttgaagaattagtaattaatgcttagaaagtcttatgaggaggactggacaggtagaattagcccattttgtatgttggggcactgaacctcagagggtaaaccatttaaagtcacataagcagtactgctatatgatgtcttgactgctgtcgctcaagctgatgactttcaagtcttctactgcattttctctacatgaggctcctttattttcaaagaaaaaaaatgccctttatgtgggctatttctttttctgatcatttcccatcctattttcctatttctgtgtgtgtctagtatctttttttttttaccccctctctcaacatagcctcatttagtatttggcagttttgcagttgaggtaaccaatgcctcatcactccagaaatctcatattgtaaaatctttagaattaaaaaatccttatacaactgaagaaaatacaagagagtttcaatgacttgctcaagttcatacagacctccagtggccaaggcaagacttgaacccacctcttgtgaattcatatcccatcataggagacagatacacagcagctcccacagcaacattcaacaactggtagtggctctctacagcaccatgtgtgaataaatctgagactttgattgattaatgatgtctgccatgaatgggatgggtcagggagtagactagagagataactaagtggtgatgcatgtgccatgggttgcctttgccccagcacagcgtattgacagtgatgattcttgagtgtgactcgataattattttatttcaagggtttaaaaggtcagcctggggaccaatcacaaagtcagggttgagatcctatatatcacaaggctttgagactacctgaccaacatgggtttaattactaatcctgcaaagactaatatagttcctaacgttttatccatgttttattagtatgctgatgttgaatgttgggtgtgtgttgttggcgtcttcattttttttctgcaatcaaatatggctttctttctcctttggaagaaatgacgtaaggtgggtgaaattgggctatcacagtctcagcattatggacattggggatagctaattatttgttgtgggggctctcctctgatatttagcaacatccctgcctctatccactggaagtcactgacacctccctcttaacaccaggtctttaatcttgacaacaggaaatttctcccagacattgcagaatcccgcctgtatgagaaccactggcttaaactgatacatgttttcaatgggttgtaataagttttttaaaaggtaattttctctatggcccatttgtattgtgggcgttggaatagtgacagaaaagcatgaaggaaaacaaatgtttattatcttttgtaaggcagtgggaagcttttcttttctatagtactgaataggaaagccacaaatacagaagtacattttacaacaataggtggcacactactaccagaagcctagttcagaaagtagatggagacagttttataagtgaatgtatttcaatcgttttttattaacagtattcccaacttcttcattttatttctcttaaaaaagcatattctgctttaacagtccttctaaagctaattttatttttaaaaatgagcataaatttgccatttgctttgcaaaacaaacctgcaatcaatatagtatttataatagagatgtcatataattgtgggattaaaccagattaactttgatgtcaattattttttcaatgcattatagaaaaaggcatttttttaaagcttttctggaatattaggtgttctgtatgtattttttaaaacaagtaaatggatgtttagtctctattagtacttaagaaacactattataataaatatgacttctgttgaaaacaggtcatgagatatcaattgagggtagctgaaaatagggcagctcaatgccttcttttcttttaaaaactcttaaacttttaattatgatgcctcagtgtgtatttggagaagactgtaagttgaaatttaaagattataaccatggtgcttagagctagcataagagactagtttattacaaactccttttaataaactctctgcccatacattgaaaaaataaatgctctccgttttcttcctgtttgagtaaatagcacttccaatgttttaagtatgcagagcatgatcaaagaatgaggagatggagacaaaaagttgctgagtgaatatttttatttttgtagttgtgtctctgacttgtttaggagttg

SEQ ID NO: 106420 - DNA, 1427 bp, Homo sapiens
tatactgcctcagcctctggagtagatgggattacaggcacgcaccagcactcaccggctaatttttttgtatttttagtagagacagggtttctgcaggttggccagactggtctcgaactcctgacctcaagtgatccacccgcctcagcctcccaaagtgccgggattacaggtgtgagccactgcgcctagcccattttttaaaattaaagcttttcaggtaactgttgtttcacatgcagttgtataaaataatacagagaggtcccttttatacttttcccagggtgtgtgtgtattaagttctacacaattttatcactggtgtagattcatgtatccgtcaccacagtcaagattctgaataagtccagcaccacaggcagggttgccacagccaccccccttccctgtccccatctctgtccccaacccgggcaaccactaatttatcctgcatttctaaaactgtcatttcaagatgttgtataaaaggaatcatagagtaagtagctttttaggattggcttttttaattgtctggttttctggacaatcatccaaattgttgaagatatcaatcattggtttctttttattgccaatttttaaaaatatagaatgttactttaagaagatcgtttaggaagctgagcctgtattatgatagtttcagtcacacaaggtgtaaagggaggtcgtttgctatgattgttgttctccagagtctccaatgagtagctttttcttagtggggaaaaaaaaaattggcacagtcactgcttctcaaagcttttgtcaagctgggggccaaaaacaaaatcccacgaaggcattgatcaaagatatcattgtaggaggaagtcctagagggcagaaaatgctgtcttccttttgctgtcttgccacagttccctgttattagagtcctgtcctttgtcttcaaagctttggagaagtgcttcacataaaagacaatgaagcaggggccacctaagaggcttgtctttgttgttgtttatgcagaaagtactgttctctgctattggcaaagtaattttcagctctagatgagcccagatcagtcacaatagttttcacaagcctgataggaaggcctagagtggtgttaattagtcagagatgggagaaggaggacatgtgttagcatattcaatcaatgcagagtttcttcaactggcatgggggcattcctcagcagtcactgctacagtagggcacttaatgcatgccgatgcccgtgggtttgattgcactatttaaattttctgccatgcatcccaatggtggcgaaatactgctgttttagagatgcattatgagttgtgaaattagattgaaagaaccttatgggggcagaattaagatatgacacaagcagaggtgaaaatggtaaacatttg

SEQ ID NO: 106421 - DNA, 3428 bp, Homo sapiens
agcattcaaggattttgggagaattaaggcaaatcccagggggattaggaaaccagagtcatttggttgtcccttgatctttctttaataaacgatcaagttcagctttgcatggtgaactgaatttgtttcagctcttaattttttaccttgtagctataattctctggctgctgttgctgtctttaaatccggttcaccagccacctggagcattccaataacacaggcgttttaaggttttcacttcaacatctgtgctttggaaattgagaagagaccacaatttaggaatatgctgagaaggaggcatggaagaccaggggttccatctcctcgtaatgtgtggtatctgttctctcattcttcccagattgctccacaatgttcctctccccacttctatttaaatggtccaggggaagctctgtcatgatatttcaatgtctcaggaaggcccaccatgccagcatgccactgtcatggggtcacattcagtcattcattcccttgctcacgtgctcagagaccattttatgttttgcctgttcctaggctgcatgttcaagcacttggctgtgtttgggtttctggagactggaagtcatttttgctgattaatggggatgatggtatttttgtccaggagcaaactggggagttgctttaggtatgtggccaggagagaaatgccttggatatttgtggggttaatactgggcttattagaatgctgtcagtcactccttgctctcaactctagccacccatgccaaacccccacaacaatagtgacaacaacagcagtaataatagcagctaccagttagagagctacatgtgaggccttgtttgagcgtctcatttaattctccaaaaatcccacaaggaatgtgttgttattttttacttgttctagctgaggaaacgggatattagagttctgagtccaaagcatgtgtcttgtaaatggtgaagctaagatttgaactcagataaccttgacctagtacccaagtttgtaccaactgtgcatcattccctatcaccctaagctagggagtaggtcgaattaagggtactaccttcatatggatggcccgatacctggtcataatgaaatcattctttcttggccttggtctctccacctgccgacagggcaggtggcagcaagctgcttacaccacatgagcatgacagagcccctttgtcttctcattggccaagttcttcttcctctcttcataaataacttcagatttcctagcccactgctctagaaaatgtatttcctctgatggccacacagccggagcaaccccagaaggcctgtggtgttgtgctgctctttattttctgccagctgcatctgtactcttctagaaaatgctgagattcagcagttgctcaaaaggcactgacatctaattatcatcctataggctgttgccacaagtctgcatagtgaagtcaatgctgagacaggcttcctttgccagtcagaggggctctggcttgtttacagatagaatctttaactcctttgaagggccagcgtgaggatactgggaaggttcctgtgggacagttttataattgaaccagggaactcctctgtgcctgctcatatgtgatatggataagtcatgcagcaccggtcctcctgcatccaggaatgggctgacattgatctgttcactcttcagggatgctgtctcaactacttgcacaggtataattttattatattacgctgcatattaaatacctgcacttcccttttcccatcctgatacagatgatttcattttgcccacagtaacacatgcttctgtttgcacgtgaccatgatcattttctctacctctaggcttacagaagggccagaggtggtgctaatcaggaactggaaacttctgaccccactgtgcaggctggagtagggttgaggctgtggctgagaaccagaaggagaaagcaagggcaagtccccattctagaatacctggctaggatgtgggggagagaggtgagcatagctcctttctgtaaaaattacacttacacagagcttccctggctttggaactgtttgctcttttttttttttttttttttttttttttttttttttgagacggagtcttggtctgtcaccaggctggagtgcagtggtacggtatcagctcactgcaactttgcctccctagttcaagcgattctcctgcctccgcctctggagtagctgggactacaggcatgtgccaccacgcccagctaatttttgtatttttagtagagatggcatttcaccatgttggccaggatggtctcgatctcttgaactcgtgatccatccgccttggcctgccaaagtgctgggattacaggcatgtgacaccgcacccggccaaagtggttgcttttattctaacaacgtctgtgtttgcaacggaagagagaccacaggagtgctagagcctgagttcagggaagggtttgacaggagtttcaaggcttcttgttggcggggtagaacatcatccttccagccaggagtagctcttcatcagattgcccgggattggaaagggatcagtaccagatggcctcctggccccagaagttccttctggagcagaacagagttttcttgtcgctatgattcagcaacagcaggcattgatggcggccccactgggtgcctggcatggcatcataccccctgcctcccagaacctgcggccctcctccatggccaaggagcaattgcatgtggagccataccagcagcccccattgagctgacttggttgcctgaagtgagaatggttaaatgggtaattgatggaagcaaaaagccaagggaaggaggtacccgctgggtaactggttagtgtaagaggctatgtgtgtgtagctgaagttgatcaccattccaaggcgagtcttttcccctctcttctttccctcctttttatttaacaataataataactttattgattcattgctttttttgaggcatgcattaagcccttcacatttattaacttgaaaaaataggggagttgagggcccagaaaggtaaaatgaagtacccaaagtcacacattttagtgagtggcaaaaatgggatctcagggcatggttcctatctcttgacaatctaagctcttcaccctgtacctcttttccatctctgcagccctctctccctctcttctttatagatactctgagcgtttatcttgcatccagttagcaatgcagtttcagagatagaggacataggacgtcccttacggaactcaaaattgagtttgcagagacaaccttaacctttgtaaggtgagggaagcctagagtctcatgtggtgtgtggggcccagggatgcgtttgtaaagcttgggtgcagtggtct

SEQ ID NO: 106422 - DNA, 1137 bp, Homo sapiens
tggcctctctgctgcctgatgcactgcgtccaacctgccttgagcctgggcattcaacactctgccttctttccctctgcctttccttgttcactttcccccttccaatctcttttcttcctccttttaaattttccttgtgtgagtttgattttaaaggttttgttgggcaaagtgaacacacttggcttatagaatcacccttagggtaatttgttacagaaaattctgtgtaatgggacagtttttttgtttgagtcagcacaaataaagcaaactctccagggttgtggtcaaatgctgtttcttacagttctcaaggtttctaagtccaggctctctagttctcatgttatttggaactcctttgggcattggtctttgtatctaaaatggtctcatgtttaattcaatgtgcgcatttataacaaggtctgatttgatgacttgttcagaagggtgttttttttttttgaagattttggtagaattgtatgattttctggtctttggactagtcacttctaataacttttttttggtgagtgagtctggtcttctccatagtttccacgcttcataaagcattaggaggacggcatttcacttgccgttccccatggtctaatctcctgctgattttattttaactctgagggatttgctattggtccagctttaccatcagttgcatctccatcaatgaggctgacctggagggactggattcaaatagggagcagcatccagttccctctacctagagattgccaacttctctgaagcatttccatgaaatttataatttaatttctattttggctcaagagcatcttggtacaaatccttgggtgtggccctcttttgtaagaagtacagaatgaaagaccatcttgcctgcaaactgtgtgcagatctttgtgagaaataaagtcatgtttcattattttggctgcatgacttaaaaaatgtcatgacccagaatgaatattgcttttcagtcaggtggttgcacgtttcaagatggctccagtggcttctgaaatgtgtttaccctgcgaacattccaaagttgtctgtgctttgtccagaatccctggatgccattcattaaccctcccctcccctcccctcccc

SEQ ID NO: 106423 - DNA, 1059 bp, Homo sapiens
agtgtaagaatgaattcgagctgtaaaaaatgtgattctttttctttttttttgaagagccattgggcaggagtaaattggtagaaccattttggggagctgtatatattcagtaaagttgaagatttctatgctgttaggatcaggtaatttcatttgtaatttagagaaattttgatacatgtaacctgggtgacatgtacaagaatatttgtaacagcagtttgtaagcggaaaactggctacagcctcaatgacattcaccaggcagtaggtgaatttgatgttgtttattcataccttgggagaccatgcaactgctaaaatgaatgaataggaccagcagatcagtgtggatacatttttagctttactcataagatgtcatatcttaaaacatctgatacagaaatagaaaaatatgaaatcatattttaaatatagtagcaaaaaaatatagacatagcaaaatacggaatcttattttaactatagtagtgactgtatggctgttgattctgttgtttctgggcatttgcagcatttcttacttttagatagctgtcggaaaagaaaaatactataggatgggttatgggttgcctttggcatttatttttaatgttatacaatattgtatttttgaggaaaataaattggtaatgtgtggaattgggtaactggggggaggggtagtttttgtccactgtattctctgcttattttttatttactttttaccattggctctctggtataagaaaaactgaatgatgattaagttcagttgacgcagtataaatgattagctaagtgatcagggctctgaggctgcctttctgggtttatgtcccagctctcattcttactggctgtgagataggaggcaagagactcaacctcctcctgccctgttgcttcccctttaaaattgttcagtagagcagtgaggattgaattggattattcctgttgattcaagtactggacagtgtttgacacagaataaatgttagctgtttttgtattattatagtttgatatggaagaaggaactgt

SEQ ID NO: 106424 - DNA, 1007 bp, Homo sapiens
agaatattttgcattttaatttgcagggaagaaaaattatattttaaagtccacagtttctggcttttatttacatattttggactactttggttatgcagggagcacagaaacatgccttagcatttggatatttattattttctaagtattaagaacgtggatgttctgcagcattggagagatgtttgagaatgctggcctggcctggccctcagaagttaatttagggtttttaactctggtgcaaatgcttaggttaccggcagggggttaataagtaaaccacagagaagccacaaaggtgcctacatgtggttgttgtgtagtttatcattagaccagaaagcgggggaaacagctgaccaaccaattcacagaaatttatcataattgagtggttaatgcaagcatactaaacagattaaatctcaatagtttttgtgtataccctggtagaaaaagtagtaactgcttacttgcacatcggaaacatgctcatgggatgttaacgtgtttgcatgcagaagcttatgatgcaatgagactgaaataatgaaaatgatgacagtaaaaaggagaaaatgtaaaatgcatgctagttggtaaaagaaaaaagtcttctctttgcttccaaggtatttaaactctgaacaaactgtgtgtgttgtggaatatattgggttagcgacctttcagaattaggaagaagaagttgtatttttgaatatagaaggccagcataattactcagagtacagtaaatgtccctatcattctttgagtttaatcttaacataattagctcctcgcacaatagagtgtttaatttgaaatgctgccaaggctcattaagtgagagaagtacttcctgagatctctgttgttaaatttgggattttttgtatgagataattttctcaagaagtgttagggtatcagaattgttgttcatattctgacatttatcacccaaactcactgaaacacttaacattttctgtttt

SEQ ID NO: 106425 - DNA, 1119 bp, Homo sapiens
gaggtcttcttttctttctttctacggttttctgtagttttcagtgtataattcttgtattttgggggataaacttattcctaaatattttattctttttgattttttttaaacgaaattgttttcttaatctcatttttaggttaaatgagattaatccaaaaactgaattttattcagtcatatgttacttaatgacagggatatgttctgacactttgctcaattagtttattggatctaatagttgtttagtagattttaaataatttctatatacaagagcatgtcatctgtgagcagaggtggttttaattcttcctttgcaatctatatgccttttattttttcttgcctaattgctgtaactagaacctccagtgcagtgttgaatagaatagtgagagtggacattcttgctttcctaatggattttagggtttatatccttctactatctgtatgtatatttttatcctagctcagctccgtatggtgctttgtataagcctttacgttataatgaaacaaatcaaaattccttttacaactgagaatgtcaaaaactgaaccaaggattgtcttcactacagcctatggtttttcacatgaagtattcacttcaaaaatgacctagtgatggttcctttgacaggtccctttgtatgcagctttactgcattctgtcatgagacagcaccactagtttttgattccagtaatacaatgtcacatctggcagggatttttaaattcatctgtttatcacatatttattgagtgcttatcaaataccaggcataattgatgttctggggaaataacagttaataagaaacttagagtcttgctagaggctgacagattaagaaattgacaaatgtaaaatttttagactatctccccactgctaccttttctagaatttgtattttagaatacatttagcaacggaccggccgtgcacaatggctcatgccgcacacaatggctcatcccagaacttcgggagaccaaggcaagtggattgcttgagctcaggagtttgagatcagcctggccaacagggtgaaaccccatctctacaaaaaatacaaaaattagctgggtgtgttggtg

SEQ ID NO: 106426 - DNA, 1004 bp, Homo sapiens
tggtaatgctatattggacaacacagtttggatctaccaatacagtggagcatttatagactcactcttttccttctctcctctcctctcctctcctctcctctcctctcctctcctctctcgacagggtcttgctctgtcacccagactacagtgcagtggcactatcgtagctctctagggacttgaactcctggactcaagtgcagttcccgcctcagcttgagtaactgggactataggcatgtgtcacctcacctttcaccacctttttgttgggtctaaatcttgggacctgtttaatacagagctggggtaggtagggtagattcttattcagccagctacactgatagtcattttcttacacttctggtgccttcagaatggaccacaggtagatggaagacaccacatgcacacacagggagagagggaaaccctggacactgacccaggacaactcgagcaccaccccctgacatgtcatgtactacttggagaaagagagaggagaacctatcatggaaaagttatcccacagtttagataacttggaagataacttcgctattcctgctcgatccttccttccaatttcaaatcagaagaactgtcttccttctgaggaagaaaagtgggtaagtggattcaggtggagaaattataaccataaccctcctcttataggagatggaggttaaaactgttactttttatggctacttgaggagacacacaaaagtaaacctttctgcattgagttttcaagtctcaatgactacctagtagttcatttacttacctatatttgtatattcctctttttgtagagagtatttttgaatattttggtttgagatcatggggaaatcgttgcactgatcagtgactaggagtcagtaagatagtgttgaaggatattgatgtctgatgttggatggtctacaacttgtcctgtatgccttccccgccctgccccttgccacctccactgctgttag

SEQ ID NO: 106427 - DNA, 1044 bp, Homo sapiens
gtgaggagagaaggaaagttgaaaaagaaaattcacaggacgatactctgctgtgatttctaagcccctggcaatcatttctttgctctaactaagagccattaaaccagttctaacaagagctctagacatagtgaaaaacacatgctaagaataaagagtccagcaaaactttgaagattttctcacttagagatttcccagtgtactgtttacaaacatgtccccagtcttgaagtgtattcagatttctttaggctaggaaaacaaaacaaaaaaccaaaccaaatgcagacacacaccagaaaggaagttcctttaccaattcatgaaattctgggaactttttatgtgagctgctatttaaccttttgattgctgtgtggtagttttggacagtaatcacattacgtggtttgactactgttgttttgcaaattctatgccatatattaccagaccttgattatggatgatggctttcagtaagttaaaaaaaaaaaaaggctgatggttaaatcatccatatttatttagggcaaaaatgaagacctcagagtatctttgcatatattctttattcttaaagaaaaattaatacaccactcatctatattgctgaggtcacattcctggaaatgcaaagatattagaggaacattacttaaaatctaatttttcacagggacaacgttatagattcagtcagagagctctggagaataccaaaatggattaaagtaagtccaagtaaaaaaaccaaaaaacaacaaacatagagccaaagtcaaagacacagaaggcgctaaaataggtattatgtgatggtgaatcacgtcttcctctatactgtgaagaggttttggagtacctttgtattattttataatttcaaacttagagaaaagttgaaagaaaagtacaaaaaccgtctgtatacttttgatctagtttcactaatttttaaatctttgtgtgtgtgtgtgtgtgtgtgtctgtctgtccgtctgtgtgtatttattagtgaagttttagacgtattat

SEQ ID NO: 106428 - DNA, 1004 bp, Homo sapiens
atgttttgttactttacatccatatgaaaagatagctctttgttttataattagtaagtacttttgccaactttgatgagtttaatattacattttattcttgaaaatttgatgtttttacggatagcaacttttttttccagatatatatgttgcatgtttaaaaattttttaaggctggttgcggtggctcatgcctgtaatcccagcaccttgggaggctgaggtgggtggatcacgaggtcaagagtttgagaccagcctggctaacatagcaaaaccccatctctactaaaaatacaaaatttagccaggcgttgtggcatgcgcctgtaatcccagctactcaggaggctgaggcaagagaatcacttgaatcagggaggcgtaccattgcactccagcctgggtgacagagcgagactccatctccaaaaaaaataaaaatacaaataaaaataaacttaatctcagtgacctttgtcatcctccatcctaccctgcgtttgatcccagctggcttgactctatcccttgaaagaccaattttctgaatcccctgaaagacaatgtggagattttctatgtgtaaaccatttaattttagtctgttcatggaaacacatctctacagatttaaaagaattgtttcattcatagccattttttggtgaatcaacctgagaatcacctaatgatggtgaacggagacagaattgaaagaatgaactttaaggtcaagaatgttgttacagatgcttaccctctggaaagcacatgaggtagctgagagcagtggagatcatcagaggctagttttaaactagaaaacgcattttaatctaaagagaggcaaagtgttttgtaagccattatacacaaagtacttcctgaaatatttttgatcctctatcatgggaaggctcagtttcttactgtaatgaagatagtctgtgtaagatgttcacctacttttgtgttgttccttgtggaaattagcatta

SEQ ID NO: 106429 - DNA, 1252 bp, Homo sapiens
ggctcaagtgatcctctcacttcagcctcccaaagcgctgggattacaggcatgagccaccatgtgatttcaatgctgaaataggtacctgggtcaggcgcggtggctcatgcctgtaattccagcactttgggagggagaggcgggtggatcacctgaggtcaggagtttgagaccagcctgaccaacatggagaaaccccttctttactaaaaatacaaaattagccgggtgtggtggaacgttcctgtaatcccagctactcaggaggctgaggcaggagaatcgcctgaacccgggagggggaggttgcagtgagccgagatcgtgtcattgcgctccagcctgagcaacaagagcaaaactctgtctcaaaaaaaaaaaaaagtacctgggtccctttaattgattattgatatgtatgtgtattaatgaatgaaataaaaattggggctcactttgttcagtttttaataagaccatcttaaggggttaggctggttaataactaaagagtagatacaatacagcataagaatcaaactcgattcaaaaccttcattcccagtttctaatgcagggatgtaacagatgttcttacatttagactgttatcttgatgggtggcacgtcattatcgtcgactgctgatgaggtgcagatgaatgctgctgggagccatgtgtgatagtggaggaagttctaattggagtgctctcagtacagaaaatttaagaatttatcaatgttttaggagatagcatattttgggaaagtcagtgtgtctgcaagctgctgaaagatgttcttgtagacttgttgaagaattatgaactgcaggatgccagtttttgaaatcccaattcctttggtaataagtataaaaatagccactataaattgagccccaggtactgttaaactaacttaattctcataagaaccccataaggtagtcaatgtcaatatctctttttagcattttgggcaaagtagatccagagtgattacccagagtgattgattattgactgtaggtggaagagcccattatctaccgttagctttggtagtcttaaccgctatggcgcagctgcctctgcagtttggatggctcatacaaaaatccacttgaggactgggtgatactttttttggtaagacaggttttctttcatctaatgaggtatgttttggagtctttatgtgaaacattttcttctaaaccatgattattaagggcaggagctac

SEQ ID NO: 106430 - DNA, 1059 bp, Homo sapiens
tggtgggggtgttatttgcagagaaagcagctggcactaagtttacaggctaattagaaatggtcacgcctctaatcccagcactgtgagaggctgaggtgggcagatcacttgaggtcaggagttcaagaccagtctggtcaacatggcaaaaccccgtctctactaaaaatgcaaaaatcagctgggtgtagtggtgcgtgcctgtaatcccagctactgggagctgaggcgaaagaattgcttgaacctggaaggtggaggctgcagtgagccaagattgtgccacttcactccagcccgggcaacagagcaagactctgtgtcaaaaaaaaaaaaaaaaaaaaaaaaaaaaaaaaaggtcagcttttatcttatctggtgctggaggagttggaaactatttaaaagagtaaccaaatttaatctgaaaaagatggtttactctgttggcagctgagaaataaaaagactggagtaaaaattggaaagagttcattagtaataacaaaacatttatttttgggatccatgctatggtttttgacagtcatctcttatttattttcatttttctaacagctcttagggtgaagaacagtcattaattcccctttacagataatagagacttactaaaggtaatcgcctaacttaatgtcacccagatattagatattaagtgtcaaaactgtgatttcaacttgggctttatggctccagcaatgaggctcttaaaacatggtcacaaagaaaaccttcttccttgggatgaatcagatttgagaagatcaagggagtaacagctacctttgcccttggagatcagatccacttagtagctctaagttattaatcttgcttttatttttttttttaattgtatgttagcgatccttttgttaaatgcaatgctagcatccctctctgtcaggagtttgaatctcagcaccattgatatttggggccccataagtctttgttgtaggagggtatcttgtacattgtggaatggttagcagtatctctgggccctctgcccccatagctgtgacaacc

SEQ ID NO: 106431 - DNA, 2232 bp, Homo sapiens
catgcctggctgtatacatctttttaaacattgcacagaggtgctccggcctcattgtttgcccttatgctgctgcttttttctgtcttcctcttcttctgactttatccttgtttctcttattgtatctctagaggttatgctttagataatttgggcaagaaaagttgaagcaggttctattagatgatacatcagaatcatctgagttcatatttaaacctagcttttctggtttggcagttgaaataggcatgataggttacattgcgttgttttgcccaggcattacctctcctcattgtatgatttttgcaatggagtctcttttcttattgaataaagcatgtggcaaaggtctttaaatggaaagaaccttcttttgatggtctacttgctgttgaagtgaataaataaagaagaatgaagagccaaaagaggaattcaaaaagaaagaaaatgattctgttgattctggggtaagattaatctgacttgagccttggttctggaaataagtaacattgtgtccctggacaacttgctcaatcccttgttatttatttgtctgtctgtctgtttagagacagggcttcactctgtcacccaggctggagtgcggcggcgccatcatggctcactgtagccttgagttcttgggctcaagcgatcctcccacctcagcctcccaagtcactgggactataggcacattccaccatgcctggctgattttcactttattttattttttgtagagatggagtcccattctgttagccaggctgtaagttttttaaatttgtgaaatggagacatctctctgggtgggttaaatgaaataatacaacttacctactctgcctagtgcctaggttccttgtgtgccctccataaatgatggttagttctgataatggtgtgttagttacacatggaatgggtgaataattctgacagggaagaagaatgaaaaataggaggtggttttggaatgattgctgagacagaattgctaatatttttaggtaaaaggaacgtaagggaaatattttcaggaaaaaatccaaaatgactgaaacagttgtgtttgagagtgaacatggtgaaaacttgtgccttgaaagtgatttcatatggccttttaaaaggccccttcaggagagagagctgtcggtttctgctttggtgtcatttcagtcttgcttggaacattgctctctgttgttgtgctgtctatggaaaaaagggtgaacctccagaagactcaccaggaatgggtcccaaaccacacttccctggagactcatcggggaacacctgctactggattttcagaacctgtttgtggattccaattcagtagatttgggggcagggggacaggcatctgtatatagtttgaaacagagatcctaggaaattctgaaatggggccaatgtgtcagtgggattcatcgggatgtcgtgggatttagcagctgtagtagcatcttcagttctgctaccaactttgtgtgtaaccccaggaaaatcacttaacctttttgtaccttctttaactcagccttctgaaagaggaggcataagggataataactctgacctactttacatcgttgtgaagaattactttaaaaaatgactgcaaagcactttgcaaatagaaattgctctataaatgtctgttttttaaaaaatgtaattttctaacacagttttaaacacaaatagtcttgttgagtgcatcagctcaaattacaagtatcaaatgacatggtatgatggctagaaatagtgtttttttttttaaatacccaaagttagaggcaataaggaaacaacacaaggttgtaatgtcgtcgtttatctgtatcatcgttaaaaaataatgctgacgctaacctctacatccacattttccggtttgttttgttttgtatttttaataggctactcccatgaatttgagaatttaattagaaaaataaatgacttctaccattgctgctgtgctgttaattctccccctccttcccaatctctcaatgaaaggcctgctcctcctgtcattagacacatctgtggatctgttagaagtctgtaaatggacgcacacctgcagagttggcaaagactctgtaagtccccatcctctgatgtaaggtgtgttttcctgtcattcatccatccctgcaggagcaccccaaacacctcctcttcaaatctgct

SEQ ID NO: 106432 - DNA, 2466 bp, Homo sapiens
aggtccacggattgtaagcttattttccacctccaaatttggtggcaggatggttgaggtggtaacaaatatcagacaagttagaggacagagtccatgtgaattcagaacacataattttaggcacttgtcactatatgtgtgtactgtagttaaaaaaaaaaatcgtaggtggcagtacagaatagttgctctggagtgtcaccagccaggtaaaaatcctggtcccgctgtggttttaggcaagggatctaacctcacgaagcctccattacctcatctttaacctgtggatgctaacagcaataatctcataacaatgctgtgaaggtcagtggaaataagcatagaaacttgttagttcagcgcctggaacatactaagtgttcaacatagctgagcgctcttaatctgctgacaaaggcagtggtgcccttgtaggaatagatggcaaaccatatggactaacgtggatttcagatgttctagtagtctacatttaaatatttttaagctcggctaccaataaacttaatggcttatgttttgttgggttttctcttaagttatattttgctaccatgtctgtatatatctgtagtttttcatacagataacacagtatgatgctttgtgcatccttcagcagtgtgttattgcaaacaaggagtgtgaaggttgggttggtaagcaaagaactgcctccatatttgagttctgtgatgcaaaaaagttactggatggctttcaactcttaattaatgtttctattgactgctgatgctaagaaagtattatcacttgttccctctgggtggtatacactgagatgaggtagataagaacaaccttggatgtactgtttcagttcccttggaaactataaatccaaaggtgaatttgcacgctatgtgcaagatgtatatgcttcccaatttcaactgcagttccctcagtccacagagaagtgttcttgttttgtactgtctattgactgggctaagcgttaatagcatcccagattcttcaatccagcaagctttagagccttttcacactgattctgagataagccaatttgccaactgctttcctagggtgaccacctgctcctggggtctgaaccatctgattttagataaattcaggctccacaatttgtagaatgccatttctttttcctttactttgtaacattgatatcactgctagatatctggaccttaaaaaagtaaaagaaacctctttaataaaaaggatgttttaaaatgatattacctgataattatgcttgcctatttttatacctcttcccccatttttccttgatgaaggtttttgtcttgtaatgaaacgtggtaataaagagcatattggatgggaaggtactctattgtcctaccagcttggtgtggagaaaataaaacgttaggtatacactgaattgttggttatcacccagtatgaattgtccttctcaccatggggtgtaccatatgcagactgttagcctgctctggggacctggagagatgccacattcttctgtttccaggctgattggaactgaaagggttgggcatgaatgttagggtggcctaaggtagtctttctgcctgcttgtttggaaagaattaggtgggagaacatgctgagagctactttccattgtatggttcttaatacctcagggctgattatagcattggagggagaagcaggtgcttgctagacaggtgcatgtaggcccaagggaacaaatgtaattcattgagccttagtttccatcacctgtgtattaagattcatcaaatggaagacgcccttgaatgtaagacctgctatcttttatgtacccctaaggaagaaaactcactaccaattaaactgtgctatattgctaagttaccatcaataatagtatctgtcctgatttcagagataaaagatgtaagttgtaaaatataaaagcacttatatcataaatttctaaggaccacattagatagtatacctgtaaagtatcagcagtgtcttaacatatagtgagcactcagtaatcattaactgtcttctctcagccctctctcctggtagtatttggtaaatacttcctacctggtaaatctttattgagcatgtaatatgtatctatcattgttttgtgtatctggcatatatcagtgaacaaaatagtacatagatcctagctctgttgcttatttttgatatcagggatataatgtggacttagggacctgccatcttggtaactaggagagtcgcccctcaactcagctctcctttcccaccaggggctgctttacttggccttgtctttggggttgaatgtgtgtgccagtagcataggcacatgtaagacctgccaaactccttccagtctcattgccttccagtgttttctgtgtaccttacactctgtctaagctgatggcataccttgcc

SEQ ID NO: 106433 - DNA, 1924 bp, Homo sapiens
aatgcgatactgatactgcagtcacgtggctattggcttctttttttatttttagtttttgagacggagtcttgttctgtctcccaggctggagtgcagtggcacaatctcggctcactgcaacctccgcctctcgggttcaggtgattctcgtgtctcagcctcccaagtagttgggattacaggtgcctaccactaagcctggctaatttttgtatgtttagtagagacagggtttccccatgttggccaggctggtctggaactcctgacctcaggtgatccacccactttggcctcccaaagtgctggggttaattgcgtgagccaccgtgcccgggcctggctgttattggcttcttaaggaagcccacttaacagtaattactggccaaagatacatgtttttattaatgcaaatcagcatgtcacactgaattatataaacatatagtgtgtatattaaacaaattaagtcatgaccttacaatcaggtcatatggtggtctgtacttaattatttttatattttattaacaggaagtgtgtaattaagcacggatggctcttcccacccctttcctttttacatatgtctgttctgtcttctcacatttctggactgacttaaacttgtcagccagaaagatggatgtcattcaggtattggcaggaagagatgcttctgtaaatagtctctttcacatctgggtgttcagttttcctgctggggctgagagaatctgatgagctttgggtatttctttccacagccgggactgatccagcctgtgcctcctctctggcgtaacctcatcctgtccttcctcatttttaacacccaagtgcagctgcaggggctttcatccgcctcagacttgccagtacccaccacttgaaactgggccctgctgtgattgtaagtctccatccagaaggagctgggtttttttctcaggactcaagagactgtgaaagtctgaaaaaattttgtgccaagagaaagaagtgcaaacatcctctgttttctgtctctaaagcagggtcagtggtttccagtgctgtgtttttatgtcatttgactaaccatctccctacaggcccaagcaaatgtgggcagtgcagatcaagcctgcttcccaggactttttgagagtgacggtggtacagtatttcactgtttgtagcatgcctatagactgccaatttacaggatttaaaaccttcctggcagatgtccagaggcctctggctcatatctacctagtttcatggttggctttctaactcttacataacagctggggtttttcactacatttaaattgttactcagaatttaatgtagtctttctaaaatgctgtcccctaggtggcttaacaaaggtgtaaatccagtctgtagaagccaagaaaggcattgcatatgagtatagctggtatttacatttcacatatgtatttttttccagttgacaaaaatcagcccagtaattttaccctgggttttcatcctagtaaagaaaattgttaaatattaccaaagtataaagtgatctttgattctaattggaaagcctttttttttttgatgctcaaaagtaatgttgtaaatgggtagaaaattgtccatttggttcctgctgtctgtcttttcctgcactttgatgaaggaaaggctttttttcccccagtccctagaagacctcaaaggagctgctttttgaaggaaaaggcttcattctccctgctcgaaagattgccacactatagatatttgaaaatcagatgcggtaatcagaaagctattctgatagtctgactgctctgccgatacaggttatattactctcacacaatatgttatcacgtaagggctggggaggacatacatacttcagtgggtaaactgaggttagggaca

SEQ ID NO: 106434 - DNA, 1054 bp, Homo sapiens
gagttagatttttaaaacgctgtctgactactgttgctcctggctacaacattaaaaaaaggtgtcctggttttcttttcaggaaagagcgatatttttatttttttcatagaaaacagaattaaaccaataaatgaagttattacacttttgagttggacaacttaaaacacacaatgtttgaaattataaagcatttttgcaagaagttgttatttggggtaacatattctgtcacagtatgctacttattccttctcttccccaacttcccccaccccttttttttttatataaatggtgtcatagtaaatatttattatagaatatgataactactggcctggttcttaatgcctggtttatactcttgctaagaaaagctcgagggtgactctcaaatctcaggctaattctaaaaccaacaattgagaagcctcctttctggatccaaaggcacatggtctctctcccctgcctccatgatcaaggaagacatcactagttgatcaggccgtcttcccagcagagcccagatgtgccctcctgattcttctcagcattgctctgaaagctgcctccatcagtcatgtcgaattggtactcacgatgaaatctctttgacatccttgaataaaagtgtgtttttatggaaggtccttttatgagcaaaaccctgtgctgaaggggattgcagaaaatcctttcttctgggaatttataagtctagtaaggaagattattgcagcactgggtagaaccataagcaaaatgcagacaaaagttcctgtaattaagggaacacagatgataacgattggcctggaagaattcttggttgctttgatcttatctgaaatcggactgtcagtgggacttctttctcaattgtggtaaagctaaggagccgatttcctttgtaactgctgagcagagaccaaggtacaggtctgaaggaacttataaagtcagtattttggaactggatgcagcggctcatacctgtaatcccagcactttggaggccatggtgggaaaaatcacttgaggccag

SEQ ID NO: 106435 - DNA, 1052 bp, Homo sapiens
cgtgtattgatccatcccattcttacccattccccacagggagacactttgtttgtcctgatgaattttgcaaatttagtgaatttgtttgttgccgaatgtcaccaaaatgtgctccatcacttcctaggatgactctactgttgctctgcaccatctctgtttgaacatcaagagtcatatgagcttaccaaagattctcattgcctcgtatcctaatgttgtccaacccagtgggtatgaaatggtaactcactgttttaccttgcctttctcttgttgctggtgatgttgagcatcattttacacctttaaccactggattttcctctcctggatattgcctgttccaatttgttcctgttcctttcctttctatgctggtagtgactgtgttttcttaattatgtttaagaaattgagagtgaagccagccttgtagtacctggtgcaggctttgtgtctgtgagataactcccgaggctcctcctagaatttctttttgtcttttaacaatccaaggctgtcattttccctatgctgttgattcccacctgctttccccacagaaccccctgcctctgttcggtgcagccaggaggaaatctgagcaagccccagacggtccctgctttgattaaaactgtcaggggcttcccttggcacttaggtggaaggcctgaatctttgccaggtctcagccccacctcccatgattcaattcttgactctggttgtcccccattctttatgttctggccacagaagacctctgccttattcttccagcaccttctctgggctcagcacctcttattccctctgctgctcctgttgtcctctctgcatcctctttcacctggataacgtctactcttccagtttctcatagtgtctttaggaaagcccctcttgaccttcatactcctctctcctatgacaacctctatttccttctttcaaaccctttcaatacttatgaactgatacttaatacatttttggtttcaagacaaagaggggaagggggcagagacatttcccttgtgaac

SEQ ID NO: 106436 - DNA, 1172 bp, Homo sapiens
ctttggcttcctatgttatttttactaaatatttgaacctatttttccatttgggactacttttgattctgcttttcacattcactatgaaaatacatttaattgcatttttcttgttgattgaataaatatacttaaatacatatctttctgttaatattgtctacaagtgtatttttaataggggatgtattttacatgtcattaccttaaatgtcattatataccatgctgctgcgtcatggtttgtatgattgtttccccattttgaagcattgttttcaatttcattattttataatgaaatgtaatatttcttggtataaattaatttcttttttccccaagttacttctttgaaattactgcgtttgaacagctcttattaaaggctgctagatcatttaaagaaagattgaagttggtttcattgccagcagtgtgtacctgtttatctagagctctaccaaaaattgaattttataatttcattgtattttaatagctgtgaagtgtaactttaaagttgtttcaatttgcatttctttcactcctggtaaatctgtgtatttttcaccaggatgatttacgcccccaatttcttctattttaattgtcagtgtgcatcatttgatgtccttctaatgtaattaaatcttttctttttgtgagtggtgtaaggagcgagtcctcaggatcttatctagctgccttctatttttatgaagtatttttgtagcctcataggatttccttctaagagtattccttggtactcttagaaaatgcgcaacagtatagtcagctttagaaataccccttctttatatataatttccatgggaatgtagttatggccccttaccactattaagaccaaaacagtcagcaaacaaaacaataactcttctatttacttgggtgagaactagcccactgagaaggtaggaggaatttgcataatgaagagggtgttttcttggttcccttttaaatttaaaaattactcatggatttgcattctgtagtgtctcagcatcatttagaattaggctttgcttactgaagtcaaactgcaaagcttcacttatgtatgacttaattaccctttaatgttaaaaagaggaaaaagtaaagaaaaaaaatcctttggaattggtcatcatgattga

SEQ ID NO: 106437 - DNA, 1673 bp, Homo sapiens
gactttgaatttctgctccctgctcatttctagagaaatgttccagagaaatgtgactcccggcaatatttggtagctccttgccatctggtagtcatcattgactgcgtctctttcctgctatgaatacagcagtgtaggaggcagatacttgcctatgtccttgttttcacgttccgagtttaagcatctgaaagtattcttcgtaaattagttagaacggtcttggcctttatgaataaacatgctgttctgaaatgatactagttttccccctttagagtcaagtaccttcctggtttcattaattcaatcttcttcctagcttatttccaagaaattacaatattgacccatatcgaggtataattacctcaatatgtaagtaattttaacatgtagaaacaggttaggaaagatacacacaaaacaaataaattgtcatgaactctcctttgatgaggaggatgggcataggcagagaggaatacgtgggctttatatgggatgcattttatttttctccaaatgttaccatattgtttgagtctttttaaagcatatctattacatacataataattaagtgggctgggtgcggtgactcacgcctataatcccagcactttgggaggccaaggcgggcggatcaccaggtcaggagttccaggccagcctgaacaacatggtgaaaccccgtctctactgaaaatgtaaaaattagccgggcgtggtggtgcgtgcctgtagtcccagctactcaggaggctgaggcaggagaatcgcttgaacccaggtggcggaggttgcagtaggctgagatcaagccactgcactccagcctgggcaacagagtgagactctgtctcaaaaataaataaatgaataaataaaaattaagtgggcaagattttgaaacttatcttaagataaatagctctgtcggttctccatttccttttctttgcatgtttggaagcagggcagtgtttctccccctattttcctgttctgtgttttctgaatatttcagaacatctctctcacttcttttctgttgacttcaatatggcagtggaggggtagttgagctgaaatctgattaatgtagcaagagacggtgtcaagttagaggaaggcattgttgttctgtaattagagccgtgaaatatatcttatttgtcatcatcttattattctttggcctgtttctagagatcagcacaataaagtttgtaaatccttgttcagaagctatagtttaagccttgctgaatgaggccttttaggaacatattttttctttctttcttctttctattttatttttttgagaagtccaggaagtatctgattatgtttcagatgctctatgtaaatggaaattaattcttcagcaagaagacgcaatcacagagggtaagattggtgtttgcaaagcatcataatatcacttgatttaaagtcaaatatctgaacctgaatactataggaaatcccaaatagtgacactgagtttaagacagcttgagttgcattttataactcctggctgaacagcacaaataattgcagcccattcctgaattaatgtgtctgggtgtgggtcactttgcacagatgagggaaaagtagtcaagtaaactattcaactgcttttaattcttatgcat

SEQ ID NO: 106438 - DNA, 2131 bp, Homo sapiens
tcacttgaagccaagaggtggaggttgcagtgagccgagatcacgccgctgcgatctagcctgggcaacaagagcgaaactctgtctcaaaaaaataaacaaataaataaataaaagaagaagaagaggaagaatccaagcaggcattgataaaggacgaggcaaactaatgaatcatgtagcttagagatcagtaaaacagaagttagaagaagcagtttatagaactcttgaattttttcccctataacttggtcagtgataaatgagatgaggaggaaaatatgaggcaaaggcaggatggtggagagaagttccaaggaagacactaatcaaaaaaatacttggattgagaccaggatagaatgatggaaattttgatgtcaatgtgaaagtgaggcattctcaggggactaaatcagagagaaacgagaattaagtacaagttgttcctaacacatttatactcatcaggcttataaatgagaaaggaaatcagttattgaatgggaaatatgtatatatatatatacacacacacagagtatatgtacataaggtgagtatatgtgtgtgtatgtatttaattctcctatgatgcattgtggtactctgaagatactgttgggtgtttgagatactaattattcttttggagccacatgtaaaaataagaataagatcgccctgtacaaatagtactgaggataggaaatagtatggaaaagctccttatatttagtaaaagccatacatgttgtctaattattgtaactttaagctcaaaaatcacatggccaagaaaggtggcaaggatagcttcctttactcctttaaggttttgaaagggctgtatttgaattagataccacaggtggactggggagcggtgatgggaaatgcccttactgtcactgaatatggcagggatttaaaccatttctcgctacctctctcctttgtttttgtctgacacaggttttatattgccagccaacttatccttattgatttgttttacactgtgagtcaaaaggctacctcatttcctggtgggagatcgtggttctgtaaatactcctttatccctttgtaaatgctgttaaaggcttcttgaggagaattcggtggttgtgagggtgggactaggcaatctctgtagtcccttcccacagtgtagtaggagagttggttttgcacttggttccctgtgcctaaaatgttcccaaaagtcggggcattgatgcttgtaattcctgtgattcctgcattcccagtcagagatctgaactagcatgcttggtaagcattgcttttgaactgccaaggagtactggtttttacatggagtctagccatcagataccggctcatctcctgcttcattttcggtgctgcgttgaggttggagatacagatgtggttgatcatgcacagttaagtaggggagtgttttgggtctctgcaaagtaaggatgtggtagaaatagcaatacatctagagaatgatcacatggtgagtctgtttattagccaacaaatagaaagcaaatcaaaatgcagacagtatccatgtggtcatctgcgatgtgtgcatctctatgccttaggtgaaattccagggtctaaacagctttgtgcctccctccacgatggagtttcctacttaatgatgagcatgaattggaggagggttttgcccacagctgtcacaatccagtaggggtcactggtccatttggggagtgaagatggacaaatgggaatggtcctgagcggtcccattcatctccctagggaatcatggttgcatctcgtcatggggagggttttctgtttcatgtacctcctctaaaggaagatttttttttctctgattgatttatctgtggacctgcttatctactgttctacctagccatagagtttttaaataaaaaagtttctggaattgcttaaaaacttgttacatgtgccttccctcacccttacctctgcagctaagaagcctgtccttacaaaaggcgaacagtccagtcgtgggcaaggtttaagtaaaagcagtcactagtagctgctgtcttctaatcctattggttacccaagagaagaagaaaaatcattatatgat

SEQ ID NO: 106439 - DNA, 2816 bp, Homo sapiens
tgaatagctgggattacaggtgcgtgccaccatacctggctaatttttgtatttttggtaaagacagagtttagccatgttgccgaggctggtcttgagttccagaactcaggtactctgcctggcttggcctcgcaaagtgttggggttacaagcgtaagccaccataccccacccaaattaacctctttaaaacattatttctatcctgctctattcccttatgccccactacgccttgaattttcttcataaagattatccccactaggtattgtatcattgttgtctcacactctccaatagaatttaactctttttaccctgttcttttcccactgcctagagcttagtaggtactgattaaaatgtattaagttaatgctgtgacataccagctctgacttttccataatttgagcccattaactattgtgtcttccccaaacttcacaaaattaatcattattttgcacgtgtgtcagtggagaccctgagctgtgtgaaaataagcgatggctttagaaaagtgctaagaattgatttaaccgtacatcatatttgctgttcctatgcatatctttacttgctccgtgaaatcgccagcgttttcccaaaagcagacactctttttttattttttatttttattattattatacttcaagttttagggtacatgtgcacaacgagcaggtttgttacatacgtatacatgtgccatgctggtgtgctgcacccattaactcgtcatttagcattaggtatatctcctaatgccaacccttcccctccccccaccccacaacagcccccggtgtgtgatgttccccttcctgtctccatgtgttctcattgttcagttcccacctatgagcgagaacagttcccacctatgagcaccaccatgtccagtttattttttgtatttttttttttttttttttgtagagacagggtctcaccatgttgcacaggctggtcttgaactgttgggctcaagcattttgggaggcccacctcagcctcccaaaacactgggactataagcatgagccactgtgcccggctttgttggtttttctatcactatgctattatgctataaaatatagtaaaggggatgtattaactgttaattttatcaagtaaacgattcatcttcgagaataactaggagaaacattcatttccattatactatttgctataagacaatttcatagacatttttagaggtttctttaagatatcctgtattagttcttatgctatagaaagctagggcttttcccatcgttggatctcctactggattttcctttttttctgctattcaaaatttatgtttcctcttgggctcactttcctttcctcaaaggtgtactgctgtagtgtgttctctctgtgccatggctccagttggccggcagtcaggtggcctgtccttctgtctgccagaatggtcctgtgaccatgcagatcctgacctgcacttgcaggtcacagggtcagctgcttctggatatggcaagtcctaatttggaaactggattccatcctgcctaccaccagcccagaaggaaggaaatggagtttgtggtggaagaaaaccggctattgttattaacaggaggttatattaagcactgtcatttttagcacattctaaataaatgccttatattgaagagccagagaaggaaacggaaactttgaagcaccttgattaaaaagtatgagcttaattacaattggcacaaattgttcagcatctcccacgtgctgtcactgtgctgagtacttacatgtagtagtgaacaagacagctatggaagaaataattgctcctgctgaaaatactatggcagtgaaacagaagatgggatgaagtatttgagtaggtgatttaatcctctggtccaggggtcagtaaagtttttctgaaaagggccagatagcaaatgttttaggcttgtgagggtcatatggtctctgctgcaactatttgtctttgtcattgtagtaaaaaagcaactgttgtggactgaatgtttctgttgctctgaaattcatatactgaagccttgctccccagtgtgatggtatttggaggtggggcatttgggaagtaattaggtcataagcgtggagctctcataaatgggattattgcctttgtctaaagagtcagaagagagatgatatctgcaagccaggaaggttatattgaaatctttgtaagaaccccacagaacacactggtcccctgattttggacttcctagcctccagaactgtgagaaataaatttctattagttaagccacctagtttgtggtattttgtcatagcggctcaaggtgacttaagacagaatcataaatagtacacaaatggacatggcttctttcagtaaaactttatttataaaaacagatggcagtctgcatttggcccattggccgcattctgctgacccatcaccttggtgctttttctgctttttctctgttgtcctctgtgtgtgttcctttgtcctgatccttgtcaccttgtgggtccaaaatggttccactagcctcatggagcctggccttacattgcagagtccaaagcaggagctgagggaaaatgaaaaacaacttcttcatcaccggaagcccagcaaacttctccttaaaaatcactggtcagggctgggtgcagtggctcacacttgtaatgccagcactttgggaggctgagatgggcagatcacctgaggtgaggagttcgagaccagcctggccaacatggtgaaacctcatctctac

SEQ ID NO: 106440 - DNA, 1072 bp, Homo sapiens
tcccagctatatattctccacaaaacactgagggcttccctgggaaataaatccctggctaaatggaaatgtggttggtttcatggtatatcttcaggtcttggacaacagctctgtgcttgcagtcttctttgtgtgacatttggaggccgagctctcaaatgtcccttgaatttcattaactggtgtgctgttttgagttaactgtggagagaggcctattggagatggtccctgccagttgggcagctctcccacttggctgttttgagaattgttatatcctgtactatggaaacaggatgaacttggccatgagtgtgggccagaagcctctatcccatttatgcggacttgctggctgagttttgagaagtgcatgatttcatttgggctgtggtttgctgctaaccgtgtgagtctgcaaaatgatcccttttaagtagaaccaggacagaataaccctggagctatgtttggtgtggtttgtctgcaagggttaaaagctcactacaggatgttgctgctttataaaattgaggcctccttgaaagttgtgtcatttctatgctttatgaataggattatcttctttatgcagcagtcatttgatgttgaatagaagctgaagatacagttcctctgtaaagatttcatcattgtttgattggtaaaggtggacattttcccccctttccaggtgaggtatacgtgcgttcaaagagggatggggcaggaaggtggttggcggtggtcagaaagccatctgtaactcaggtgattttcctgtaccggtcacctagctgaatctgaatgagagttttttgtaaagttgtggtagaagataaattagcctgatgatggattatgcactatttctcttctgctataaggggtatgaggccggaggttaggagactcacacacagtcatgttgtctgtcagagggaggatgaagccgagagttgagtggccttcaagctccctctggttgctcataccttgtttctttctccttcttatgagttgggaacatgcccaagaaaccttgtaagtgtgaaatacagcatgc

SEQ ID NO: 106441 - DNA, 1734 bp, Homo sapiens
atttttaaatgtattaattagaatcactgacactgcatattctggtgtatgtcagaatgccctaggagatggatgcttaagtaatctgcagagtggattatatccttgcatttgctctaaaacttggatttgctaatactgactgtgctattcacaaaatttaaatatcttttctcggtgtgtgcatttgcaatcctgtttttctgctgtaacaatagtccaagtaacagtgacttttaacgatatgctgaattttgttctcatctagtagtctgtcctccagcaatttagggctgatctggtgactatgttgagttgatcctgactacgcctatcttgctcctgtgttgtccaccacctgtctcatgatcacaggtggggaccccagttcctgccatcatatctgcattgtggccagctggaaggtacaaagtatagagtatgtctcattcccttttaagagtgtgtgctgctcccactcttgtcctattggtcagaatttattcacatgtacatccctagctgcaagggaagctgggacatgtagtcttaaacttgggtggccagcagccactgacctgggggttctattgcttattttgttgaaataaattgacatagtcttctgaccatggggagcttatttgtcctgttgtgtatcatgcccctggtgctcaaatcagtggctggcacatcatgatgcatgggatgcgttgcttaaatgaatgaatgaaatggagttcatctcctctttggaacttcttgagtgcggagttcccaacacgtcccttccaccttcctttcacagctcttctttccattccaggggtttacagacatcctcctctccttcccacacatgtgcctttactggctctgaagagagctgccacgtgcagcccccatctccgcctctccctacaccaggcccagcacccacattccctttaactgttgtgcattttcataagctgaggtccttcccccatccttgtctctcacctccaaacacattccagtttgctcatttattctttaaaagtgtgatctacataatggagcacagcttctcagttttgcaagtaacagatggacagaatacgtcctgcttcgtgtgcttttgatggacatcctgtcttctccacactcttgactacaatttctttctgtgtggcacagaacatggcaaaattacgcacgtgcacacatacagactcacacacccaaccccaccaaaaatacatattaaacaaacttcatggcaggcagaagaaaggaactttcttgatctttctccagatgcaaaaagaaacactacctaaagcagtgtagacagtttaggcataagggcagctggacagtggtacattttataccactgttagtatacttgtgccatgtagggctttatattgaccactgactttactgctgatatctttttttaatcgtattcttattctcggagtcccttacctttttttttttttaatgttgtaatttctgtatatttgcaagatgtcccaaatccaagaagtcatcatatatataaagtatgtatatcttagaattatattaatattagccaacctcacctaatcctgtctgtcctgggcattgttctgagcacttcatatagaatatttaatttaataactgcttggtttaaatgatggtgttcccttcaaaatgcgtgttgaaacttaatccccagtgtaaaagtattaaggtgtg

SEQ ID NO: 106442 - DNA, 1037 bp, Homo sapiens
tttgaggcctggaaacttggaaacattttcacagcttcttgcttattttagaggcaagaaacatgcagtcagagtgatcacagtttcagatttataacaggtgacggcaaaaggagaacattgtgctcatcaaactgctgtgccacttccacctcccagctccagtatatttattaacgtcttttgagtaaagtcttaaaattatctattaagcacaatttttcaccctttctgatagatcactggtgctgccaagaagcttttaagctgtaaatgaaaaggaaaaacaatcctgcatttgatcttggggtttttttttttcccccttcagtgaattatcttagaacagaattttgccatgagtgcttttattggaatttaaaactataataccgacttttccttcagtctgggcttaaggtttcccactgttctaagactgcatttgaagttatctatcttatcttagtgaaagtttaaaaaatactcttcctttgcatttaaatttctttctctgtggttaactaaatccgaatgagtcattttatcaaagctttaacatgtatgtttgttttctgggtagcttatcacccctttttctttttcctttttttttttttttactttaaaagtttttttatatttggttggataaccacatgatacgggtgtataaagttgtttgtatgaccataaactttgaaaatgggttttaagaaggcatttgcaccatcttatcctgcaaattagtaactttctgatctggaaaaggacttttgctatgcctcatacatttccctggagtttgatgtaaattgaaatttattatgaatcaaattcaattttaggtgttcttgaggaatctgtaaatgccagttgagaggggaaattgattttgcgttcagccctctatgatgaatatccccgtgtttgacacgtgtaagtgttccgcttatgttagttatttttcctaataacctttcagaagtgtctgctaatgaaagttgtacctgtttttttcacttaaggtgcggtca

SEQ ID NO: 106443 - DNA, 1055 bp, Homo sapiens
gtggggtccatgtcttggcttccttactgacttgtcttttttttttttttttttttttttttttttttttttgagacagtcttgctctgttgcccaggctggagtacagtggcgacctatctcagctcactgcaacctctgcctcccaggttcaagcaattctcctgcctcagcctcctgagtagcagggattacaggcacctaccaccatgcctggctgatttttgtatttttagtagagacagggttttaccaggttggccaggctggtctcgaattcctgacgtcaggtgatccacctgcctcgctgggtggatgaagtgctgggattacaggcgtgagccaccgtgcccaggcactgacttgtttttaatgtggttgcattacttacttttctgcaccttctttaactttaaatgaaaaataacctttcctagcaaaatactgagtgcgtaattagtagataggtgagatagcactgctggcagaggtcatgcatgaatgaatgaaacttgagaaatgctggacttcagaacaattaatctcatagcagtgaggatactctgaaggaagtgccaagattttttttctccttcactgattcctcctttctgccctggttgtttttgcatctgatttggcatgtgctctgtgtgtcttgtgatgatttcttgttttgttctcttggtagaattacacatttctcaaggggattttattctggtttttattgatttctatggattcagtagatgcttttatttatttatttatttattttttatttttttgacagagtctcgctctgttggccaggctggagtgcagtggcgcgatcttggctcactgcaagctccgcctcctgggttcatgccattctcctgcctcagcctcccaagtagctgggactacaggcgcctgccaccatgcccggctaatttttttgtatttttagtagagatggggtttcaccgtgttagccaggatgatctcgatctcctgacctcatgatccgcccgcctcggcctcccaaagtgctgcgttagatgcttctt

SEQ ID NO: 106444 - DNA, 1082 bp, Homo sapiens
acaaaaattagaccaagccccattcactcatgtgagtgtaccccatggcccttttttcattttgtctatattattgagtcaattttaggttcaacaaatatttattgttcacttcataatgagacctgtgttaggcacatttgcatatcttatttaattctcctaaccgttatttgagatagttaatgatgatgaccatgaattcactttttttaagagatgaagaaactgagactcagagaggtttgtgaacacagctattacacagctattagccagaagagctaagtcttaaactctgacctggacaattctgttacatttatgtttactgtaacatagaaactttgccccaaatctcaaaagtattgcttctctattaaatgtcttttttaaaattgtcccagagaatagaaaatataatttttatatgacttagcaaacttccttcccaaacatgatatgaagaaatgagtgaaatctcctttaaatagacatctcagtctttctaagtattgtatgccagtaggaagaaggctagtattctccctaggatatgcaggccagtgtatacagatttgtctcacatctgggtgcagatctccttgccaggtgcagaatggggactttacgccaggtatgcttgttggtcattataaagttcaagtgaattgtgtataagtctttgtgttttcatgacaacttttttttcctgatgttcaggtaccaaacacagaaaaatccttacgtgaaaaacagatacagattcttgtagtaggaagggaattgcattaggggttggagttctggagtttttggtctaaccacatcctgtcttaggaattttgccatatcagttgttgtgaacctgttttctaaaaatgctgacaaaaatacatgtaataggctggacgtggtggctcacgcctataatcctagcactttgggaggctgaggcaggtggatcacctgaggtcaggggtgttcgagaccagcctggccaacatggcgcaactccgtctctactaaaaaatatcaaaagtagccaggcctttaatcccagctacctgggaggctgaggc

SEQ ID NO: 106445 - DNA, 1019 bp, Homo sapiens
gctactcgggaggctgcggcaggagaattgcttgaacccggaaggtggcggttgcagtgagccaagatggcgctactgcactccagcctgggcaataggaatgaaactccgtcaccaaaaaaaaaaaaaaaaaaaaaaaaaaaaatggaaaaaacataaatggaggtgagctggaagattgagtgaactcatctgagccagaaaggatacatctacaaatttttctgggagagtataatagcaggctgcaaacataaatatgtcatctgtacttaagtaattttgctaaattaataagatcaacaatggctaccatttagagaacacattgcataactaggcactgtcctgagaactctgaatataaaatgaatactgacagtgactctgagaggaggcatggcagcagacaagacggctatttctgtcccattaggtgagaaaaacgaaacacagagacgtgaagtggcttgcccaagctatatgctcattaaacatcactggtgaaatgagctttcctctgctcagccaactttcttgattgattgattcattcattcattttttttctttactattatctctctctttgtatgagactacaaattgttatagtaattgacttattgatacagttactaattatttaaacagcacaaaattaaaaacttggccacaatattattaacacacagctggggattaatattttgtgtcttcctcatacaatcccaaagtcaacttcaccttccctagcaataaataaaatcacactggataattttaaaattttctatcaaatgtgtgatcaagtctgtgctctgacagcaactctacaattggcaggagctgagaaacaaaatacattttttaaagtaataaataaaaatgttaattcctgccatgcctgtgaggtttgaagctgggaacagagaaggatttaatttagggaacagagaaagatttaatttagaaatgacttcataaagacttaggttctaattaagaagactgaaaga

SEQ ID NO: 106446 - DNA, 1510 bp, Homo sapiens
gtgagccgagatcgctccattgcattccagcctgggcaacaagagtaaaactccgttttacaaaaaaaaaagaaggaaactgttgactgctcataaatgcagtcattcactccctcatccttcctaccaagaattattgagcacctgctatggccaggcattgttctaggtgctgggaattcagtagtgcaccaaacacctcaaatttctttcttcatgaagcttaaaacatttttcatgctagtgttatggggggcggtcaagggtgggttatgtcctccagatatggagtgattggttgctatagctacaataaaaggcagaggggttgacggattctgtagtgggaaaagtaatctagggaacaggagattctattagagaaaaggaagggagggatggagagaggtttgaatacctccaaagtggagtctgactttgggtacctggagtattgtatcaagcacagagggatttagcgtaggtgtgtaaagagcctttttgttaattgggagtgagagttaatgtatttacctttgagaatgcagtcatgatactgtgttattttagatgctttgcctgccctggaagaagcactgagttgatgatctaatagcttgttaccactgttaatgtctatgattatctttgtcacagtgggaatatagctgtcagggaaagagaaaggcatttcttcttcactttcagtaatcgagctcaaactgctgacactccaaggaaaagagagaaggcacttaacaaaaaagacaagccaagaaaaaaaaaaaaaagccatgggaccttagcatgtgatggcttttaatgggaatgctcagatggtcttgccaacggcctggttttcgtcaccaagggattagtagagtatgacctgatggcttaaaaaaacaactcaaaaaaaccaaatcaaccaaccaaacaaaaaaaccaggtgtgctggggtatttataaccgaaggaaaatggatttaaatgaacagatggaaaaataaaaataatgcagtttttcttgttgatggtagcgtaatgaggattaaataaaaatgtagccttttatgttttgaggggtgcaatatgaaggagaggctctgatacaggctgtctctttaaggaaagaagcaacaaaaattaattatgtagaggagaatcagggtcttgagcattggtggtggagaaaccacaattgaagtgaggctttgggtagcgtttactatgtgccacatgcctcaatgagggtctagtatattttaccttttatgcaactcacctgcctggaaaacagtattgtcctaatttcacatgggaggaatttgtaacagagaggggttaagcaaccaagtttccatgactgtcaaatgccagctcaggtgctgaaacctaagacattttttccccttcctaagcctttgggtttctgttttgtttttaaagcctttggattctttgttttttttttttttgtttgtttgttttggagaagaagtctcgctctg

SEQ ID NO: 106447 - DNA, 1033 bp, Homo sapiens
aagacagtaagtcattcattgttagcagtgataatgcatgcctatacagattttaggagtgtttcagttctgatctttcatgttagaaaagtaatctcccttcccagttgaactctttttcctagttactagaattggaagtggcaatcacttctattccagcctgtccagtgttttctgctgaaactatttagaaagtgtgatgtcctaatgggacctggctaacttcttgaactgtagcttttaatgttcttggttttgtaataatctcatcctttcaaaatttgcttgaaatttgtgtttctttgacctctggtagactatactttggtgccctttgtagaaagattttctttgactcaatattgtagatagttcaggcaaccttttaaagaagtattcttctttgtatggttctaagaattctttacacatttagttctggattatttcgtgggaagatggctcccaatctgctctctctagtctccttgagggcagaggactcccctaatttcctgtgtatttccagcgcttgtttccgtgtctggttctgagatagtctacacagagtgttttttggggaatgtgcaagggtttcttcttggcaacaattgacttctactgttttacaaagtacagagaggctgtgctctgttgctgatggggttacttgattctgtgaagtgctcttttctgactggtattagcaagtaacgcaaacccaaattttaaaaatgatagaatcggcctggcgtggtggctcacgcctgtaatcccagcactttgggaggccgaggcgggcagatcacgaggtcaggagatcaagaccatcctggccaacatggggaaaccctgtctttactaaaaatacaaaaattagctgggtgtggtggtgcgtgcctgtaatctcagcgacttgggaggctgaggcaggagaatcacttgaaccagggagtcggaggttgcagtgagctgagatcacgccacagcactgcagcctggcgacagatcgacactccacctcagaaaa

SEQ ID NO: 106448 - DNA, 1026 bp, Homo sapiens
ggcagtgcatgtttagcaaacctggggccctgggagccaccactgactgttaggaccactttagtgcctgtgctgtaagccaggattttgaagttcttgggggcaattttgctttaagcagtgttagggaactctttacaggtttgtgagctgggagtgacaagccattattttatccacaccaaagctttgaatgataaaggggttgaaccactgtcattcattaaattcattaactgttggaattcctctaaggatctatctgcaggccccttctcttctcactctgtacacggtctccccaggcaacttcataatggctaaaattaccatctattccaagagcatgctcaaattgatatttctggctgaaatctcccttttgagattaaagcccttatcacctacttcctccttgacgccggagttctcaggacaccttaaaaccaagttcagtatctctgcccatttctgcttccttacctttaaacctgttcctcattcagtcctttctgtccccaggagtggcagaaacataatccatttgccctagcctcaaacctgggatgtctgtcttcctccgtctacaattaatcatcagccagctcctatcagtgtcacttgaatccatattttctcccctactcactgccaccactaaatagtaatctcttgccttctgtggaagctgtagaacatcgcttcaagtttaccctcttgtgacccactgttgtctacacagaaaatctggaggaacctttaaaaatgggaatatgaatgtatcactcctgtgtcagtaactattctgggaccatttttgtggcttccaataggtctcaggatacatcctaggatccagcaatgacttttcttaatttctcgccctttctacttaccgtgccccaggtcaagcccacaattttccctacacctactgctgtctctactcagaaacgctttccctcctcccaacctgcttcacctggttgaattctagctcctgtttcagaagcttagctttaatca

SEQ ID NO: 106449 - DNA, 1012 bp, Homo sapiens
atttgtatatgtttgtttaaagatgagtgtaatgttgagagaggttgggctggtgatggtgttgaaacacaggatctcagactcttagggctggggaaagctattaataccatctgctctcatcactttgatgttctgtatagggctggtttgtagagcctttctattagatgaggtaagcaatagggaccttcagagattcgtggggagacgtttattctagccctgaaaaaatggcacagtatgagctggcaggattggagagaggaggctagactcaagcgaagccagggggagaatttaaggtgaagatttgtcagacactgacacttgtaagatacttcccttgcaaaaccgcatactacatccattatttttccttaagttatagcagtggtccactggaaatgttttgtggtgatattatgggaattctgcagcataaggatgaacagatgagaatatctcaatgagatgtggagttggaggacttaacaaatcagatgagaaaggacaagcttgaagacagatcagtttaggtaaaagtgattgcatgcatgtgagtttgattgaacagtaccaacatgtcctgagcaagatgggaaactttcctaataatcatctgatggaatcaagttgtgataaattgttatcatcatagtattatttcaatttaatggccatacataatggcatctcccagcaattaatctaacattaacctccaccttagttattgaatgtatactgtggtttaggctgaaaacatgatggataagaattactgactgctttggatctgtatacgatatgtcatagccttgaactttattctgttctgcttcagtctttttcagaccttcctgtacgaacccaagtctttattatttgtgacccaatagcatgttagatgtttttaactggaaaatgtgaatggccactttttttttctcttacgcgaagtaaatgctatgtaaattgatttttaatgcttttattgtcccacaggaag

SEQ ID NO: 106450 - DNA, 2478 bp, Homo sapiens
cgaaaatgtgtgagcatctacagaaatgtatgtgaattaggctccaggaataaaattgcataaaagtacaactgtggcttaaatctatttatatgtatgcttggatcctgagcaatatagatacctggctagaaacctggctgttccattataactgaatgtcaaattccccacagttagtcattattaaaaatacccttgtcttaaatttactttggcacgggaatgttcttggtgattaccatactgtgttactctagggagttaaagatttatattatgtttcagttctactgaaataatagcattcgtaggcacacagatatctctatgtgtatactgatatacttgagaaagttctcctttaacaacaggtgattttaatattatctgaaaagaaataaaaatactttgtttcatagcactgtggagtgtcaacagaaatcttatttgttctttactcctaaaataggagtataacacaaagtaatatgttatgctcactaaagaacagaatctcaatttcagagatagaattgccaagttcattatttctggagaaaggaacaaatattaaccccttagtttaacctgaaaatgaaagagcatgtggactaaggggaaaaaaattatatatatatatatatgaaaaattgacttttctgtcttttagttgtatgtctttatctccaacagatatgtgattatcctccagagaggaccatgagaatttatttttaattttcattccgttaattacttgtgtaacatatgtatgtccccataacagccagtgctcactcgcgtgcacgctgtctctctctctctctctctcacacacacacacacgcttactacatattcatacatttattctacagggaagaagagacagttggagacactaatattccagctgtcggcagcagaatcatttcacaaccttcttcccagaacttttggtcattactattcttgcccctcagcctcactactcactgaaaaaatatttaatgtggatctagtcagttccagtttggttagtttaaagagatccaggaagactgagcaatcatttactaatctgtattctaaaaaaccagctcaagaattaattcaattagatatgccagtcaccatatctggagattaaaagcaggcaaacagaagggaaataaggaaaatgaagcagggcaaatgggactattactgatatattaaaatgaaagactatactaagacttctcatatgcgtatattgagatttttcctgctggcaatgatcaagtacaattacataccttttgtatgacatttctgattggaaaggttatgtgacatgcagggaggggtcttagttattggctctttagctatttccctctttatcctggaatagtaccacagtgtgtttttcactcctttaaaacattctttaatgaaattgctttgagtcatccctgtctctgtgctttgcctcttttattccattgacttgtttagggtacataggaaattaggttgaaaatgtgttagtattccacattaatattaacttgaagtctttcccttgtatcactaaatcactacagataaaaacttgtactgtgaatgcatgctgcttgtctataaatatcacctgaaacagcaaataaagccatgtatgtttaactgagaagagttgagaattaatgctaaattaaaatattgtcacacagattaggagaggcatacacacacacagtctctgatgcctttctctttactgtgaacactgaataataattatttgacgaaggtagtgcgttgtaaatatttataaacagaaatgtaaaacagtgagaccacagtgaataaattattttgaaatattttaaaatccagtttttatatgctttttagtaaaaattattcatggtgatcaatatttctttctcacttgccatctgctccacttctttgcctgtgcagttctaggtgaatgatgcactgtgctgtataatgtactccacaaatttattgacttggatgcagcatttttatggagagcaggcaaacatgtaatcactaaacacaagtcttctgctgttgtaattgccagctccttcctaaccacgggaacaattaggtgatcattaaatggcttccaaggggatgccttcctctcctgtcttactgctggtgtcatttagtagcttctgcaggagaaggtggaagaaatctattccacgtagtcctggagtgactggtcaaaaggatttcatcttgtgtcttacaggcaatttgtgaagagcccctgttttcatgcgattccattttaattcagttgcagcatccagttttgcactattgaatcaccccacttgaaagcctcagagaggggcttttgggctgaaacaatgacacttaggtggtttgaccacccctttcttagtctgaaagcagatgtctgtatccacttactaacctgtgactctt

SEQ ID NO: 106451 - DNA, 1177 bp, Homo sapiens
aagccagcggtccccaacctttttggcaccagggactggttttgtggaagacaatttttccatggggggatggttttgggatgaaactgttccacctcagatcatcaggcacgtgcaacctggatcccttgaatgcgcagttcacaatagggttcgctctcctatgagaatgtaatgctgccgctgacctaaccggaggcggagctcaggcagtaatgctgaatcctgctgagtgtcttggttcctaacactaagggatgggtttggaggagcagaaatgattgttggaagcaagtgattggtatctgcatgcaactgtgccgctcaaaggtgctggagaatgactaatttgatggaggaaaatagcagtattagttgtggttttcttttcaaaatttcttatgttcacaacacttgtgttttgtcctctgaaatttaccctctacaccctaatgcttgatcagtgtccctgcctgtgtgagaaaccctcctggaccactaaagcccagtgtcattttgttcttctttgccctttaagagaatggtacattgcattcattttacatctgcttgggctgagctctgtcctgcccctaacgttctgtgctgttctcatcgttgtcttctcctctgcagcttctgttcatgctgttccatgtgcctggaatgcccttcccctcatccttatatatccatcagagctcagcttacgtgccaccttctcaggagtcgctgtattctgtagggtctccttgatatttttatttcacattcaattatcttatgttgtttttcacaagctgcatttacacaagtttgtgttagtttacttgcttcatacctttctcccccactggaatgcaaacccctgaaggctgttctgccttgttcatcttggatctcggtgcttggtatccagtaggagccccgtaaatgtctctttaatgtgcaactgtctggctgtcatgcatctcctggagtggtggcatggcctcttcttcttgaaatgactgaaacggaaccctttgttaggccatctgtatcagggtgataaattccctgtttgtgtagtcagctgccctgccaggaacatggcactctgtaatgtgcataatataatcatttagcttttggggtgatttttctgcatcatttgatcaagtcataaacctaagtt

SEQ ID NO: 106452 - DNA, 1061 bp, Homo sapiens
ttccatggatctacattgctcagtctcaaccagacactagaactgagtggaagctgctttctttagacctgtcattctcaaattgtggtccctgggactaacagcatcagcatcaacccaggggacttgtaagaaacacccatttctacaacccatcatcccaaggcttttaaatgagaaactctggggtgtgtgccactgtctttatcaggccttccaggtgatgcgcatgtggctagagtttgagaagcattatttcagacacagctcgggctctgcactccccagttacagttctttgcccttctttgctgtcttacacccagctccctacactgagttaaattgcctccctggtgccatgaagtatttttttgtctagggactgctaaggattttagggttgggttttaagtacgttgatttctcttctgcgtcaatatatctgacaccttaagctcacttaagtcccttaagcttctctaagcctaagaaatacatggtgagagggatgtgtctctaagaatatgtttaacattgtggaagactgttgacagctgtgttgactctcaagacaagatcaggataatagactgtctaaaaggaatgtgttaattttattgcttgaagtataagcatatcaatttttcttaattatgctagaaatggtggtagtcaggtagtcaggttcacctagttgtgaaatctttcctttgctcctgtagttgcatggcttgagggaacatgtttaacctcttgagtacaactttgctcatctgtgaaatgggaattacataacctatggcaaagtgaaatggggagagttaagtgtggcgtgtataggaaaactgttcctttgagttcctttgctattaaggctcatttttttatatccacagtcacattcatgaagcttttctgaagaacaaacacaccctttgggaagtatagtcaaaagcgggaacgtatttattgagtaatcaataagctatatattttgtcatgtatgaattatgtatgcattatttataatacctcacacatgaatcatacttatagta

SEQ ID NO: 106453 - DNA, 1053 bp, Homo sapiens
ttagctttgtgccccacctaaaaacatatgattctattggaaacgttggtacttttgttaatacatttataatgataactgttttctttgcagattatgaagagacagggtcaaagatcccagtactggtagtctgttctcaccagtgcatgtccttagctgagagatcctgtcctttgtggagcagctgaactcagctgtaagacacagacctgaagtctgtgttgaaattgtccttcagatttgcctaacatcctaactgcccaccagtaccaaccatttaaatagtgctatagcaagaagtttaacgagagtctctggagccatctctctgagtttgaatcttgctttcactacttgcttgatggtgtgatctaaataccaaatagcataacctttctggctgcaatttcttcattcagaaaatgagggtagtattgtcaggagcaaataaggtaatctgtggacgttggtccattgtcagtggcctataaatgttacctgttaataaagaattggtgtgaagggttaaaaaccgtttactaggggaatgatcttggacaggttatttaaccctctgccctcacatgcctcatctataaaatgggggtaatatggaagtttatggcctacagtgaatttgagaattatgtgagatgactctttgaaagcacttagcacaaatgtctggtaacagctagtactccatatcagcctgtcatattgttcttggctgttttcctcattctcaaaacagtttccttgacctcactcttggaggtgctgtatggggcctcagaaatatgttttatttctaatgaggttcttcactgcaaatctcccagcactagtctttttggtttagcatttcggaaacactgtcttcgtcatccatgaccattgtcagtgagctgccacatctcaccatggaagtcctaaaatgaaactgtgtttcacttagaaatagaattctacctatttttctgaagaatacttttttttttttatggtggcaactttgtttgctgtcaatataaatatatcgcttctgta

SEQ ID NO: 106454 - DNA, 1077 bp, Homo sapiens
aatcatcctgtctgcaccctgtgaagtgtttcctagtcccacatcccatccacaccaggcccctgtgctgttgagtgagtgccttgtaaaactgcttttaatttctttttttttttcctctcagcctttatgtcagtgggtaggtatacagaccctcagccctcctaaacaccaaactcccaaattctgtctctgggaatttttcccttttcctacttgtgattgaaatttctcatgagcttgagcatctttttaaatattaaacaaaaccttgtggagcatgatactgagtaatggtgtgaaaaagcccttccatacaaagaaaggaaatcctggccgtgtttaaaccagaccttaactgccagttttgttttgctctctgggttgcatctctgacttttcagaatagtgcgtgctcacctcagcaagtctttcccacatgataacttgagcggtggcatgtctctgaggcagaaaacttcagcaagaggcagctgttcccgttaagtgcttcatggatttttatcccatgactgctgtgttaacagtaaaaatttacagcaatggacttcagagcttgtttcttctttttttgtctaaatgagatctttaaaaccttagccaagttcgtccttctcttatagggaaagaagataggaagaaagagggagaaggaggagggaatttagggttgttatttttatatattccatccagaatgcattcctgatttttgtctttataatttgacattttcgtcttagtgaaaacatcgaataatttaaatgttggtcttcttaaaccaccattttgattatatcctatatttattagttacaaatagcacaaagcctactcagatgggttaaaatacaaaggcagttaaaactgaaaagtctagagataaaatttaaattcagacatggtttgatcagatcttcctctctattttcctccctttctcttgttactgtctttttacttttcagctttggccttcagctgcttccctcctgattgcaggtcattctgctcccttccttcttcattcacattcaagggaggagggcctcttct

SEQ ID NO: 106455 - DNA, 1071 bp, Homo sapiens
tggattcaggtaatatttgtaatataagtttattgagagaggcattaataagcatatttgactagaaacagcacataacatgtatattagttttgtttttaattagatttagacagaattcattatttttaatggcttttcattagtgaataggaaccattatttggatctattgtggtaaaataaattcaaggtacatgcttattttcagcaaagaacctcttaggtatttaaagaaaccactgtttggaacatgaatcatatataggtatgtgaaattccttgcttttagacaaaagtatgatttctatgctcatacaacttttatcttaggtcagttattaacagagaactatactgaagtgagacagtttgcttaaattgtagaaaattcttgttgttgaccagttttatttgtccttatttggacttttcaagtagtattgctggggctgatggtagggcaacattaaggtgtttctctcagatttttatatgatatttgtttgaatagaattaactagcattgatttaaaatttatatgtgtcgaccaagttctttgggctaactctgccttaaagaaactgagtatgaagtgaagtctcagattcaagcccagatttacagtatttgccattattttcatgtgaggaattctatctgccttaaacagaccagttggaattaatctccaattgtgtgatttattctccctactgtggaaatatgtcttcctgatgctagtctactgaattgtaacatctcaaaatgagaaaaatacagtgacttgtgaatggcacactaaggaggtagaagtggattattttaatgcagaaatgagctataggttaagctaatgatgtttttcttaatgacagctttaaaaactgaatttctccaactttatataaggtttttatataagcttaaataatatcacccatgaacttgattattttctttaccgtagtctcttgtttccttcgtcttttgtgtttgcagactccatttatccaaaaagaatatgacagtcatcccagtattacccataaatcagtgcccatctccct

SEQ ID NO: 106456 - DNA, 1052 bp, Homo sapiens
ctaagtaaaattcctattttggtcagccatctaataaatcaacaatcactttatttggtttttcaatggattcttttggcatctggaagaaaatttaagctgtagacaggataattagagccattccttacgtctcgttcgtctccttttttttcttttttctccaaatatgtagatgcaagatgaaaataaagtttggccaaaataaaatttggctaaatatatggcaaatgcatactatccctttgtgaatcatcacagtcatagggaatttgacaaagaggtaaaaaaatacatgagtgaaaagcctatgacagttgtaatcgtgcagtgaagaaaatggtgatgtgaactttttccggatagtagcgcgacacttataaatgacttaaaagtgccccaaggttgctagacctttgccagtcagtgaacatgttcatttggatagtctgtttttaatcttactctttgggatgaggattagggagaatgactgaagcattagagtgaggctgcggtattttccagatagcaaaaatatgcatcatttttaaggagctatatccattgctcttgcagccatgaaacctcccttaccataatggaaaatactttctgtgattgtcccatttttcttgtaccattgtttatatctactgtgagctgttaccagtttggggggaatggggaaagccatggcaaatgattgggtggcagccactcatgtggactcttatttagtggtaggcaggtttatctactactaaactaacaaggctagtagttagacttacctactaataaactaaacaagatttctttgtgtcttccattgtatgaggctaggtatacaggaggcacaaaaatccccacccatctaccagtatttctgtagatgaatgtatatacacacattaagctttctcattgggaagcctgtgttttacttgctaaaaattgtgaagtttttttcttatctaattctcaataaaggattcagtcttaatctttccagtaaaagttgtttcagcaggctactcccgctttgttgt

SEQ ID NO: 106457 - DNA, 1081 bp, Homo sapiens
atttaaagcggcctattacatacagacagtaactctcccataaaacagcttaaatgttcagatctgtcttaatcccctgagagtgctatatatcctatccagcataatcaatagagcaacttggttgtacctagcccacttctcgaaagttgtctaaaatatcttcacaagacagatagcatctctctatttcttcctgaggagccgtaactatctattgtgccagttcccatttgatttcatctaaagttatttccctttctttcatttttgtagaatgaaaaggtaatgcattcatcaagaacatttcaagacaatcttgctgttcctagcattagcttccagcaaaatgatcagaatttaatacttagacggtgcttctgatgtatgttaataagacgtggccttctatgaattttaactattgggagggtttttattttatttttattttatttttttaaactactttttcttatatcccacactgaggacaaatagtaaatgtgtttaccacaaggcatgctactttcatcttctcacattgtattggtttattatattttttctttgcctacattcttccctatttgtctgcatatgccatagtgcctgtgatacaggtggattcaaaatatggttattcaattcacacaagaatcaacgggagggaaactatgtatagatggggaagtcaagagtcattttctagtatgttactgagcccataaaagtaaggcaagtagtaggacactgttgcattgagtttactttacctggctcttagaagtttttagtagagtagcaacttaagagcacacagaggcaagctaaataatgaacaaactaattgcaagctggtaaaaagagaaaaataaaatcttaacaaccttggtcacttccacatgctatttccctgactgagcttgtgacccaagctaagtgttggaggaggatgtagctctgctgctctgctcagacacaggccaggggtaactacccctccccaaggtcaagcaagtatctggagttgaaagatactctttgccctgttgactgctgcctctctgcagccctgaag

SEQ ID NO: 106458 - DNA, 1048 bp, Homo sapiens
tgaccatcaagcagttttaggagacactgattcagagcgactttttctgtcattgtttccatttttttttttaaatctgttaaatggataagtaattctgagatcattctctggaaagtatcatgatttagggccaactggtgctctgagagcattctgcagctagaatgaactaatttattcaggcgggtgtgttcaacatattttttcataggtacatgaggacataattcatatcatggtaatggtgaactttattagaagtaacagaaaaactccatttggttttgaaactcactttgttttcctctcttctcatttgtttcacacagtcgccatccttctgaaagacgactattttgtcagtggagctggtctacctggcagattcaaagctgagaaggtggaatttcactggggccacagcaatggctcagcgggctctgaacacagcatcaatggcaggaggtttcctgttgaggtgagagaaagtcaagatctcaacgtgtagctgtgcttcggtctttatgttaatcagatgctgtgcccttaccctcagtcattttgcaaatcacagctgtacagtacctaacttcctctctctggaaaccctttatccatagtatggcaggtgggtatccatccttgtttctcacctttgtttaactggagaaacacagaagccacaggcatcatggtttgagtagactcactactggttgatgatgttcatcatgtgtttcatttgacacagtttcttttcactgtctgttcccatttttgaaaggtgacattttgtacgaaactgggttgacttcattttcacccttaagaaaatagaaaagttggcaacatgaagaggagtctctctcagaaccttctcttggtagcaaagttttaagttttttttgctctcactggctgttgaaaaagaggctgtggtggtatgagtcactgttaattttgttaggattgatggtgacattttgcttctgctgtgtcagtcttctcagtgatccatcctgctggacagaagaagggtgtgggt

SEQ ID NO: 106459 - DNA, 1190 bp, Homo sapiens
ttaaaatatgcacaagaaagttgcttgcctttgcccaaagtgtgtctgtgatattttatgttaagttgctttatttgagctcttcattaatacccatctctccctacgatttttatactatttgagcatcttacgcttggtttatttcttttcatataactacattgttttccatataactacattgttttcattcttaaaaactagaatgaaagtaagaaaatttaatttatcatggagcaatttatcagcattgggggcattaattatttgtcttgcatgcagtatgtatgagggctacagaagaatcattgttgaagattgtactaggattggtagagtacagctatggttctgagctggggtcagcatctcccccctgcaccctgggacattaggtaatgtctggagacatttcttgttattgccattgttagaagtgttatggtattactttctagttggtagaggccagggatactgctatacattccaatgtaaaggacagcccccactaaaaggaatcatccagccccaaaatgtcactagtgtcactgtggtgagattctggagtggagaaagcagtgtgtttagtggaattaagcatttctttatctaagtagcatcatttaaaatacatttgaataaagaggacttgtttcttgggaagtcattccatcctctttggtttttagagagtaaatgtaccttgccttatgtgtaacagcattgctgttcctggtttctttagtatctacttgagatgcagtcacgaccttgggaattttaacagctccctctgtgctgtggctctgcaggctgaattttaaacatgtgccccacaagaagctggatctgctccctgagggtaaatggcagcaaactcaactttgtaggttttgttgcttcccaggaattctttgaggtcatctgagacaactttgtaggcatccagaaattaaagctctctgaattttcctggctggaatcctagactccgtcttgtagttcctacacttaaaaacatctagtctaatagttaacaaagaaagcccttgtacaaacaaaacaacaaaacaagacgaaagctcttcaataaccagtgttctttacagctcagttaaagttagaaaagaaagttgaagtcagattacaatgccatgccttggagactgaactcaatttggatc

SEQ ID NO: 106460 - DNA, 1444 bp, Homo sapiens
attagttggattctcaaaaggagcatgcagcctagatccctcgcacgtgcagttcacaatagggtttgtgctcctatgagaatgtactgctgctgatttgacaggaggcagagctcaggtggtaatgctccttgcccaccactcacctcctgctgtgcggcccagatcctaacaggccatggactagtactggccctgttggagcccatgtgccatgtatatttcagaaggcaaccagtaaggtctggaactacacccttaaattcattaatattcctataacgagcaaatgaacagccatgctaagtggaaatatcagtactctacatagcttcacatttcttcatatctggttttaccaccaaattagtttttgtaccaaattcataaaaagaacaaaatacctttttgtcttgaaaaagtatccagggccattgtatgggtctcatgcctattgagtgacttcaatgtcttatgtctaaagagcactgctgggtagttacaaccatgacacaagcaggttaaatcatgtgtctccctgtggggtggatgtgtcccagtacttctctcttcctcctcctgtctttgtcttcatattgtgcagcattcttaggcaaagttcaggattgtccagccagaagtttctagttttaggctgaccttgttctgtgatcgattctcctttgaacattctgtttgggcctgcaattgtcttcaatatccatgtcttcaggtatgttaccttgacctcctactgcactcttctcctgtctgctcaaatcctgccttcctcctgagagccttcctaatgatttgccatcaattttatgaagtcgatcggggttcttccctggaatacgtctgtcacattttggttggagagttgtcttgtaatgacccctaggttatggctcaggtaagagaatgtgttccttgtctctggtaagcacgtccagttgtgtcacacacataaaggccttgcacagtgccaccctctccacactgatgcaggcactcaggttcctgccttacttagatgtggaccagcctgtctagggtttgaggcccacatggatcctgagcttcagcagcatgatatgttaaagcctagactacatgtcaggttgggtagcaccgcttaaataatccctccttcactgctggaataagtttatgtatacatatttgtatgcatgtatgaatgacaaggtcttactgtgtcacccagactggagagcagtggtgtgatcacagctcactgcagcctcaacttcctgggctcaaccggttctcttgcctcagcctcccgagtagctggggctacaaccacacaccaccgtgcccagctaatgttttttattttttgtagagacaaggtcttgctatgttgcccacgctggtcttgaactcctgatctcaagcagtcctccctcttcgccctccc

SEQ ID NO: 106461 - DNA, 1081 bp, Homo sapiens
atcaaatgggaaaggaattggttgaaatttagttaatgactttattgaaataaagattccatttcagagcagaatgtttcatcctttgctagtgaaatgtttaatttccatctggctgatcttttatgtgtatgtcctgtgttaattaagaggaacatgtgaggatgccctagtacttagagaatactcagtggagaagttaatgcctggttgtgcaaagcaagcgtgcaagttttgtgaggtaaaacagctttggtccctggcttggtaaatctccatgatgtctggcagtcctcatcgcagtcatccttagacaagaacttggctcagggctgtttgatggtgtgtcagtgacacgtggtgtgctgatagctgtttgaatcataccaaaaactacagtaaagaagatggcacactctgaaaagaaaacctggttaagttggagatactctcagtgtagaaacttggtgaccgtggtggccctcacaaccatatagaaggcttagggtagtggcggttgtggttgaagtcactgatactggtgttggtagtggtaatagtgatgatattgtagatgcaatttaatagacacgacctatatcaggcactttctagatgtttcttcatgtcaaccttgtgagagagggactcttcttatacccatcttaaagatggaaagactgagcttctgcaggcttggctgagacttcctgttagtactccagaatctgggctcgaatatctccaacaccttaaccataattggttttattaggtaagtaattctgctgtttttcttgtcattgttttaggttgttttcagaaccgctgatgcagtaggtagaagtcattttttcagaatcttaactgttgcttattgtaccagttgagtgttcctcatctgaaatgtctgggaccagaaatgtttaatttttaaattttttttatttgggaacatttacttatatataatgaggtttcttggggataggattcaagtctaaacacagaattcatttatgtttcatatgccccttaaatacgtagcctgaaggtaattttttataagttttaaataatt

SEQ ID NO: 106462 - DNA, 1385 bp, Homo sapiens
ctttgtattcattgagaaccaggcaatatgctgaacatttgggagtttcatagtgaacaagacaagcaagctccttgacctcatagaacctgagagaccaacagagtgaatcttaacccaaatgtacatcagaattaagtgggtacttttacatgttccaaagccaaatttgagtaattttcgttcattccttattactggtaaatgaaaagaaaaataaaaaccttcagctgacagtctgcttttccacgttcagataaaaagccgtgcatctttaatgtggatatgatgcctctccattgtgctcaatctcaccgtttcccttctaaagtttactagaatcccacaatgtcagcaggaactggagtcaaataatagatgatttgtaggcttcaggggtgtcaccactctctttccagttggccaatcctctaaatgattcgaagtctccaagttagtctcaaaaatgcctgaaattccattatttgagttaaggtattactgcctcttcaaatggtagtctaaggaaagagcaaaatgtaagcacttgaactacattgaatacattaataaaactcatcaggtaatgccccagcagtagcattacaaagctcaaggcatcccttggaataggatgcataggaggtcaactctgataggacaaaatgtgggcaggtctacatgagccacatcccggggaagcaggaggacccacccacagttatggtatggatcagtgtatgggttgggagaggaagcattaggtatagaaggcacgctggatttatgacagacagtaagtgagcctgccccagtgctagaggaaatgattggaatggacagtggtgtgcaaatagagtgcaagagtgggtcttgatgtttttgaagggatcctcttagaagaaggaatcaacttggtctttggggtcccagaatgaaaccaggacctgcagaagctgaccttactgaagaaactggttacagctggggcctcagcacccaggctaacagcaggagctaaccaggtgctcatctgtttcacataattcagggtagattttctaaaatcaaattcctgaggtccctctgcgacctcctgaatcagatgttgaacagtaagagatattccccatacttctatcaaaaacaattcctcaggccggatgtagtagctcacacttgtaatccagcactttgagaggccaaggtgggtggattgcttgagctcaggagtttgagaccaccctgggctacatggggaaaccccatctctaccaaaaatacaaaaacttagttgggcgtggtggcacgcatctgtggtcccagctacttgggaggctgagaagggaggattgcttgaactcagggggtggaggttgcagtga

SEQ ID NO: 106463 - DNA, 1731 bp, Homo sapiens
tgtcattttgactcatttccttccagtacttggcagagggtagggggagatgaaaacatagtcaatatcaaaatgaatatgtttacagtctgctttatcactttgcatattgtgaatattttctgtattttctaatatctctcagttcttcaaaaatgaaatctaattttcctacttgtaccttgctgcattctacagatttttcacaattaacacactttactttaaattcaagaaaaaaaaccagaacaatgagtctcatttaatgtcatttctaagaccttatttttgtaagctagaacaagtatagaggcagaatataaaaataattttttctcaaaatgcaaattgtttatggtcttttgattatcaaagtaatacatgttcattacaaagtaattcacacaatatgtgagttaaagaaagcgtgtgtttctcttgcaaacaagtaacactcttttgaaatgccaatatgacttcataaacttatttccacttaatagataatgggagtcttttcattgtcagtaagtagctacttactgagtctgtgactcagagggcagcacccaggccagcagcaagtacttagcaggggcttatttctggttttgttgttgttgttgttgtttgtttgtgttttgaggcagggtcttgctctgtctcccaggctggaatacagtggcacatcacagctcactgcagcctcgaactcctgggctcaaggaatgtgtcaccatgcacaggttttttttgttttttttttttggatacagggtcttgctatattgcccaggttgatcttcagcccctgggctcaagcagtccttccaccttggtctcccaaagtgctgggattatatgtgtgagccacagcacctggcctcatctatgttttttaatgctgcatagctgaggcccttgagccagatccctggggttcatatttcattactgccactgtgtgagtacgactctggtcatctgttgaacttgttccctcatcagtaaaatgacttttaatacgaatacctgcgtgataagagtttttgtgggaattaaactgtaatacttagaaacgtatagtttagtgtcacatagtaggtgattgataaatttttgcttttttccatgatgtggatgcaatacattgttggacctttcggctctttctgttggtctgtcttataaacatcacagctacttagatcatatatctgggataaacttaggtttaataggagccaggtgtatatgacatgaagatgaaaggtaggagagatgtctaacatgctatttgactggttgacatttgagaatataagccaacattagtcagaacatctgacattttcaaaagaagctaataacttgtttgaaaaagccaaaaatatatgtttatgtgtatagtataccctttttgttaaaatacaatacattgtctcggccttcatgatgtacttatgggctagaattagtgatcagtcagggttttaaatccagaatgtttcatctcaaagtggaagttctttgtgttacagtgcgcttgtctacctttaccttcgtgaattgagaagtttgggttgctatgctaaaagttaattcatttgatattatgtgatgtagctttatatgtcagctctgaaactgtctataataatagtgactttctctcaccagaatgcaatatatgggttcctaatatggggctaatacatttcttgaaattat

SEQ ID NO: 106464 - DNA, 1124 bp, Homo sapiens
tattcataacctcattactggtctcatgaatttctagaggtctgaaaactcacagccaaggctgctgtacgtgactattccgccagaatcctatgggcgggtaccattgctgtctcattaatttctgtaacctcagtgctgagtgtagtactatgtatgttataggtgacctatttacattttttgtgaaataaaagaatgaacccactattatttgtcttaactaatttcaacatgtgagaagtcttccagcttacgtttgtaagaactagatcataaaatgtctgatcttttagttaaatctagttttggtgctaggacttggcagaacaataccagtatctatgggcattttgttttgacataactgactggcagacataatgcttgtcaccttctcttggctcaggagagggtggaaagttcaacaggttttacccaacaggcatttttcaatttaagtagattacggtgtgaacgatgcaggtagagatcagaactggcagggaactgggatttgaatagggccttcaatttatttgacatatctaatgttcttatgaatggggatggaaccctggtttttggtgataggtagaaagattggctcccagattgatagcgtcttgggtggattagtaaatcgatttgttaagagctggaattatataccttttgggtctaaaatttacctcacaacagcttaagataacaaacctactgccccttgcatttcaaaggtattttgtatagaagctgtaagttgcttttctgtagaactactatttctacaaaaataaaagctattattttactaaataaaaattggtaattgatttcttagtgatatattgttcatctgaagccttttatttttcttgtctgttattttaaaatttgttcttcaattgtcttattgcgtgtttattaaaacaatataattaatacattcaaaacaaaattaagaaaatacatcaccaattaattaaatttgacctcaaaaggctgcagcttacctttacagctatatatattatgactaaattacttgttctaaataatgtaatgaaacagaaaaaaacaataatgctaacaatgcatattatcttatgagttaattatat

SEQ ID NO: 106465 - DNA, 1051 bp, Homo sapiens
tttatcgagcttcctaaaatccacctgccagattcctcatgaaaacagtctaattgaaatattgctttaaggaacttttagaggtagggaggaagaaaaatatgtacataagactaattagtattttttaatgaatgctacatttgcataaattgaaagtttcattctatggacttattgtagagttgtggttaaatcggcattagtcagcttgggcatgtttcatgattattggtaaagggaattacacttttactggagatgtcatcattgatcaatcagttgaccagcaagtgagcactggaggaggcatgaatcttggggtggtgggagagtcatcaatcacaaaacccagtttgggaggtgagatgcactcatggacagttaatgaacagcaaacagtatgaaatgagaaatgctgaattgcagacaagtctgaggatatgtgagtctctataatggaattaattgttcaaaaaactgaacaaaacaaggaattgtcattgaattcatttgggatgaaggctgatttgcctctggaatggggcaggaacttagactgaccccccactgcctgggtaaatctaaagcagatgctttagatttagtcaatatggatttgaataaaaatatccaagacacaatttgttggtgtaaaccaattgcactattgtaagaaattctgaaatttccactggctaaacgggcaactctaatagaacctttatggctgggaaaaggtgaaacaactggattttattgaaatgatttcagttttttaacaaaagtattgaaggaaggatgaacaaatacgtaatcaacaaataggtgtttaggagtaactgtataccagcttatgtgtcaggtgaataagatagaactcatattctaattacaattgtaatacaacaggtgacctgaaggctacataggaagaaaataagatgagtggcttacctagcctagaagcaatgggtttacttccaaagaagagtggtatattctctgaaacggaaagaatatagaggagttggataggagaacgtggggg

SEQ ID NO: 106466 - DNA, 1035 bp, Homo sapiens
tcttgaactcctgacgttaagtgatctgcctgccttggcctcccaaagtgctaggattataagcgtgagccaccacccctagccaagagttatggtttttttttttggttttgtttttgtttttttttttaaagagaagtgttgtatgtctactcttctaacacgtatatacaacttaagttaaaaaaaatttttttaagctagtaagaaatttctgggaagtccttaccatctctggtaagaagtgttttcatgcaacagggggaaaaaatatctttttttctaataaaactgtggaaacaagatgagtaattactacacgaaagcacagaatgttttccaaatattgtgatgggtgtttattctacatttttcttctctcaaggccagtcatgggcttgtacagaaatatgaacttcagttctcaattattggtagatctgaagggagtctatgtacagaactattgtttaccatcccgagaagttaatttcatagatagatcatttaaacaaatatgaccgtgttttaaatttgatttaagaatgcatttggggtgattagcgatgtagcgactcctgcagctggtgagccttaaatacgctttataaagattcctgtccgttgccagcacagctgtaaacacttggcgcctttgctttgtaacagttacagcacttgccttttttcccccagccacagagcagtgctaatcattaagtatgtttaataaaaaatatcttctcagcctccaagtgactctctgttaaatattttaaaaacttatcccacttagtgagacattcttgacattaaatagatttaataagaaattgttagtttctgatggttttcagtgttaagtattttttataggtagttacttttccagccgacaaccagctctaagtctttaatatttaaaatgttgcttttatagctgcgtcctgcatctgtgtataaaatatagcatgagcgttgcctctaaattttgaaagactcctcctaatgaacataagaagaaagcattttcat

SEQ ID NO: 106467 - DNA, 1011 bp, Homo sapiens
ttaaaatagtttaatatacatagaatggtaacagtcaccagtgccagtcattaccttgaataaaatgtgttaggtcttctcttaacaggtcatgacctgaacacaaggttctgagcatccccttcccactaattctgatggtatgccattgaaaatggcactcaagctttatcttttgtaatgcaagctttgcattaattcataaacatatttgaagtgagactagttatctttgcatgggcaaaggtgaggcaaagtgatagggccagacagaacccagtgaccattcagccaggatgtctcaatgacagtgctccagcaggggcatcatgatctagattcatctataggaggtggttgatctctccaagatgtgttctgtcccttctcttccccctgtgaggtggtcgcacaaagcaccattcccctctcttggttgttatgtgagggctgtgactgtcaaactttgggatgctctagttaccttactagggcaccctctccccactatacatcttccacagaaggccagttataacctgttaggcaagaatggaattggaggaacactgaaatggcatgatgttgatgatttgattggtggtatcagttcatttcccccagagcgtatccttgcattttctcatccactccatccattcatgctttgaagttacgtgtgtggggatggaccctccaggatttcttctgtttttctcccttctgtgtgactgtctatctttcattgaccttttctttctttagagaggtcaatagcagtatataatggaggaataacaagtaccttatgtatacacttcctgagcctgtgccaaacctcactaactgatcatagaattttttcccaagtctgatagggcttcttaatccttctcaaagaagggagccaagcagccaccaccaattagtcatcattggcatgcttgctgccttcattttatttcaaagtctttctttcctgcatttagtctgggggacttactgtctctc

SEQ ID NO: 106468 - DNA, 1002 bp, Homo sapiens
tctcctgcctcggcctcccgagtagcgtgattacaggcgcgtgccaccacgccaagctaattttttgtattttttagtaaagatgggctttcaccatgttagccaggatggccttgatttcctgacctcctgatcctcccagctcggcttcccaaagtgctgagattataggtgtgagccactgcacccagccttgtttggaaatttttaaatgagagcagaagtacccatccaatggtaaaaaataagaaggatccataaatccagtgttacgaatggtataggaaaattggtattctcctgcactgttgattagagtaaaaaaatgtgtgtaatcttttcaggggatggtttggcttgaactgcttctagatatctgtcttagaggagggattttttgctcactgaggcatgtttacatatttttttagaggtagtgatttttaacctttctagcttgtggagcccttgaagattccagggaagtccatggttgtgtaccgcatgagaccagggctgaaaatgggtctttcagcacatggttgtagatggaaccatagaaatctgtctgatcaatgaactgttgaagtgatggacactgttcagtgaatacatgtaccacctttggcagtctttcagggggcttgcagccctgctggaagccagattcatagttccataaatttgtttttcccccttgatcagtcatctgaccaatgctgttggttattttaagggatactgaataataataataataaaaaatcccggtggagcaatgcaacgtattttctcctgtgtgggaaataactcattcattcattccatagtcatttaatgagtgcctaccatgtgcttagctttgtaaggaccctcccagtgggagaggtcatgatacaacatccagaagaaccttttgtaaggggatctccaccagaaatgataagatgacctcaggaacagaagagctcttttaaagaacagatgttctagaccagttga

SEQ ID NO: 106469 - DNA, 1050 bp, Homo sapiens
ctgacaaacctcaattctatgaaatttctgccctgtacgcttccaactgtcagagtaaagaaagaggctcagtaactgttccggatgaagatggggttggaagaggtcagtgtaaaaagacaggacaactaaatacaaagtttgatcctagattgagttctggactgagaaccagaaaatgatctgtaatggactttatttgggcacttgccaaaacttgaaaatggtctgtgaattagataatagtattgtgttaatgtgaagtttggtaattctaataattattctgtgattatgtaagagaatgtccttattcttagaaattactcacttgagtatttagtggtaaaggggcctattatctcccatttgctcccagatgattgaggaaaaaaagtgagagtgtgtgtgtgtgtgtgtgtgtgtgtgtgtgtatacagagagagcgcaaaagaggtatagtataaataattggtgatactgggtaaaggagatagggaacagttaatagatccctttattgctggattttccagatctttttttctttttttcctttcttttcttttctttctttttttttttttttttttttgagacaggatcttgctctgtcactcaggctggagtgcagtggagccctcagtagcctcaatagcctcaacctcctgggctcgagcaatcctctcacctcagtctcctgaataggtgggactacactcaccactcctggctaattttttgtagagatgaggtctcactgtgttgcccaggctggcctcaaactcctgttctcaaccagtcctcccacttggacctcccatagtgctggggttacatgcatgagccacattgcacctggccccagatcttttcttcagcttacgtacaccacgtttcttcatagaaggattgctgtagagtgagcatcacttagattaacattactagaaagaacagactttggggaatattgaacggagggctctgggatctagagcccagaatgttgaagggagggctctgggcacagttcattttgaggataaa

SEQ ID NO: 106470 - DNA, 1048 bp, Homo sapiens
gcctcccaaagtgctgggattacaggtgtgagccactgcgcccagcccccttctgttcttaaactgtgattggtttgtgtttggtagaactgggaccacacaaactgctcttaaaacagttcccacatgcctggctaacacctggttttctgtcatcgttcccttagcatgctgcttttcatgcagctggacctctgctcctgtggccctgccgtcagatgcaccctcgcttccttctctgtcatgccaacctgtgctcagacctccaagattctacttcatagggaacctttcttaaaagaaaatttaaaaaaaactttttaatgtttttatgagtactggaaggactagtttatggcatgctctacccaaacactttctatttttttcagctctataaactcttgttaaatataagaccaattagaattttaggcaggcaagacacattggtgtgcaaatcaacaaaatacctcactgtgaaatctaggttttgaatttttaaagtatttcgaggacaccgctactagtttgcatataaagatatttaatgtacacttcatttgttaggtccttttctaaatttggcttgctatcctaaagacacaaattagaggtcagatgataaaaaatagaacataattagaggccgggcgcggtggctcacacctgtaatcccagcactttggaaggccgaggcgggcggatcactagttcaggagatcgagaccatcctggctaacacggtgaaaccccatctctactaaaaatacaaaaaattagccgggcgtggtggcgggcacctgtagtcccagctactcgggaggctgaggcaggagaatggcgtgaacgtgggaggcagagcttgcagtgagccgagatcgcgccattgcacaccagcctgggcgacagagtgagactccgtctcaaaacaaacaaacaaacaaacaaacaaacaaacaaacaaaaacataattttacatagatagcagctgtattaagctgcttcctttgtccttcttatttatttatttagatacaaatctcc

SEQ ID NO: 106471 - DNA, 1045 bp, Homo sapiens
tcttgcattcatttgctaactcatttgttcactctgcatatttcttaagcaccttctctgtgccatgctccatggaaatcatgaggtatcctcagaattgtgtcctgccctcaaagtagttgagggacagtaagttttcagaagggccttaaaattctttcttcaaaagtagcttcattttatctttgggagctaggggaggacagatcaagtcaggcagataaaatctcaagagaataatgcaagaattatatcttatgtatatttttaaaatgataaatatttcagtttgagagtatgaagtttcgacttgtaaattttagaattggactcttctttctccatttttcttctgttctggtataaagcagaacaccactattaaagtataattcattccttttatttatggtgacctaaattaatctttttattctttttaactatcccaaaagagtctttttctttttttgatgaagaataaattttctatcgtgttatggttttaatttttttttttcttttcatggttctgatggcagtgtgaaacaagggcctttaactctggagagagagagagaagggataaattagtaattttacccatctaccaaattcccaccctaaccccagacccccagaaaaaaacaagaactatttttgagtctgagaaaattgagtttgtgttggagaatggtggtagattatttagaacttccttcttagactgctttacaagataatgacggtaaactaatatgattcctaatttattcctttccagttgctgctgtttgaatatcgtccttctggcattttccacatccttggttttatccagatataagttcaattctttcactacattacctagaagtgcaatttcagaatgttttgggttgattaagaagacttttttttaatccacaaacaaaaattaaaatacatatgttccaattaaactattttaacagctaattgatttcataggacttaccattaagtgaaggccagagtcattcttaatgttcaattgcagttttgg

SEQ ID NO: 106472 - DNA, 1001 bp, Homo sapiens
aaatgccctcttatgcttccataatatgaaggcatttatccactcagtagagatttattcagtaacgtctgcaggcttggcattggagtagatgctttaaaaaaaaaaaaaaggaatgatacgctctaccttgcaagtttttcagagagacaggacttgtgtgtgtgaaaagtgcaatagagtttgcaaggcagcatacagtcccattagcatttgtattgcttcatatttctagactaagtgatgttgcagaacaccagtattctgttctatacaatccgttcacatttctaagagcatgagcgttcatttgtcttttcaattgtttcccactttctctgcatacacaatacttgctggtagaaattgcgagggctgtaagttggtaggttctctgtaatcaaggaaaataaatagtttctgacactagatctttgaaatggtgtctgaatatgcacactttggggctttaggaggcatctctttggctgtataaattactggaagcaagctgtgtgggatgaagcaggagagcttgtggaatgtcattgttttagagattgtagggctctgtgggaagtgattctagctttggaacctttacacagccaagattcttggagccagatgtagggagtctggtttctcttcatacatgtacactgtatggaataatatttaagatgttattatgccagaattgttgtagtgagttccttgagtggaactgtgtccccttctctgtgcatttcttgtagagaagttaagtcaaatcaacaggcagtgcctgcggagctcggaaactgttggtgaacgtggtattctggaatccacgaggccagcctttcccagaacatcctttgaggagcagtactcctggaagatgctccacctcgatcaagtcctggaaagtgatgtctagtctagcacagcttcctcttagagactgacagtgtgctttaacataataaaggctctctgataaagactgaagtaaaaag

SEQ ID NO: 106473 - DNA, 1061 bp, Homo sapiens
cacctgaggtcaggagttcgagaccagcctggccaacatggtgaaaccccatctctactaaaaatacgaaacttacctggacatggtggcacctgcctgtaatcccagctacttgggaggctgaggcaggagaatcacttgaacttgggaggcggaggttgtagtgagccaagatcgcaccactacactccagcctgggcaaccgagtgagactttgtctcaaacaaaaacaaacaaacaaaaaaaaaacgtagatttcctaggttaacaagtatactcagttttaattttgaaaggctgttgttcatgtaattctcttaaccaagtacacaggtaatcagttgaccatattctcattaacacagggcatttttgttgttgttgttgtttaggagtcattattttatctcacaagtttcttgtgcttttatgatattctttctctttcctacatgtagtagccaaagtacttcatatacttcaactgtttgagttatgtaacagagtcagtaagaagcagaataaggaatgttaacctctaaacataccaagataattttttaaatgtgtttatttatttatttgagacaggatcttgctctgtctctgaggctagagtgcatttagtgcaatcataagtcactgcagcctcgaactcttgagctgagacaatccttccatctcaacctcctgagcagctaggacaggtgcatgccaccttgccctactaatttttagttttttgtagagacagggttcactatgttgtccaggttggtcttgaactcctggcctcaagcaatcctcccatctcagcctcccagtgtgctgggattacagacataagccaccacacccagccataaaaatgttagtaactattttaaagccccaaatcactatggtaatttacattcttgggctactatttactgacactgttttgctaaactgggattcaactgactgttgcaattatacagaggcagagttaaagctcagattttcaggtcatcagaaaaatagagattttcagagcatcgtcacatgtttctcatctc

SEQ ID NO: 106474 - DNA, 1110 bp, Homo sapiens
aggcacattcttacagtgggaaagaatatcattacaagggttgctcaaaaaataagtttcctatgatgtttttaatttgccggtcaaggtttcagtatattttaagcaactttttcaattacagtaataaccagtattttggggtgtttattcgataagtggattattgtagcaactctcatgacagctgtaagaggtttattgtcagtgttgtctttattgtcagttgttgtcagagtttggggaattgagtctcaaggaggttaagttacttgcccaaagtcaaccagctaaccagagcccagaacccaaacctgaaggtctgcccaactcttaaagtccttgcacttgcctgtgaggttctgctgacttccgttgtcataggacagattgaaaatccatctagtatcaggtaggccttttagtatcctttggaaaaagttaaaattcagcatgattgctgtgctgcctcctttcctgaaatgttacaccctactctgatgtgctttattggccggaaatcttctttccataaactgcatcaagttggtgatgctttatgcaacagaaagagaaataatttaccataaacacagcaaatcattggataaatctatcttgatattttcacataatggtattctctacagtaataaaaatgaactactacttggacaaacatgggtgaatctcagatataacgacgagtgaaagaaggtgagacaagattctggtgtatgtttccattaatgcctatggaatatggggctatcaactggagggtcttaaggaagccttctagagttctggaaatttttgtcttcatctggctgaggttgcatgggtgtatacagatgtgaaaatgcatctgactatatacttaacatttgtgtagcttactggtttatgttacacctcaatgaaaaataaagataacaggcaaatcacaacacacatttcttctgggacctcaatgtctaatgggaagaccattttaaactaaggacttccacgttttagagttgtttcctaatgagacttcttataagtcacccagcttacaagtggatcagtgacctgacagtcttgaggagctaatgcacaggcaat

SEQ ID NO: 106475 - DNA, 1150 bp, Homo sapiens
aagccaggcagtgatctctttctgggtaagggctaaccaaaatgcaaggatgcaaaataaccacattataaatgctttctgacagcaacgtgaaccaaaatctagttagtggtcactaggatgttgaagtcagaatgaaagaagctacagcatccttgccacgtggctctttaggtaagagccacggaaggaggggagattcagatgtgaaatcaaacatcctgagaagtgcttgcccttgtcctcatacagcaaattagcttctgaatacacagttacctgctaactgctggggtgggtgaatcctcttctctgcaattctggaaggccatgtggagtctctggtcctgccctttgtcactttcctctgcagccatggttaacggtatagccattcaccctcagcatgcataaatccttttttcccacaagaggatatcggctggatgtgatgtttatggaactaaaggagcagctggcggtgtcggattcaaggcaagtaggttgtcttgaccatcctatttagcagatggccaggacttgatagagcaaaaattattaggatccaagtcaagggccaaatggcatgggggacagtagaagtaaatggcagcacatatctgaacgcaggcacatgtcgtctgatggggtctctgtgcttccttttcattttacttcaagcaagagtaaacacaggccctcctgtagagcctccaggtaaacatatctctagagattattgatagcttggctactaatttgataattgtgtggatccttatggtgggctattaattgaaaagaaaatgttacgaagtttagatttcatgagcgtttatgtgaatttggccttcagtccgaacctaggtttcatggtttttctgtattgtcagtatctctatatactttggttgtatctaaagacaactgaaaagctttaattcagagccctttttcgagtttgtgtgccatctttttgaagatgactaatgccacgaaagctgctctgaagtggaagtgccaggagcgaagttttgcaatgagagtacgaactctgcagggaaagggggtgtctgtttcttctagtccattttaagctcatttgtgcaattgctgccttctccgtattactgcataactcctttgatct

SEQ ID NO: 106476 - DNA, 1069 bp, Homo sapiens
cttttgaaatttgaactcagggagatattactttcagagccaagcacattgacaagctcagggataaattgcatttgtttgtcattcatttaaattcaagtgttaggtcaacttgttgcccggtgttattgtcctttattggatgtggcatttgtactcagcattatactctaaactttaaacgtttaatcctcatgacaacattatgagactgtatccccatttcacagacaaggacactaaagctgaaagcatccatacctgactcagaattccatattttccccatccctggcctcctgcatcctagatggagaataaaatgtaaacacaggttgctaatacagccctcttcactgttgtcatatttaaaagctgccaaaattgcttagcttatgcccatgaatttttttttaagtggcaaattgattgaaacagtgagtgaaagggattatttcagttagggttatgcctgactggaacaaatccacttattagcatgctctttggattccccaccctgacttttggaaccaagacatagaccagagaatgagctcagtattattagtaagttactttgaccagccaataatctccattttctctccttttctcctcattcatcttctcaaccccagccatattaaccaccagtgaagacgatgggagctgaatggatgttgtagaaggctttgcatttgtgcagttgtttagaatctggggtcacgttcctgagctcagatgaggtgaagtctgagtatcagacatggagaagctgtaatcagaagtgaccaaaaattgaacctgggctaggttgactggttgttttccttttgcatagcctacaaatattattggtgtgtatcagtcatggaagattagaaacactttctttgagccttcacattatcagataatactaaatgcattaaaaagttcctgtcgtagtcttttttgtgctgctgtcacagaatgccacactgggtaatttataatgaacagaaatgtatttggttaacggttctggaggctgagaagtccaagagaatggccctgacatctggca

SEQ ID NO: 106477 - DNA, 1115 bp, Homo sapiens
ccccatctctactacaaaaattaaccaggcttggtggcgggcacctgtaatcttagctactcgggaggctgaggcaggagaatcgcttgaacctgagaggcgaagtttccagggaactgagatcgccccactgcactccagcctgggagacagagggagactctgtccccccttcccccagaaaaaagccaaaaagaaagaaattgccacagacataatgaaatcttctgctggtcagagctagacggctgctctctctcggtcttcccttccctggctcttccaagaaagctatcagtgaaaggacaaataagttatcacctgagaactcgcttctattagtgtcacaaaatgaggctcttgcaagcttttcttgtcgaaacacggcactggcagttgtggctatgacaagatcaaaacttttctagcagaccagctttctcatgtgactagtttgttcacttggctcacatttggggtctccctccacctttttgcccctgccctgggacacccatcatctcctcaccaaatctatggacaaagccctagaatagctagagtcactccaggcctctagcaaaaaaggaagaaataacagtgaatttgcaaatatgcattgactgccctgccaagcatttccagagagtggagaaagctatctgagaaactccacatcattcatctttccgtattccacctgctgggactgaagtttctacaataaagagtaacggagtgtcatctccaggtcagtcctctgaattccttctagaacagtgggtagacttcatcttacacaattgctgttgcatcaccagccacacattcactgtttaaaaagaaaccggccccaggatatggtgctgcctgcactgttcccctgccggggatgcacttggttcagccccttaagaagaccatgtgcctatttctgctgacgttacacatgcaccccgccctctgagccagaaataccacacttaagtatatccccaagaaaaatattgacaaaagacttgtgcatatgagccttattcataatagccacaaactgaaaacagcctaaatgtccatcagtgggaacacagatatagaagttatagactgttcat

SEQ ID NO: 106478 - DNA, 1032 bp, Homo sapiens
ttgacttaacgatccagcatggctagagtataccactaaggaatttgttcttgatcctgtgcatatcattgattcctgcagtctttcccacaaacatgtttttgaacccaagaactgcaagcgatagaatgtggtttcttagccgcaaatgaaattaactcactaaagagaattgcactcatgaaatctgagtattgtttaagtattcaatcttgaggaggtaataatagctatcctcaatgatgatgaccttttgtgccagaaactcttctaagctctttataaatgttgacccatttcatcttcatgaacaacactcttgtgaggtagatgctatttgtacccccattctacagtcttatgaggaaggtgctgtgcatacccccattttatagaggagatcaagccacacagaaggttatttgcccacaatcacacaactggtaaccatgccatggtgtctgattccaaagagcatgctctgaccactaagcctacccacagttcagaaaagaaagagatttgtggacatggagaaatgaaataaaacataccattgattgagttctttctgtgtgctatgtactttactcagcactttatacatatcaacttaatcagtggcaacacaaacatagagagatgggtattcacatagaacatcatggcgtggagagattgggtaacatgcccaaagattcatggttaatgaatgatgaagccaaaaactaagcctgggtttgcctgattccaaaacccatgtttctgaccactatattgtactgcttccttctgagtgtggactgagaacacttcatgggaaggcatgatttaggctgggcagttaactgtgggtaggaactgatgaactggagatagaattgaggcagtgtcagaggaaggggaaccatccaggcagtgagaggtctttaagtcacctcatgaggtttgaatgcatggttggggatgattcttaggagggacatgttagttgtgcaaaattcagcatggactgaattacaaaaagtgtca

SEQ ID NO: 106479 - DNA, 1036 bp, Homo sapiens
cctctctctctcccaagggaggaaaacagctcatattcatgtggccaaactggatccttgctggctggctttgtggaggtcacagctgtgtcagcccttggaaaggaaagcattcgccatccaagtattatcgcttcagaccttcccaccctgaccctgccaacattctttctgaagttagcacagaatgttcatttcagaaaggcgaacagccaattcggaaaagccaagtagtcaggaattccatgtctgcctctgacagaaagaaaacattcctagtctctcgttcttctacttctctacagtctctgtattctctcttttcttccctgtcatccagcatgggtgcctgcactcaatgaaaatttgagcatattcaccatgaaatataacggttagcacaaagtgttgacttgtatgatgtggatttctttgaagcctttcagagtacatacaggcaaacagtaatctttcttctcttgttcccttttgtgagtctagttgggcattcaagtcagccctgccagcctgtgcacttgtacctctggcttgtgtgataatctagattaaaatacagcattgctaatggaaccgcacattggtttgggattccccacttagtcagcatggcttatgtggcccctctaaacatcttctgaaaatatcaggccaaaatcatgtcccccaaacaaaatgggtcaccccaacaaaatggcagcactctcggcccttctgtgggatgtcagaggagccggacaacacatggagatggttgcaggcaacatattcatgatcagtcatagaagatgattagctttcagtccagttaactaggatttgttttcttctagaatagtgcttctcagatgatggttctttgcccataggcaactaacccaacccttcctttccaggactgtttgcatcttgtaggttaaaataaggcactacctatgattttccccagcttgaattttacttaagtgcttgtagggggtgctatcaaaaaggcaataaataagtctgactgcatcta

SEQ ID NO: 106480 - DNA, 1758 bp, Homo sapiens
gtggggcctttgcccgggaactgcccgcttctagccagtatttccctgtctcctgtccatatcatcaggacctttgaattgctcccaacaccccagtatatagcagtcttactaccatccacccccggcaagaactcccataccagcctcacccctactggaaatcacttgcttattatttttttaacctattatttaacagtttaaccccggtatctgataaacataagtttatcattttcaggcatctcagtctttttccatctctacttgctcatgtgaaatgaatatgaatctctctcccaggaaactagaacttctggttctaccctcacacctctcctctcaggctctgggatttatcagaattgggtcacagagctccggaaatgctgaggggagcaaggctgatcaaagccctattacttggaagggaggaaggaaaaagaaggaattttcttttggtgcgaaaagggatatttcccaacccagtgctatccttcttcaaaattatgagcttgggtaataaagggagagcttgtgtcatttatcaacactggaggtagagtgggctactgttagtgtggtacgttacgtggagaggttttctttcaagagtgcccccacccccaacaaaagggaacagtttattggcatatggactttgtaggaacagggggaatgggattctattccacaagtaactgcagtgacatgcactttgatgatatgaaagagcccattttctaggctcatgtttctgaaaaggagctaaaagaagaggagagggagtttaagaatgtgatcatttccttcctgtctgtgtgattttgtttgaggttagtgaggagaagtgagtcaggcaccaggttccctcaagaaatgcttgagattcaagtaatttggggacaatagattgtcaagggcatcattctctgggaacaatgggagaattaagaagctcacaaacctgtgaaatatcttaggttgggctgccgtggaaaacctcacatgaactaattttttttttaacctagttaaaaaaaaatgaagaaaataacccaactagaaagctttctcccaagagaagttgactgagaaaatcaggtctcctggggattttgtgagagttatatgcagaggatgtggattgggggggtgaggaattcctatcacaagtgagtgcaagatctgatagctcagaattgctgagatggtgacagatacaaagctctttcctgaaaaaatgggccaagcatatgatatatcagctgtacagagaaaatgcatggcctttattatccaagaaagctagggaggataatggtttctattgtgttaaattgtcaaagtaggcacgatcttccactgaacgggccttctctgaatttgaccacaaccacagaaccatccttaaatacggcaaattcatgtgtcattctactaggtttgtttgaattatcatagtgctcgttgctgactctttaagacatgggaatattaaaatgttttctgatatttttagagccaaagagagagcaggatctagatgcagtcctatttgtgtgtttaacttattattggagagctacacgtacataaaagtgcagtacccgtaatacgtgcacagcttgatgaattttcacaacctgagcacacctgagtaacaagcacctagatcaagaaactcccgtctaggatctcaggactcccccatcatcccccttcctaatcactctgtgttcccaagggtaacca

SEQ ID NO: 106481 - DNA, 1697 bp, Homo sapiens
cataggcttgttgtaagatacatattttctgtcttcaaggtggtaatggccatgactgtgaatgtgttggatctgtgtttccattccactgaaagaccctaggaccaaccagagattcattaacttggtaaccacccacttacacttcactttaacacccggtcatctttcacatcagaggggtaaccagagcctcagttgactgaatatagctccccgcctcctctgttccctggttatgatcgtgaacttgaggcagccagtggtgggggcctgtgttcatgcacccatattttatcaggatgattggacgtcctggaatagagaatacagaatccagcctttcggtgccaagcacaagaggcagggccccttaagaaagaagtgggggaaaagtcatcttaatattgtattgttgctgaagaaagacttctatatggatgtcatccataaaaaataataaagctctagttgcagtaaatggaaacaatatttaggcttattggattgttcaagggacatccgatttgccactctgccctttgtcggcaaataacttagacagactttaggatttaatgggctgtcatttcagttattctgcagcatatcccgggtacatgggagagcattcagtgattaagtgctgaatactgtctattgtgaagacttttggaacagggaacagagaaaaataactttccttccaacaacatgaaacatatggtttattaatttaaccaaacctgttcaaaccgcagtggaatcaaaaccacttgatctgataatttgatttgatggcttaattaaaatgacactgtataatgtaataaaagcaaaggaaatggagaggacaccgggctgcctgcataccctctaggctcctaagccgatgtcgtgtttttttggtgagtgttttttgcctctgctgatggagggatctcttttttagctatgttttcaattctaaacattgcttcctgttttggttaaaagcacttttaaaggacatgtaccaccgtgcaaggatgcctgagtaagtagcctatttaaaatcagtacattgagaaagagggtcacattttctatccaaattagcaaacaaagaagtaaatccatgactggtttaaaaaagagtttgacattgaaatcatggttttctgctattttgggagaaaatattaatgttgttctattttcagtttaatcatttctactcaccagattaatgagcttgaattacttatcttattaaaagaagctctgatatgaacacttaatgcctttgcaggcagctgccctcctagaaactcttgcagaaagttaccttgttactgccagaaacttttagcataggaaagtattaagaaaaacaaacttttcatgcagcccccatggagagtttttaacccccttctttcaaaaataactttgatttgtcattctttttttaacctggagtgtttaagaaagaagacaaaaaaaacaggtctgtttcaagacccttggaacatcctaggctctcatacttctgaaggtcctgccatattatatccaacatttttaaatgctcagacatttcatgattactctaagtttatgtaaatatatgagttggtgttaagttgcatttgataggttgacataatgttgatattttatagacttttaatgtagcattaaatattttgtatcaa

SEQ ID NO: 106482 - DNA, 1794 bp, Homo sapiens
gatggggtgggggtggggagcctactatttactgtggaaccactgagaaaatatccttgacattgatttaggatcagaggaccttgggtgctctgctagaagactcttcattacttaaggaagcctgggatcataattaaaggtggttcagagtgaaggcagaaattctcagagctggtgaggagcagtaccttcatgcctgtgagaagcaatcggaccccagtgggaacataatcaggcccctgaaaggggaaaggctgttgtcaggaggcctcacaggggatatttgtttagagatccgggtgtggcacctcccgcatggttaaaaggcttcaattttgtgcaaaaggacgtatcaagaggtctatcagacttccctttgttaggtgcagtttacaaggaccattgagaagagatagataagtacaagtattgggcatctgtggtgtgccctcgagagtgctcctggtgttcattttagaccagtagaaaactcacctcgccttgggggccagagagctgccggggaagtgggctgagcagaggcaacggggagtggtggagactatggcaaaaaaaaagaaaaattgagtacacactcccatctaaaggaaatggttgctctcctgctctagctcaccactgccacgtgtggatgcaggcgtgattttaaagcccatatttatatgtaaaatataccatttttttaacactgtgtgggccatagagtgtgtccacgtacttgccattgggcctgaggcccacaactttgggtttatccacagtgttccctcgtaatcctcactgcaaccttgtgaggaagataattgctagaccctagtcatccattttacagatgcggacacaggatttgcatgggtctggctccaaagcccacactttctgttataccagctcttccaaactgatctatagaattctgttttgctgcgtttgcctgtttcctttttggacttttgagggaggtgttgtttgaaagaagggtttccatcacttaaagagcaagcagaactttggaagcacaaggcacagtggtgtctgcctgctcgcttgcctgagttatttgacgggtgtctggtactatcgttgccccagtcgccaagcatcggtggtttttgttccctctgtagactgaatgcttttcttattagcagaaggcatgagttaaagaccagagacaagatcctcaacacatttgaggctcctggcagtgaccccaggaatgaattgtgtggcactgattttgtacatggaatcctcttcaatggaggacgctcaaaacagcatccctcattccgtcagagaaacgcgagcccctgccaagggtaccagtgataaggagcttggtggtccctgcctgggagatgcttgcagctcagtcagggggacacagaggtgggtaggtggtgaggacagagggtgatgggcacacagggtgaggagggaagcagtgagagtgcaggaggacacgggtggcccatcggcctcagaggggaagcagggtgttgaagctggatttttttcttttcctttttttttttttttttgagatagggtcttactcggtcacccaggctggagcacagtggcatgatcaaagctcacggcaaccttcacttcttgggttaaagtgatcttccaccttagcctcctgagtagctgggactataggtgtgcgccaccacacctggctaatttttgtgtttttttctagagccggggtttcaccatgttgtccaggttgctctcgaactcctggcctcgagcgatcca

SEQ ID NO: 106483 - DNA, 1046 bp, Homo sapiens
aaccaaggacggcgagggcaccgaggaaggagagaaggatgagaaaagcgagagtgaggatggggagcgggagcacgaggaggatggagagaaggactccgaaaagaaggagaagagtggggtgacccacgctgccgaggagcggaatcagacggagcccagccccacaccctcgtctcctaacaggactgccgagggagggcatcagactatacctgggcatgagcaggatcacactgccgtccccacagaccagacgggcggaaggagggatgccggcccaggcctggaccccgacatggtcacctccacccaagtgccccccaccgccacagaggagcagtatgcagggagtgatcccaagaggcccgaaatgccatctaaaaagcctatgtcccgcggggaccgattttctgaagacagcagatttatcactgttaatccaggtaagtggtgcaggtcttcttcgagggttcctgctcctgtgaatagtcgtaccctttttcaaaaaattgggagcagaaggtgaagcttcagaaggtacttaatattcttagaatcatatatgtctgtcatagaaaaggtgcacacatgtgaaatgtgtatgtgtgtgtccctgttttactccaaaagcctactctcttacgctggagtaagtctttctttgatatttgttttcttgcctcggaataactccagggacttcaaccaggcaatgatatacatgaataaaaaaagccatcgatcttaagaagtttatttattaagatttcattccatattcattatataatgtatctacaaatggctagtttggtgccagggactgggcagggtgctgtcccaggggatcctagtccctgcctaaaaagtttaaaggggaaggcagacagatgacaagacagtagctagctggagcgcatgcccagaagttaggtagcaggaacgttagaaagccagcaagctagatggtggttagtcggcaagctagatggttaactggcaagctggaaaactaactaactgaagttttcgattgtgaaatg

SEQ ID NO: 106484 - DNA, 1221 bp, Homo sapiens
tgaggcaggaggatcccttgagcccagaagttcgagaccagcctgggcaacatatcaagaaagtgtctctaccaaaaaaaagagggaaaaagcagtatgatacagtctagtctcagggcaaactgagattctagctctttaccagcaatctcatcataggcagccctttgtgctgatactcagcacatctgaagttctgtatgactgccacttacacactcagatgttacagagaggagtcagattcagcaaacacccggtgagtgctcaccatctcctgctgctgtgtgagggtgctgaggaagagagtggtggtgatgataagtaatgatgctgttgctaggatggtggcgggtgatggtgttgccgaagctggggtggtggtgatgacaataatcacaatagttaacattaaccaggtgccaggcaacattctaagtgttttgtatgcattaactcatttaatcttcatcccaccacaatgccgtatgcaatattattacttccatttacagaggaggagactgaggcacaacgaggttaggttagttgcccaaagttgcaaagctagtaggaggcagagctttgtaactgttcttccatacacagacggaaatcagccctgcctttggggacctagagtaacaaaagagcgattataattgagtatgatgtgtgcagtaagagcaacacaagatgatgatagtggtggtggtacttgtcatttgcttgatgccaggcacacttctaggtgcttacatgcaccttctcattgaattccccaacagtcctatgaagtaggctcttttcatcccatttgatagatgaagaactccaggcccaaactggtttaagttattggttaaaagtcacacagaaaatggccaagccaggatttgaacctataatctctgctctgcccttaagagatagtacaaactggcggcttcgggaagcctcacagagaaggcagcatttgaaccaggactgaaggatcaataagatgaattctggcatcaggaaaggaaaggcactccctgcagtaggaatgggaggggcaaaggcagagaggcgggaccatggctcagcatggtcactgattaggtgagtgtggctggaaccgtgacagggaacagcaggagatgatgctgggttggggatggaaggctctgctcctgaagagccttgctttccccactcaggggtatcctgagggctatg

SEQ ID NO: 106485 - DNA, 1980 bp, Homo sapiens
taattaaataaatactttcaagtgttcttgtgtgacagaagtgcatctttcaaattctgtagccaagtctcagatgctacagttatttaagttttaaggagaaactaaatataggacttaatatatagtaataacttgccaactgctgttcccatctccctgaggtgcctctcctatttattctccaatctgtattgtgaattaagaaaatgtttgttctgagatgagaggaaagcatggggtaaaagacaaaacccgaaatgtgtctaatggcaccaaattcagagacatttgtggcagaagggaggaccaaatgatctccaagttcactttactccaatgatattttaagccattctgtttgccagggcagtgtgtcaaaggtggaagagtgggtatatgaatgacaagggtcatcactgtgtttgtgatatcctaaccttccattaacaccggggtaatagaggctgcgaatatgtaaagatgacttaaaagagtaaagttcccactgggtatttcttacctcagcataaaagctcctcataagctcctttgtgcataagcatcctcttttgaaaatgtcacagatgaggcctgatgacggggtctgtctgtgttagatgggaggggagggcatttgtatgcaactcttggtggccaattgaaaatactgtattctacacctgttctcttttgttttttgtccatttagagggtgtaacaaaataaagtccaagggctttcccagacgtttccgtgaagtgccttcttctggggagagaggagagaaggggagcaggtgaggggcggtcaagcttaagtggggggcgtcttgatggccgggactggcttgccaaatttttgttttgttgccatggggattgaagtcttgtagatggcacagtgctgaaactcacctgctttacctgaattcccaaaagtaagacttgcaaatatcaattcagcttgtgggtagctggtaccaattaaaagtatgtcctgtgtgtgcttgctttgctttattttgcagttttgggggtgttatttgtttccgggtttgtatgtactgggggtgctctatgtttgtgtgtctgtatgtgtgttgcatccattttctttccaaatttttagatatttgcatggttttgagcttttaaaaaaacatataatgcatgcatatagccttatgtgaaaaatacctcttagaaacctaaatttgtagataagttagggatgaagagtaggaaggggagagagaagtgagcaaacatggatgtactatgtgtttttccttaagaatggtgaagttgttttttttttttaaaaaaaggaaatgcatatgagttctggatagtttgaatacttggaaaaattattgtcctggaaagagttatagtaaatgtttggaactcatgattgtacagttttaatcaccacacttgagtctcttgataatatttctgtaaggcctgtcttaggcaaactgtatttaatattaatatcttttaatattaagttgctaattagactaattcactaatccatattatgtcaggagcagtccctttttactttcaatgaaccaatttataggatttatgttagaatttttacatggaatgattcatctccattggttgtgggtaaatcagaatactgagatgaaattttagatatccaactattataatcagataaacctatgaaatctgagaaggtatagtttaggagttgtgacagattaatgagaaagtatatgatctattttcttttacactgtactgtgcaattttggccttgtagggaaagcaataactgctaacactggtaactaaattattctgtgatccctttttgcttattaatgtctttaatttctaatacattttcaaaactaaggatagaaactgaaatagaaatttctctgtatagttttggagtcaaagactaatcttaagagaggaagacgttggacatcac

SEQ ID NO: 106486 - DNA, 1032 bp, Homo sapiens
ataaaagggctttgaaagacagggtgccccctacctctgtcaggcttctgcaggaggctggaatgcaagcccttcaaccaggctctctctcacctttgcctttttcattccgctctcattttctttcctggcttgtatctccacctaaaatgtggccaggaatcaaaagaagagcccccagtgatagctaaattgcaaccctccaaacagctacaagagctgttacagaatccctacacattaacttcatgtggcattactcttctgcccctgtcatctccctgtcccacagcaggaaggaaggagactgtgccgctaagacgcgttgcacagagaattgctaaaagcaggacaacagctgtgagaggtgattatcctcccagaaaggagaggaaaaaaacattgaagatcagacccaagtatttaattttttaataaagctgatttaagttttgagtaagtaatacttgacatgattcaaaataaaaaagtttaaaattatatgcaccactaaattaccatcccatcactcacccaccctgctccctacctcctcacaaataggtagcccctattgctagtttgttgtctattcttccagggattgttacacatatataatatataagcaaataatgaatatccttttatctccttgtacacaatggaatacagcatatgcaatcatgtgccttgctgttctcacttaacacacgatttccctatgcctatataatttcctcatccttttacacagaagcatggtattcctttgtatagaagtgtcatgatttaattaacctatcctctgtggctgtcattttgattgttctccgtcttttgttattataaacaatcgtgtgatgaataagtttatgtgtcactttgcaagtggataagcatgtctgtaggaaaattttcagaggaaaatttattggctgtatcacaaggtacatgctattgtgcatgtatggtgccaagttgccctccataatgggataccaaggtgggcttctctctgcagtctatgag

SEQ ID NO: 106487 - DNA, 1010 bp, Homo sapiens
aagcaccagaagcacttcggtagcatttagggctatgctgtaagaaaagtgcattcttttgaacagagacgctcattcggtgaggcaaaatgcttactctgtgagagggatatgagaaatgggaccaacttagggaccaacagattcacatttcccgtttcactttcattctgtctcacatacccactgagttcgaactgaggagataacttgtgcaaactgagctctttcttgtacccatctgggagcattcagtgaatgtttcatgtaagtccctctatcttgggtatcttgttgatgggggtgggctttagaaagccatctaaaacagtggttttccagttggtttaagtggcaggaaacttggaattcaggatgtcggaacatcattattattaataatattgaaataaatattgacaacttcaatgccttcatagaaactgaaattaattttcctaccagacaagtatagcagtccacaagggtggactctcaggagccattttccctttctcacagtggttcataattggacacagtacataccagaatccctagagggagtcttcacaatacacagagctatatataccccaccctgcacctgctctgttagaatcatcatgaatggggcttaccctgcctgggtattctaaaagctccctaagccaaagagctatgcactgcttgttaataaccaccatttgactgatactttactgataagagagagagagagactgagagacagactgactgactgttcagggccctccaaaattaaggcatacctaaatcagagtacttaaagtgtcagaaagatatatgctgcaaattgtacaatagggggaagtagaagataactaatttgggtcattactaggcctgtcagagtcagtgaaaataatgttacctggcctcagtttcttaaagggcacagacagcacccaggcgttggggaagggatgagaagtaaaagggcagaggtggaaacatgaaatatatgg

SEQ ID NO: 106488 - DNA, 1032 bp, Homo sapiens
gacccttctctggtcacaatagccattcacgctgagcagcttcattaaatattcagcctgtgcttccggcagctcattagggccgcaatgagcagtgacgtggatgcaggaaagctgagggccagccagcatcggaggcagaggctgagtgagctgctgatggcttttctcttcattgcctgtcctatgatgaccagtgtgtgctctctgctttgcttgaaatacaggtaaaaaaaacaaacaagcagatgacacgtaagggcttcaagaccttgtctcagatgttgtctggcaagggcctctgattctgagtgcttgccttcctgaagccctctgacccctttaaagagctgtctgaggcttagggggcctttgcatgaacaatgtggtgctattgtgtacttgggctgtttgatgacgatgttggaaggggatataaggtgtggttttgaacttggtgctggggatttagaatagcaaattattcctctgtaacgtaccaaatttagaaatattgtgagataaccctagcactctgtgtggtaggtttactctctaccatgttttcacgtatttgagtagttaaatactaagcctttccctttgaactatcagtttggatgcggtgatgataaaaaaaatggatatgctgtagcaattttgggcccctccaacaggctgaatgttgtccttgtatcttgttacttttacatgagtttaccctcagtgctgtgtgatgtttaaagctgggaagatctataaaataagaattaaaagaagatgaactcaaataaagtatattctattattgacatgtttttctcttttctacacagaaaatgttttcagactgctcatttctatgtggaagacagcagttcacctcgagtggtccctaatgaaagtatccctattattcctattccgggtaagtaagacactgctcttatttccaatgggctaattgtttttctcttttattctcagttttatgtgataaaacaacaaaatattttatagccttttaaagct

SEQ ID NO: 106489 - DNA, 1058 bp, Homo sapiens
gaaaatagtgttgtatctgtcatttctaagtatatgaaagtcctatagtctacatactagagtgattctgtggttaggttgtgtcccatctcacccattttgcctcttgtttgaaaatgagtttattcttgggctaatcatttagagactctccagctttgtacatagtaacccttttctcaacttgagatcattttcattgccactgatcattattgtagaatttgcttctaaacattttaagtgaagtgatcagataattttggaaattttcttgaactgtgcattctgctaaatattctggagaaacattttggctccgcttactctgttaatgctggttacatcatgagagctatagatttcttgggcatgcaaaatgattgcatattcatgaacatcttcaattctgaaatatttgtaaataacttggcaatttttttcataaggttgcctattaacatgattaggactttaattgttcacacaggaagaatttgtacttacagagcaccacctatttgataagtaacatttctatgctaagcaacttggattatgaacacataagtcaccttcctaaaacaaagtataagagatgctattttccacttaagcatgattcaagtttgaaaatgtcaatagatgcaaaaagccaccctagagctttgctctctcgaaagaaagaaggaatgacatagtcaatgttaactgtcaccagatgaagagaaatcagattgtcaggcctggatctataaaattcttgccaaagtaggacctcatttacacatacagatcttcataccctttgctaagaaaagcatctgtggcagtttagatgtttgtgcgtttgccaaagatctttcactctgaataaagtaaatgtcatgtctgttgtttatctcaaattcagcagagtatttttaaaaggaaatatttgtgggggagggtcgagggagaagggaagaaggaggttggggagctccagttagttgggtgtggctattttatagcagtactcaagtatcatgataaataagcttaaaacatactttggg

SEQ ID NO: 106490 - DNA, 1006 bp, Homo sapiens
cacagctgtcttgagctaaaattttgaacacttaaagatagatggcattgtacccagagccagctggtacaatggcatctatctataattgtgtataaaggattgcttaaaacttataagattggaaatagaacttaattgcttaaagttcaagctggactccattgaacagcaattaaaaaaaaacaacaacaacaacaacaaagaaaacccctggtgtgataaaatttcttggcaaatgggtacccttgataaattcacacttttagttaagagtatgctatggtaatttaactatgtaaattgcgttgaatataaaaataaggggaattctctatgtacctttttttaaaaaccatatttaacctggcttgtaggcattaaagtcataatgagatcctaatgtaaaataaattctgagacttttcttcaggacatctattttgtgtgatacaattattttgctctttgcaaaaatcaagtatttgtcttaaggatgctttgctttatcagtgtaatttgttttatggaagtattctatgtaactttgaatattattttattccccccagatgacatggaagccattcctgtcaaacagtttgtcaaacacatcggtgagctctattctaataaccagcatgggttctctgaggattttgaggtatgtttcaaggctggaagttaacttccagaaacctaagtcttactttatgcagatttttgtaaacttgaactgaattcattccaagcataacaaaacagtaactacggaaagtggagtttttcttttcatctattattttaataggcattcttttccaaataaaatttaggtgaaaggggagttgattgtacctgtcctgaatatgtatttctacaaaagaaccgacttagtgatagaaaagaagcaaactggtagggattgcttttcaggttcttgctacatctaattctaactgggaacagcagtcataacacaaggctccctaattccatgtctttt

SEQ ID NO: 106491 - DNA, 1122 bp, Homo sapiens
catggtatagtgaagatagcaggtttggtgtctgagaaactgggtgctggcttcatcagtagtgagcttcataatcctcagaccaatcacctcatctcggatccccagttttcccatttttgaaaaatggcaccaatgtcacctacattgtaacgtcgttggaaaaataaatgattaacatctttaaaagtgccaagttcattgttaagaaccatgcaaaggttgactgttgttgttttcatgattattaatccttggagagaagacttgggttaacacagccttctgattttaagaactggtgtgtaggaaacaaggtagagagaggcatgtaccaccctgccaactctgggttctgtgccagttcagcagtgacagggtgtcaatgaggagctattaaacagactgcccttttcttcactgaggcgcttaactaaggcacatctctggcagcaagagttgtgtcgaggaggccaagttttcatggcagctcagctgtcttctagctctgtgggtaagttggttcctttctctgtctcatttctactttaaaatggaaatgatgatgatgatgatgctaacctacccatctctttcaacaaaattggttacagggcaaaatgaagtaatggaaggtaagcactttaagatcatctaggagtcatacagctggaaggtgcagttaccttgaatgaacaatgagaaataaaaacaggatgaaaagcccctgtctatgcaaatttagaatcccaaaaggctatcataaaggcagttatattgctgacttgttttaaattaagtctttctcttagtttttttgttagtttttgttgttttgagcagaatgaaaacaaaggtggtagaaagaacctctgatttattctacgaagtcatatgttttatggaaccaacaaaagcatgtcaagtatttaatgctattagatgcttactaaaaaaggtgcctattcaactacaaagaacatggtttaagtcaaacattttgtattcatgaggacagcaaatgtgtgtggtgttaaagtgatttagttcaattgactgttggctggatgactgagcaagaatattgaggcatttaacaacgttgatggtattcaggacaaa

SEQ ID NO: 106492 - DNA, 1055 bp, Homo sapiens
aatattttctcattctgtgcattgtcttttcactttcttaatgtgagttctctaaatttgttcctttttcaagattgttttggctattctttcaacaattgtttctgaattgtactactgtactgcttttgttaaatttattcctaagtattttattccatttgatcctaatgtaaatgaaattgtttacttagttttatttttggattgctcattgctagtttatataaatacatttgtaggttgtatcctacaaccttgctgaatccgtcttttctagtagttttttcttgattccttgaatttctgtatacatgatgtcctctataaacaaaggtagttttatttctaaataaaatgttacaaaaactccaagttacttttgaataggattgtttgttctacttttctgagaaaatgaactggttaaaaaagccagggggagaacaaggaagaaagtcaaacctctccctagtctttggattgactttggcagtatttgttggccagctcaatcaaggctcaccactgctgtgactatgaggatttctctatccagatacacctcctttctaaccagagaaatcaggcaaggatatgtatacatctgtgccttatatatacatacatacatacacacacacacacacacacacacacacgtatacatctgtgccttatatacacacacacacacacacacacacacacaccattctctccaccagagcatcctttacttctctaatgtcaaacatcacttactgccttgctaaaagtattgtggcaaaaaaaggaggagaaaatcaaagcaactaatgtgtgatgtgcccaaaggtcatggtgttttgctagaaaaccatcatctctggttaaatgtgaattgcactttcacaacttcatttgtgattttactttcacaatttcaaattagatgtaattttatttttaaacattcagggagttaggttttggtgttctcttggccactcagattctgggcacattgcctgccttcatctaccctctatattaatgccttttcatagcaaaga

SEQ ID NO: 106493 - DNA, 1283 bp, Homo sapiens
cagattcctgtaatgagattactcttaacaaaagctctggtttcctcaattccttaggttctgttagggtagcagggaatccaagtgaattagcaatggaattgcctgaaaatattaatagatgttttggacttgacagatcagtcacccttttatatttgtattaatggggagggaacaggggcatagggcataatcaaagccctttgaacttggctttaaaatacagaacaagcaaatacctttgaacttggctttaaaatacagaggactacaatttgtaatagttttacatgagtttgcatcctgagagcaggagatgtaggagtggctctgtattttgggatgggtttgaatgctctatttagttgttctgccaaaagttttctcagactaccttgggagatgtcatgttacctgattgccttgtgttgtgctttagaatggtgctagtttctgaattatccattttatttctgtttttttttcttatcttctatagatgatcacagtagggtgaagttaagacctttaccaggaaaagactctaagcacagcgactacattaatgcaaactatgttgatgtaagtcagaactgttattataaacctgtttctagaaattgaagactgcagcagaaactgtttaatatattttaatactgtacagagctttcactaaaaacaaagcccattcaatatggaaggcatttgaattattgactggtcttctgtgataactgctttcatctcactttgtgctgtgtcattttgaagggttacaacaaagcaaaagcctacattgccacccaaggacctttgaagtctacatttgaagatttctggaggatgatttgggaacaaaacactggaatcattgtgatgattacgaaccttgtggaaaaaggaagagtaagagccttttgactcactatcttaataatgcaccttcattcaaaagatacttgtggagtacctgctttagggtaggaacttgacaaggtataaagagttacggaaatgaaaagtgttctctctgctttatcttgcttatgattcagaaggaaagagagctaaggcattatgagagtaaatgtgatgacagagatgaacagggtatcagtggaatgctgcaaaatgaatcaatgtatcctctgtacattcctctgtacagagattttttaaaggagcaaatacttgagacttgaacaatgattacgaggaattacacaggctaaaaagagaaggaaagggtgttctaagtacaggggacagacaacagt

SEQ ID NO: 106494 - DNA, 1297 bp, Homo sapiens
gactctaaagacagaagtatttgacatttaaaatcttcccatcacttcctggatagtttacagcagcaacaagcactctggctcctaaaggtccagcctggacagtggagaaggaatgggaatcacagcccacagagacatgaaagcaaagtactaagatctggacttggggcagaaagtcaggaaatggaggccttgcaggaaaagtacaagtgctttggatagttccaaatccaaaaaaaactgatactaaatgttcattcttagtacaatcttaaacagtcttctcttctaagtgatagtgacacttcatatccagcttggtaatgtctccaatttaatggcatgaaagttggctacaagggggaataacctagcctgggaacagtgattagggtgaatgtgatcagtggtcatgtgtcctgacacccttacattatttttttccagaatgtccacccccccgcttaaagacatcttttttcacttttctcacagggtcagaagggaaatcccaagggtcgtcagaatgaaagggtagtgatccagtatcactatacacagtggcctgacatgggagttcccgagtatgcccttccagtactgactttcgtgaggagatcctcagcagctcggatgccagaaacgggccctgtgttggtgcactgcaggtagggtctaggattcaacatgtgaaatagatggggcaggggacttaggcctcagtgaccttggaccacaatgattgctactgctttcacttagaagctgaatcttccactggaaactgggatggataagacctatgatagtcttaaagaggctctattcctgtaacattaagaaatcatctgctgcttctgtgatttttaaaaaactagatcaatccctagtttttataaaatcttcttattaataatatcagccaggcatggaggccaactcctgtaatcccagcactttgggaggctgaggtgggtggatcacttgagcccaggagtttgagaccagcctgggcaacaaagtgacaccccatttctacaaaaattaaaaataaaaaaattagccagcatggtggcacatgcctgtggtcccagctacatgggaggctgagacagaaggatcccttgaacccagtaggtcaaggctgcagtgggctgtgttcacataactgcactccagcctgggtgatgatagagcaagatcatgactcaaaaaaaaaaagaaaaaattacaaaatccccattgtttataggaaaattgtagcctgatcctaataaataaaaatatgacgtta

SEQ ID NO: 106495 - DNA, 1094 bp, Homo sapiens
gaaagagatacagttgtttcaagagctgtgttagatggtagggggagttaaacatgttgtctggcctgagaaatacataggagaggatggttctaaaacccttcattgaacacgattttttgtttgcttattgagttgaagcaataagcacagtatagaataccgtgatccaggcacagtatagaatacagagctaaacttaacacagtctctaccgtaaaataagttaagactgataaagtgagtattggagcaaatcacctagctgtaagtgcttgaaggaaatcactgggaggtccctgttagcagcagaattaaactaaggtacacttcatgaatgagtggctaacccttaacactccctcagtgactaccatgtattgtacctcttaggagcagtacattttcatccatgatgccttgttggaagccattcttggaaaggagactgaagtatcttcaaatcagctgcacagctatgttaacagcatccttataccaggagtaggaggaaagacacgactggaaaagcaattcaaggtagtgctttgaaaaagtttctttggcataaagcaagaaaatgttttaaatgccttgagtttgggggttatgtcttctttgcattaatgtatacaccgaaatggattactatttgtactccttgtactccttaaatgtgatgaaaaagaaaatacggttttgacctatgtatgaattgttggtattcaagtagatatacagtgttgtattttcttctgagcaatttatgactttatctgaatataaacatcagcccctggccataatgacatagtactttaaagtaactcgtttagtccaaaaaatgtcctattttttctgaactaatctatcttaccttaattattaagaatgatgacttgtagacatattgtcctaaaaatatgcctatttcaaaaactatttcagaagataatttaggaatttaaaaagaattactaaacaatactagagaaaagttaacttttcctaaatggttgttctttttctttgatagggacatgaagaagcttaaaagcggttaaggtttatatggaattgactgaagtgaaggt

SEQ ID NO: 106496 - DNA, 2681 bp, Homo sapiens
atgagttcttacaaaatattaagtaccaacatttcttaaattctgcctttttcgtttcttcaatttttttttatacatactttaaaacttcatttaagaaatgcgaccaggtagttggttcttttacaggcactaaccattttagagctcaagatgaagaaaaaaacaagaatcaaacttgaaaatgaaaattatatccagggaccatgagttttactaaagcatctggagaagaacactgatctcatatactccattaggatggatgccagcccccaaaaaataggattgacaaaatggttcaaccaagctacataaacaggaataataatcaaactactgggctggttacttataaaagccttagaacaatgttagttcagttcaacagaaatgtactgagaactagttaagtactcctttatcttcaagaaacttgattagctcgtaatcaatagcattaagcaatcttttttaatgtagactcacgtaggtcttttatgccagtgaggatcacagaaaaaaattcacagcagcagtgacatcacataacagaagaatccacatagttctagaaatatctattgcacacagtacctatttctacctgatagtagaaataagaaagatacaatcaaggtcactgagagaagtaccactaggaaagcacaagagtgttctctggggctgggcatggtagattacacctgtaatcccagagcagcctgggaaacacaggaagaccccaattctataaacaattttaaaaattagctggttgtgctgatgcacctgtggtcctaactactcaggaggctgaggtgggaggatcacagttaactgagctacaatcatgccactgcactccagcctgggcaagagagcaagaccctgtgtcttaaaaggttctttgtggcacagaaatggtcttgtttatcagtaatctgattgggatttttgccaaagcatcaagcaaatgctatcaattatatctttgaatgaagactaaaatgttttttctttttcagctggtcacacagtgtaatgcaaaatatgtggaatgtttcagtgctcagaaagagtgtaacaaagaaaagaacagaaactcttcagttgtgccatgtaagactttaaaacagtttgttagtgatcttttatactggattgtatgttaggtacagaggcagccactactctgatgctattgatagcacccttcaattgtactgtacgtggccgtatggtagaaggttttgaaaatgtccttttagtaacctcattaatgtatgactttataccagcctcttacctggtactaccaaaagggaaaatgttatgcttattcaactaaggtagtttaatgaaactgggagaggtggttgtcagtgtcagcaagtgctccatctatctgacgtagaatacagcttcatttcaccttggaatgcaagaattgggttacttctaccatattataacataaaaaataataataaagctgttattgctgtggcattaacattcctctaaaacttagaatcctggattaatctgtacaactagaactaccttattcagttactgtggctattgagatcaaggcactgttgattggtggtgacctttgtataaatagctaaggacattgcagaggatgctgtctgtgtgctgtaggcatagacatgggtgatcatttgggagatttatctctaatgaaaaaggccactcttttctaagaccatcatgagcagaaagacatggagaaaggggttggtaaaaggacaaagtatatgttggtataattgtaggaataacaaactagagtcaaaagttatctaaaatcctctgttgtgtccatataaagtattctgttattgatctgctgtaaaaatctctcccacagtaaaactgtattcctacaatgcctgtgtccttctgggtatgtgcagcaaaatttcattttacattctgcctcagctgataacactttagcttgtttaaaaatatagataagtcttagaaagggaagccaggaggatatgttattcatcaagcaaatctcagaaagagctgttggttctgtgtgtataataaggcaaatgtggtgtttttgttttttccatatgatagctgagcgtgctcgagtgggtcttgcaccattgcctggaatgaaaggaacagattacattaatgcttcttatatcatggtgagagtcaacagttaattataaataaagtcaactaaactgaaaggtgttaaagagcagataccacctgtgtgactgatgtcatttttgaaataatttctcaatgtgtaatatgaaaagtatagagatttctgtatcttgaaacttttaacaaaagatacctaatcagtgctggtacaaaaatgcttaaattaagcagaatgcttcttaaggaattaattttattgttaatttcacacatctagtctttgaataaatgttgaaatttcccttaagtgaaaacagcagggttaactagaagtgaactgcacatggagagaaaattgtctgcacagtgctagcagaagtacatctaaaaattagccaaatgtaccgaatgcctttctcaattattttagtgtagtcaaaacagtgctatcttatttcatgaatatattttactaccacaaagttagaataaaacactcatattcactg

SEQ ID NO: 106497 - DNA, 1055 bp, Homo sapiens
actagcaggcaatgctgtacttttcttcagtcctcctctcctttttattttaggcactgttcaatactgtatgccttctgtattttaatggagtggatagcattgttttcttttacagactagcaggctactgggacctaaaaaggtctgttaatgtcatggccttgaaacagttccatttatgctggttaagagatcccttaagaagttagaaggcttaagaactgcttcatgtgaacatcccttattagttacaaagttatattcacagttttttaaaaatgtgtcaaaataaaggataactctgtattacagctttcacagtagctatgtggacaatgtgttatttccattttgactctctaaaatagctacatcctaaaatcagggctatctttaacaatagcaagatagcaatattatatacaactcagttatgagaccctttagttattctccattaatgcttcttagtttgtaataccatacctcacagtaggtagaagaatgaaaacttctgcaggtgtgtaattttgaaactagtcctctaaaaattccctattactcctatagcaatctaataaaaactacctacatagttactgttttctttccttctttgccaaatgttttataataaatctcttaattacatacatttttctacttaagattaaattggaaatactgtcttagcaaaagtcttgggactatctaaactcccacacatagataaatctgatttggagagagaaatttaaaatatttaattaaaggtgatacccacattttcaagtttttaaaagagggagatggctttgtatgcttttgtgtagtttagaacagatacacattagtaaaagataccaataatcattagagctcaaggaagttattaggtgcagcctctggagccatactcacgctgcagtgcataatgggaaaattaggagcattaataagaaatttcagtagtgtttgtaaggaaaataagctacttactgagatctgtttcttctattgcatgtttgcttttgagggacagcttctgtcaa

SEQ ID NO: 106498 - DNA, 1064 bp, Homo sapiens
ttgtcatttaacatacaatactggctttacttatctctagaaagaagaaggcatgctacaaataggaaggaattgtaataatgatatttggcctctactttgtcttagctgttaaactgtttttagtatttttgttaaatatttgcaaagggaagcattttctacagaggataattaatttcaagaaaaatatcttgagttttaagaaataaacatctccagaaaaggagaaagtcgattttataaaatgtcgcaactctccaacatttggggtagtgactccttttttgttaggacatttgaaactagcaagcagccattgtttctaaagaattctggcttcacattgactcatgtttctttcactccattttgaaatagctaaaaatcattaaaactgtaaatattttgttgcttgggtaagcatcttctgggaactttgtatctatggtatataatcatagaattttatattttcatataaagctaatttttttctagtttcaactccgtcatagttttttttcctttttgtggtggatatgtgaattcaactttctgtgtattgaagtagcaaaaaccatctttacattccaaaagaatccaacatgtgttatttctttgaggcagtgattgtgaaagttgggttttctttttaattccattgaccatttgtgcaataggaattagacataattagtcactgaaaacattcgtcacattgacccatttggaaaaagtgtgctttttttttttttttaaatttgttcagggggaggggttttgtaacctgaaatttttccctttttcttctgtttaaactatatcaaatcattctattatagtgttatttaatatgtaaattgtattgctatacataaaataaagtatggtttttgatgtattcagtagtgttgagcatttctatgaaaatgtctatatccaataaaataggttactagtctcccttaacagatcacattaatacccaccaaccctctggtctaagttttcatggtagtaaaatgaacattggtagtcgtctttacacaggcagcaaacca

SEQ ID NO: 106499 - DNA, 1218 bp, Homo sapiens
tgatacactagagaaaatagtaattctgttcacaacttagcagcagagtcataaactgaataaagtttgattccttagatgagcaggtaaaactgtcattgtttactctttaaaggagaaagaacgttgataaatcaacccagcaaagaccattctttttggtttgctgcctgtgtaaagacgactaccaatgttcattttactaccatgaaaacttagaccagagggttggtgggtattaatgtgatctgttaagggagactagtaacctattttattggatatagacattttcatagaaatgctcaacactactgaatacatcaaaaaccatactttattttatgtatagcaatacaatttacatattaaataacactataatagaatgatttgatatagtttaaacagaagaaaaagggaaaaatttcaggttacaaaacccctccccctgaacaaatttaaaaaaaaaaaaaaagcacactttttccaaatgggtcaatgtgacgaatgttttcagtgactaattatgtctaattcctattgcacaaatggtcaatggaattaaaaagaaaacccaactttcacaatcactgcctcaaagaaataacacatgttggattcttttggaatgtaaagatggtttttgctacttcaatacacagaaagttgaattcacatatccaccacaaaaaggaaaaaaaactatgacggagttgaaactagaaaaaaattagctttatatgaaaatataaaattctatgattatataccatagatacaaagttcccagaagatgcttacccaagcaacaaaatatttacagttttaatgatttttagctatttcaaaatggagtgaaagaaacatgagtcaatgtgaagccagaattctttagaaacaatggctgcttgctagtttcaaatgtcctaacaaaaaaggagtcactaccccaaatgttggagagttgcgacattttataaaatcgactttctccttttctggagatgtttatttcttaaaactcaagatatttttcttgaaattaattatcctctgtagaaaatgcttccctttgcaaatatttaacaaaaatactaaaaacagtttaacagctaagacaaagtagaggccaaatatcattattacaattccttcctatttgtagcatgccttcttctttctagagataagtaaagccagtattgtatgttaaat

SEQ ID NO: 106500 - DNA, 1104 bp, Homo sapiens
ttaaatgttctagtggcaagtctataagacaaagaaacaaagtatagtcaagtaagcattgcctcccttttcgcccccctttttcctttgcctctgcctgccttggatacctttttttaaaaaaagttttggtttataatcaggaaactttgacatcttatttatgcatttaatgaatatttaatgcctagtacatgccctgcactttgttagatactcagatgcataaaggttgtatgggacgcagtccttaccttctggtagtatataatcaaaggaaaggttcttatatggaagtattagggtataactggctacagaaggctaggatcaaattgcgaagttttttttttttttttttcagtcaggctaaggaattcacacttcgtcctctatgtagtgggtactgatgattttttaagtctagggaaagacatattcaaagtagttctttagaaaaatgaattgatcccctcttaggtatagttggaagtaaaacaagacatactctaggcatgcatcatagagtaagtactcctcaagtatttgttgaatgaataagtgtaataataaggccatagcattgggaatgaaatggaaaggctaggagagatatcctgaaagaacaatttataaacctttgaaaatttaaatggcaggtataagaagagttaaagatagagtatagagcataggtatctgagggaagagaattcccactattgttcattcattatatccagtaggaataagatgagcttagtttcatttggttgagaagtaagggctaggaagaaaggttagccatgcctctacagtaaaagttattaaagctagatagaccacagtcttgagagagataaggtaaaaataagaggacagctgccacagatcttaagaaagctcacacttaggaacaaggagagaaaaattagcgagctaaagaggaagaaaggtagtaatcagaggtgagcatgtcatctaagaaagcaaatatctcttaagctaaggaagaagtttttcagagggctgatcatttatagtcagaatgctgcagaggtaacagtcaagtgtctaaccataggcctgctttaccaggccaca

SEQ ID NO: 106501 - DNA, 1512 bp, Homo sapiens
aggatgacctttactttatgtatgtcaggctgtttctcagaccacatgcatggatatatagacatatagaatccctcaccattttcaactttcagaactgctgtatttaatgcttggagtgaatatttttgtgtttctagtgctatctcattggctgaatttccaaaaatgagattgatagtgatgatctaatatcagttgccctcctatgacacagggctttgggcagtttagttctctttgacctccctagggcagtcacccaagaaaccaaagctagacacaacacagcaatgtttcatgagcttctaaagcctatagacttctacagtcagaccaataatacagcatctcaacttccaagctatttgtattaaaaatggttaaattatattgacattttgtcatcacaaaaatggggaaaaattatagtggatatatatttcctacacaattaagggtccaatatctctaattcctgtactataacacactagttgtatttcagttcctgatctcatcccaggtcaaatcttttgatgttaatcctgaagcatgatttatgtttgataatttcattgtaataatttcagtatggggtaatcatttggtatgggatttggaatattaaacaaaaacatttaatgattatatcaccataaatgatactattagcaataatcatgaagttggccacaagagggcgtgtaaaatcacaataaaattctaaaacctgtaattctgccaggctctggttttactgagaaatttgaaaattaacactagtaagtagccagatttttttctaaaattaacataaaatattctgtagaggaaatgcattctacatatatgtgtgtgtgtgtgtgtgtgtatacacgcatacacactcttaagtgaataaacatttagactattatgaagagccaagttcaattgcttgatatgcttttttacttttggatttttttttccagactcgttactgggcatcagtagaagaatatattcccaaatgggaacagtttcttttaggaagagcaccatatccttttgctgttgaaaatcaaaatgaagcagaaaataccattcaaaatgaggcacagcgataacttcttcacatgctatttcaaaaagcctgtttaataaagctgaatgttaaggtgtatgtaggttattgcaggaactttaggaattaaatatgttcatattcttcgattatctcctaagtgacagtgaagatatgagaatttactggcaagtcacatgttatcacctactactatttcaaggtcatgaatttgctttctaccaaacccatagatgtgttaaacacgaatattaaaaggtggactctttattaattaaattattgtcagtgttgtgagtgtgttgctttaaaaaaaaaaaaatttacaatcattctcctctaagcaggtatcttggttctggttttaagttaagttttttagaatccttactttttagggacaaggtataggatcaacatgg

SEQ ID NO: 106502 - DNA, 1100 bp, Homo sapiens
atacaccaggtcctcaaagtgccctgacatgctgccattagcaacaccaataacctgagaaatggtgctgtttttgcaattaggtgattgcttgctcatctcacagactttttctttattgacttccttacatgtttgtcaatttcagaaactcctgtaactagaaaaaagcttccttttaccacattctccctttttaaattgaaccagaaatgaagttcaactgaacaaatatttattacttagacccagagtggactagaaattacaagtggagataaacaatatgcctacctcagagctttttgtctctggggagtcagctggataaacagaaaaagtagagtgttatagaaagaccaaggtagggcttctaacacggcctggggagtggagaggaacggggtggtgaggtaagggagctgggagtgaaaagagaagaaacctgtgctacagaaactagccaagagacttccagtatcaacatggcgggtaagcaatactaacatatccccctctgcaacctttatacatgagggacatgttcactttcttgcctctgattttctccccaactctttccactgacactactctagtttgaggtctttagcacctttgatcttactaaatccaatgtttgtcttaagcactcactcatctttctaaatcccttggcagcatttgacacaatttatcacactttttttttttttttttttttgaggcagagtttctctctgttgcccaggcttgagtgcagtggtgcaatcatagctcactgcagcctcaaattttcaggctcaaattgcctcagcctcccaagtagctggaaccacagttgtgtgccaccatacctggctaatttttgttgttgttgttgttgagatgggttctccctgtattgcctaggctggtctggaaatcctgggctcaagtgatcctcctgccttagcctcccaaagtattgggattacaggtgtgagccatctcacccagcacttcctccttcttgaaacgattcttttatgttctccagcactgacaactcctcagtctactggctcctttccctattccctgtctcctaaatattggaa

SEQ ID NO: 106503 - DNA, 1018 bp, Homo sapiens
gggatgggggtgagggtcttgcaagtcacagtaagccttttactctgagtggtaaatggtaaagcattggagtgttttgaatggaagagtgacacgatccaatatttctcaacaaagattgactgcacatctactgtgattcaagtactgtgctgagccacatacttaggtgctaagagtacactaataatcatgacagacacaatcctggtcctcgttgacgttatatcctagtgggaaagaaagaaaaaaaaacaagtaaaacaacccacaaaaaaagaatttctactgtgataaggctacaaaaaacaaaaacaaaaactcaggcacttgaataatgagagatggggtgagaggagtgtatggggaagtttactttgtgtaggagcatcaaataaaacttccctgaggaggtgacatttgaggcgagtcttaagagatgcagaggagctagctctagctaaatataaagttggggagaagtatatcaaagggacggaactgcatgttcaagggccccaggaaacaaaaggatgtggcttgttacaaggagagaaagaaaccagtacagctggtccacaaaacatgcagagagagagaggaagataggatgagactgtagctataagctggagctcgaccaggatagtaaagggacctgaatatgaaactgatgacctaaggtagacaaaatgtcagacatcataagagaactatagattttaaaaaacagtaagttttgaagaaaaacagctggcatggggcatttggaagggagtagtgttgaactatttgttgtggatgcattgaatctggccatgttcagaagggaagacgacattatgagaagacaacatcatgggggtgggtcggagttgtcttcaaatgcctactcagccagtaacagctgtggctaaactgacactttgagagcctctgttttcccccacctgaaatgatgacatgtgccttgcaggtgtgggagaattagaaataatgttcataaaactcctcatgt

SEQ ID NO: 106504 - DNA, 1048 bp, Homo sapiens
gaagtgtgtcgcttgagtttttgctgttgtcttgctgtggacttggtcaatttatttacaattgtcgtgtgcttctgccacatctgcattgtcactgtgatggtattttttctttctgtctgtttcttccacaggagtttaaccagtaacctacccaatgtgaacctacccaatgtgaaccttcccaaagtaccaaatctaccagttaacatccctctaggcatcccacaaatgcctactttttcggcaccgtcatggatggctgctatatatgatgcggagtgtgtattcagttcacattagatctcatttaaatttaagtgatcttggcatggatatgtattgtttatttctatacatcctatataacagagatggagatggataattagacatattttgctgatcatacagagacaatattgtttatttctggcatgcatcatgtttgtaagatgtttgctatatatacagcactaacaatttgtcttacgcccactgaatgctggaggactatgtttcacttcctgaattcttttgcaaaaggattctaccctttttggcaggtgacatgactttaggagctagacatccaaaaatagtggaggaaacctctttggtgggctggccagtcatctctggcctgatccaaatctaagaaggaagcacacctacctagaatctggggtgttttctttaaataaaaataaaaaattcctagagaatgtttaaaccataaagcatatttctggtgtcagcaaatggcaggatatagtaacagtatgttcagggctaaatgaaaatttctgaatggatcaagccttagtcacataaatgttatgtaaaaaaatatattatgtactttccaaggtcacagtacaatatggtgctttgagagctaggtaatgagaagttcaataattctcgaaacacaagattcaaacaataaataattaaatttgtggtagccatatcatctgaatatagggctatgctttatactcatccacatgaatgtcagagttgcatgggccacttcttgaaagcc

SEQ ID NO: 106505 - DNA, 1085 bp, Homo sapiens
gatcagaaggtcaagagattgagattagcctggccaacatggtgaaaccccatctgtactaaaaatacaaaaattagctgggcatggtggcacgtgcctgtagtcccagctactcaggaggctgaggcaggagaatggcttgaacctgggaggcagaggtcacagtgagccaagatcgcaccactgcactccagcctggtgacagagcaagactctgactcgaaaagacagaaaaaaaaaaaaaaccaaaaaaaagaggaagaaagagtaagtaggaattgtctagtaaagaggagaaagggaagattggtccaaacaaagggaatggtatatgcaaatgccttgaagctgaaaagtgccagctgcattcaaggaactcaactgttcaggctttcacccttcagatagtattgttattaatgccaggcctaaactaggtgctagagacaaaataaggacctgcaacttcttccttgtccttaccgagctcatatttcagtaagagaggttaaaaacacataaccagcctaagaaataataattccacttcatacagtaggctctgaaggataaaatataggactgagggagaaaaccccagagtattggatataatattgaaaatgagagggagagtcatgtaccatgaatctggaggggtaggcaattccagatcaaggagggtgttgtgaatgtctgtttctctatttgtggaatatttcagaaaagtgctatctcccttactgaaaattcacagtagctatcctgctgtgatcatctcggcaccttgtatggtatacacctgtacattttcagattgagcccagtgtaccaaattctagaccattcccctaacccaacacaggattatacccctggggttgaaattatggcttgttcaggatcattgggcttttatgaaaactcactgctcccatttgcattgcatctttttatggcttctttaatttcaatttatttgtatcgtgtgtgcatgtgtgtgtgtgtgtgcacacatgcatatgtgtgaggtccccaactatcctcagttcaatgatgcactagaaagactcaaagatatcaga

SEQ ID NO: 106506 - DNA, 1048 bp, Homo sapiens
tatttgcctaaagcaccacgtagatgggtaaaagatggcaattgaagtgtgaaacattctgattccaaatcctatctttttaatatgagatactggctagaaatagtctaggataaaaagagccctagaatcctaacaacatgtcaggtgtacttctttacccagagttatttctctctgaattgagagaggtcctcctttcttcccctgtacacccatcaaatatagtcactatgggcaaagtggatgcttaagtataacttcttaaagaatatgaaggagagggatgggcttttagtgggtaaatttaacactagactgtatcaactttactatgtcgtttaaactgaaaggaaaaagattttagctcggaagaacacttccgaaggaacagaaggagacagtaccatcatttggataattttggtaattactttggtttcacttttactgagaaaaagagcattccaacaatcttcctaattaaagaggggactttaaacagactatctgaaaaaacattttattatttaccgatatattatgttacattactgtgaattgaaatataacatggcgaaataatttatgaccaaaacaaaaatctccccaccagaatgtaacaatgtatgtttcagtagctcagaaatgacagtttggaaagcagttctttgctttttcttcttcttttgtcagaatggtaaagtgaatacctagaagttggcatggcaaagctataccatatgtttctaaactatgtagtaacggtgatgggtggctaccttgtgtgaactagctacttatagtgagggaatgtaaaagcaggcactgttagcaattcatgtaatatttagattgacatgaccattttttaaatgatgtaggaattattctaatagtttaaaatgagcattgtgtctacatacataggtatagtgtacatgtgtgtctgtgcatgatgggggaaaagggtaatccttaaaactgtctattacacagcaattcctatttcattcaagaggacaaatgtcttgtaagttcaagctac

SEQ ID NO: 106507 - DNA, 1059 bp, Homo sapiens
acatatttagatatgtatctattttcttattcatttattgagacagggtcttgccctgtcacccgggctgcagtgaaatggtataatcatggttcactgcggcctcaaactcctgagctcaagcagttctcctgcctcagcctccagagtaggtgggactatagatgtgcagcaccatacctggctaattttttctgtttttagtaaagacagggtttcactctattgtccaggatggtctagaactcctgggctcaagtgatcctcctgccttggcatccccaagtgctaggattataggtatgagccaccatgcctggcctacatttattttcactatttcctgattataatttcttaaaatgaagttgatgcatcaatgggaagtcagcataacgaggcttagtcctttaaaaaggtaaaatagaaagaacagaatcattttatggccaccatatcttttgaaaacattcctattccttctggtagatacttgcagaacaagctgaagaaagctatattcagttttttagtggaacattgtaaagccacaccttgtaaaaaattaaaaagcctgatattgagatccaagtacttcttctgcagtgtgcaactagaccaggaaggcagggaccagttctagttcccccacttatgtccacagaaattagaaaattacctgacatatagcaataagtttgaaaatatttaatgaatgattgtgtgaatgaataaacttttattaactcattggggtaatagaactctcagaccctaacagttcgtttgtacatttcagaaactgtgattcctaatttgtttagtgactttattcatggaaacggcaccactttgaggggcagatacaaattttaatcttagttttgtgatttactatgtggccttcatgttctgagttatctgtgaaatgaagttacactactcagtttttcagaaacactgccatctcaaataaattatcatcgaaaacttgttctctttcctctgcctttgattatgtcaatctattaatttttgaaagccagaagccttaacagt

SEQ ID NO: 106508 - DNA, 1139 bp, Homo sapiens
tttcattcaaattcaacttcaaaattaatttaaaataattttaaaataactctaaaactatgtcgagccttgtagttctaccagaataaatatgcttcttgggtatatccatactgacagctgcatttcttcaagaaatgacatgacagaagagtgtcctcctaaaattcaaacttggaagaccaaccggtctcaagctacttgtttgaaaggatgagttatataaaatggcatgttctttatctttaaaaaaaaaaaaaagtattacaaagccccaaggagacaataaaatgtaaaaggatctgttaccttgattttatttactgctttttttttttttgaaagccaacactgagctatatattgatatacaagacaaaccatttcttggcatatttcaacttgtctgaaagtcagttactttggttacagctcaaaggacaagttctcagtaaagaataaataatgtattcacattaatcatttccccagtgtataaagtatgtatcaactaggatgagagagagactgaccttgggaagaaaagtacatacttagaacaagggtctcagcagatttctgtcctttgatgagctcaggatagctcaggtaagccacatggaaccactgctcagaaatccataggacagggccctcacgccccagctcagccactggttgtctctgaggagacagaagcttcgtatttaacccttcttggcctttggtctccctccacaatggaggagtgggtggaaataaggcagtggttctccaaactggtagattctgattaatcccctagaggggagctcagagcatacagagattcttgggctcaaacccagatctactggatcagaacctctggatatgtggcttgagaacctgcatattaaacaagttcattagctctttctcatacagttctctgagttctcaccacatactcttgtttaataaccaccagagtgatgatttctgatttccaaggtccaagccaagtgtactgtggcagaataatgattccttcagtgcctctcaactccagaaatggaaactgaataagtcagtaattacctctaagcactagttttttttaaaatgtattttctgtctgctcatttaatttccttatc

SEQ ID NO: 106509 - DNA, 1079 bp, Homo sapiens
aatgaatgaatgagtgaacattgccatcaaagaatcttaaaccattagcagatctgtctaaaggtttggaatcatgacagcttggtggttaagaacttggactcaatattcaggttgcctgggtttgaatcctgatgccatcatgaattatctgtgaaatctcagacaagctattcaaccattctctatgttagtttgacatctgcaaataggatgatgtaccattccttacagggatgttgtaggaacaattaggtgtgggttataaagtccttagcatcattcctgggatatagtaagcatttaataaatattactattattatttattttatagaaagataaatataatatcataaggctttcttttatttgtttttctaaatgttttccttgtttccagtgctatgggatcttaaaattttccaaaaggcaaaccaaatagttatataaacaaatcaacttgtttctagaactcacattttcttttaccattttctattctgatttgtttctgtaggacttcattgtcactgtagtcttttcgttcttgtggttggtgggttcatcagcttgggcaaaaggactgtctgacgtcaaagttgcaacggatcccaaggaagtattgctactaatgtcagcttgcaaacagccatccaacaaatgcatggctatccacagccctgttatgtcaagcttaaacacttctgtggtaagtatttttcatctatgctttactgttcatatctttgtttgccagtcaaaataataagaaaaacatctcagaagtcatcttgaaaattgttgcctacaaaactaggccaatcaaaaggtgagatacttcacctcaggtacaggatgatcacttggccctcaggtttcttattgtcagaatccatcatttgtaatgttgccgattaaggagtttttcttaagaaccccgcaggtattggcagctgctgcttaggtgacagtccagttgaaactctaagccagaagcaaatataaaatctgaactttggccggacgcaatggctcacgcctataatcccagcaatttaggaggccaaggtgggagg

SEQ ID NO: 106510 - DNA, 1093 bp, Homo sapiens
tgcactcctgcctgggtgatggagtgagaccctgtctcaaaataataataacaataataataataatagtaatttgagcctatttgttatgcagccaatagatcatacccatttctcttctaagagattatctgggggtattgcacactggaattacagaaagtgattttaaaaatatgggctgtagaatcatcaggtaccagtttaaatcctgattctaccactattagctctggacagtgagcaagttacttaataccactagacctaatttccttatctataaaatgaggactgtaatagtggatatataataagcctgttgagaagattcaatgagataattcaattaaataatagctaatttttacttagtatttacttacataccaggcactattctaagtgctttatacattttagctcattcactcctcacaactttgtatggtagatattattcctagtttgcagataaataatatgagggctggagcggttgaagaatcttccaatgagttgcacaaataaatgatagacctgagacttgaaacctaggaagtctggtttcagagtctgggctgtgaaccgttatctgatgctaatcttagcatgatgcctagtagaaaatattcatgcagtgcatgtaagctaatcattattattataaagttactgttaacttatgttatttgactcaaggcaaatggtttaaagtgatagaggactttctctgaatttgttttccgttatgttgagttgaaggtcttcaaacatatttcattatccaaaagaatagaggctgatcctttgagaaactgtgatactatttggtaggcaaagacatgttaagttttttttaaagcagtgtatctgcatgatgagaatgagccttataaaatgttattggcagcattctataaagttggaagagtgattgccattgatgaagagcacccaccaaattgtgtgacatacgaaatagccaatggagacacccaggttatacaaagattctggattcatcctctctctggaatgatcgaacttaccacacagccagactgtgagtctgtgaagcaatataacctca

SEQ ID NO: 106511 - DNA, 1151 bp, Homo sapiens
tctgtaaaataaagattgcaataattattttatgaattaagaggaggattagcacaccattgcaaataataatcactatcatttattgagtgcttacaatgtagaatgtgccagaacttttcccgttcttttcttttcttttttttttaaaacaaacaaacaaacaaactctcttcatcttccccagcagagtacataaaccgagtaaatttagtacataaacagagtacataaactgagtaaatttaggtgagagttgttctttgagatgatgtcttatctcaaatgagatgtctcatctcaaatgatgtccatcagaggagataaatcttcacaatcagtggaaatttgctttaaaggaggaaattgggaaggtaaaactactcagaaaatgaactatcctagtaatatcaaaggtttagcctatagactttgaggacattttaaaaaatccattaatgtggaagtctttttcatgctgtgtggattagcacagaaaatttgagtgtatttgagaactacatgagtttttctccccccaaattatggaaatttataatatttatagtaaattttttctaaaggtaagtgataaattcacaaacacttctagagggggttagcaataggcaaaaatatttctttatcagaaattatttagaagagaatacatgataattaaatcacactgggttgcaagtcacaaagcaaaatatattttatttccaatagtttttgatgaggtatttggcagaattgcagaatttcataattactctattttaaacttcagctaaagatgctcagtatagcttttagtttttattgaaaggttaattttacacttacagaagaataagcttcctattatacttattcaggtgttaaatgtgaaaatgacaccatctttgcccaggactgtctaatagagatggcagttttaccagtaatctattttatgtggtcttgtatcagttgtgacgctattctcttagtacgaattatttcatgcgagcaataggttggactctatattctggatttgccacagtaaaacacattctttttcatgagtatggtttctctgtttttggtattatgaggtgtgttcattgcctgcttaataacacattattaggcagggcatggtg

SEQ ID NO: 106512 - DNA, 1010 bp, Homo sapiens
gcagaaggaaacacctaccacatttcaaatgaatggccagtggaaaaaagcatatacatttacaaaatgcaagcaaataagagagcattatggaatcccagacactcaagaacaaggcacttttcgttggtaacaccttcagtgtatcattttgatggctccccgaagacttccttaacatttgatgacgtaggatttttgtaataaaaaattacacaatactaattttattccatttatcttcccccttgcctctaaattagatctaaatgcaaagaaggtagaaacgatgtgctcattgtccacgcaattcaatcctgtgaatgtctggggtcatgattttaggtccagagtcaagatcttagtcagggttctttttcagccatttattacatattaagtaggacacatttgttagtatagatcaaggaacgttaaatttagaagagacagcagaggtcctacttgtatcttctgtcatctaagagaggaacacatcctttcttcagcatctctttcaggtttgacttgaatacttcaagggatggatggaaccagttgtgtgctagagttgaatcatactggcttgcaagatccaattgttaaatctgcaggaatttgataacctgattattaataatattcttaaaaataaattaataaacttagttataaaagttatgttaaaagttagtaaatgctaaaaactcagtacttcttaattatgttactacattttactattatatttgccttgaggttattcacatctgttgggactgaatggtgaaattccataaatagaatggtgaaattccatagatagaatggcatgctactgcatttctctttccaagttagcaataattattgaaaatttaaaattgaaaatggtgagagcatttataccatagaaatcaacaaacattacatattaaaacttgattcatagtttttaaaaaaaattatcttgtcttaagaaattgatagagaaaatgttaataatacag

SEQ ID NO: 106513 - DNA, 1027 bp, Homo sapiens
accacatcacctggatagtgccgacgcacacaaatcttttctcatatttattaaaaaggtgagattacctagggatgtaaaccttttgcacctagtagaaaaactaactctttgggctacttgatgccaatttacatagcaagggaatggttgtcttttacctaatcggtttgtggtcctgtagacatatcaatgctcctataaaattgtattatctgtgttcttccttcacgtaaacaggcagtgggccttgtttttcttaattcataatagactctcaggaaatgtttgcagaaccacttgagagattaatttctgggttgctcccagtgtcctggtcttctaccctaacgtcatcttaaaattttatctttttgtgacaccaagagaaaggggggaaaaggtttgagtcatatgatatgatgttagataattttgttatgtgatgaaatatcatttagtttaggcatagagtggccaaataaacttgagaatggaggcaattatctgggttattcacgccgaaaaacaatttggcttgaagtagctatataattgtggaaaagtgattttaagaaaagctttaattatctagaaaaatatctttaattcttcaagtgaaagtcaggtatttggagaaaaccacaatcacagttttaacaaatatttttggggcagttgtttacttcatagttgcacaacttgcaacatcctccacaagatggcatgcaagtttgtaacatactgtagctggtagtcatgccattgctaaatcattttgctgcaagcaataaagtccaaacaattgcacaatgaattattattttctgtgttacacactgcaaatgtatacattctggcaacgttttctataggtaaagatgattgttttacagaggtatgtatgtctctgagtgtaaatatttgaaggatatacgaaaagaaatcaagaatttaagtcttttcacgcaagatgaagatctggcatcagttagcatgtttaagtcaacactttgttgaaggccca

SEQ ID NO: 106514 - DNA, 1094 bp, Homo sapiens
gattataaattctttatgcaagacaatctttttttttttttttttagacagagtttcactcttgttgcccaggctggagtgcaatggtgcaatcttggctcaccacaaccttcgcctcctgggttcaagtgattctcctgcctcagcctcctgagtagctgggattataggcatgtgccaccacacctggctaattttgtattttttttagtagagatggggtttctccatgttggtcaggctggtctcgaactcctgacctcaggtgatctgcccgcctcggccttccaaagtgctgggattaaaggtgtgagccaccatgcctggcctacgcaaaacaatcttaacaaactatttacttcaaacactcttcactttatcaatacatctttttctattgaaaatgattcctaaagaacaaaacagtagagaaaacagatcaacaaaacatttgagaaccatattcctctcatattaaggagagatatataaagtaatgtgcactattttactttgcatcttataattaacgtcccataccagcgaattttaacagcctggaacctctctccacaataagcatacaccactaacattttgcatgtaatttcacaggttcatggtcctcctaaagcctcttcatagactccgttttcagaagtgtaaccatttccagaaattggctcattttcccatgtacatcctagaaatgccaacttctaacaattttcaacttattttgtaagccaatcaatgttaccagttaaaaactacctagaatattaatgagcacaaacatatgcagcttaaaagcattttattaagcatttttggatgttgcttcctaccacttaagaataaaaaatgcattttaataaaaacaaatctatactgaagtcattttcctttgtgagaggaaatatgaatgaaatacattcatacttaaaaacagagtattttactgccaaaactttaaatatctcaagagcataccacattttaaacacattatggtcatgtagctatttcaatattcctgggagtggtgggcaattagcctgtctatggcttaggatctgtttccatgcttgctt

SEQ ID NO: 106515 - DNA, 1105 bp, Homo sapiens
ttttttttttaagacagtcttgctctgtcacccaggctggagtgcagtggcacaatcttggctcactgcaatcctcaccttgcaggctcaagtgattctcctgcctcagcctccctagtagctggaattacaggtgcatgccaccacacccagctaattttagtatttttagtagagacggggttttaccatgtaggccaggctggtcttgaattcctgacctcaggtgatccacctgccttggcctcccaaagtgctgggattataggcatgagccaccagaccctgcctggatttttttttttttaagtgaagtctatcacataaattttaaagtttgattcaactagtagccatcttagctttaattgtattggctaataaaggataaacatgttttcatgtgttcatcgaatataaaatataggcaaacttgactaaggttttatgtttccttctcaattacagatgatgaaaaactctcagaggtagaagaagctcaggaagcaagcatggaaacagatcctaagccatagacaggctaattgcccaccactcccaggaatattgaaatagctacatgaccataatgtgtttaaaatgtggtatgctcttgagatatttaaagttttggcagtaaaatactctgtttttaagtatgaatgtatttcattcatatttcctctcacaaaggaaaatgacttcagtatagatttgtttttattaaaatgcattttttattcttaagtggtaggaagcaacatccaaaaatgcttaataaaatgcttttaagctgcatatgtttgtgctcattaatattctaggtagtttttaactggtaacattgattggcttacaaaataagttgaaaattgttagaagttggcatttctaggatgtacatgggaaaatgagccaatttctggaaatggttacacttctgaaaacggagtctatgaagaggctttaggaggaccatgaacctgtgaaattacatgcaaaatgttagtggtgtatgcttattgtggagagaggttccaggctgttaaaattcgctggtatgggacgttaattataagatgcaaagtaaaatagtgcacattac

SEQ ID NO: 106516 - DNA, 1040 bp, Homo sapiens
taccaatagaggttaatttataaatgcgttttaaaattaaaaatggattattgattttgttacaactatcttttaaaaaaccttctcatatagaatgtagcatagctggagcacatgaaaaaattgctgagtgcaaaaagcaaattcttcaagcaaaacgaatacgaaaaaatcgccaaggtaagggttttgagggatttaatgtgcaaatacattattactgactacagttttcatgcagtttttaatgttgtgaggtaaaatctgcagcctgaatcaacctggattaaaaaaaatccaaattttaattccttaaaactatattattctttaaaatagagaaggaagtctgtgttgagaagaatgtttttgctggattacattgattatccaagtatttcttttctgtttttctctttttttttcttatcccagtatttcttaagtattaaatttttaccatcttggacccttttgcctaaataatgttatggttaatcagcagaggcaatttacataaatatactagatttatggtttgggttttttgtttgtttgtttaatagagctactttccaaaaaatgaaatggaaaagaatttaaactctgagttttcattaagtacaaagcaagcaaacatttctagactgcctagaatatctaataagaaggttaaagttgagttttgttataatctcttgtttttaagttagagtatacccttatgtagttcctaaatactatttcaagataatttttaatgttagaggcactgctcttcttataatgtaaattgaagaaaagtaaaaataaaaaatataatgtgtaatcacaactgttacattgatatgaaaaactagaagaaaatagaaaatgttaatggttattttgaagttgtgggtttttatggcttaggttcttttctctgtttttgtgttgttttgttttgttttacatagggcatgtattattttgtaattcaaaaaatttgtatccaaaagaatcatactttgaattaatatgctcagttctaaaacaat

SEQ ID NO: 106517 - DNA, 1145 bp, Homo sapiens
cagtggggtgagctagtatctcactgtggttttgatttgcatttccctgattagtgatgttgagaattttttcatatacctgttggccatttgtatgtcttcttttgagaagtgtctattcaggtcatttcaatggctgttaaatttcaacatgagttttggaggggacattcaaaccacagcatcaaactttaatctctcttagatctattaatattttttcctctcaatcagggcactcactccccaggttgccttagatgttgttttcctattactttaatgtatttacatttgaaatccccagtcctcaatacagttggagatccaggcatgtagcaaaaaaaatggtatttcttggagacttgagaagaacacagataagactagcaaaggaactgttgaataccatcagtgccaccagattcacccactagatgcttctttttaataaacttaaaacatttgtagtaagaaaattctattagtatttatttcctgcattttaatctcttcaaggactatgttttatttgtctcagtctcttcagataataatgttggtggttaaaaaaccgaaagcattagtttgtatttttaaaatataaaattaaaacacttgatgaatatgtagcttgagcagtctgtcaaagccatgactctgagaaccaaacccaattctaaaaatgtttatctgatattatcacaatatattttaaaactggagccatctgccttccaaagtttatctccgctgcacctgcgctcaaaaatacttctgcctacacacaggaactattgtttaaagattttgctgttgattcagcatggaggctctccaggaattattcacactttaaaatttattttaaaaaataattactgcgtactataaaaaacaaaacagaaaaccccccaaattctacaaagacatgcaggaaaattatcttttcccacctctatctgtagtccctcttaccagaaataaccgctattacaagtttcttgtggatctgtccaaggatagtctctgaatacacacatgcatgtgtgatacacatgcacacacgcaaagcctcctttttccacacatatggcaacatattgtatatgcttttctacacctgttttgttttcattttactt

SEQ ID NO: 106518 - DNA, 1044 bp, Homo sapiens
gaattatttataaaaggaatagatagggatgaggtatccggagggtgatcaggaagtgtacctgggagatttacgggggtaaggaggagccagtatagtgatgagaccgtctagggtagatcaggacgataaaagatgtatgtgtgtgtgttaggaagggtggttgtcagctgggatgaatttagaggggcaaaggctgggtttgtggacagtctaagggagatggtctatggactgagagcggaaataaggtgacactttgggggaaggggcatgattggcaactggagggagaacctacaaggtatctggttagggaggaaggaggtcctttgatatctgggaaggggatatctagggctcttgggtgtttttcaggagatggtgaccggtaactgtaaatgcctgtggagaggccacttcttaagagttgaagaccaccagggtctccacattaaagggcctggccatgggaagaacagtgataggcccaaatttccagactgataaagagtagtggaggtgggaggctactaaagacccaggaacttcatgtggaatttcagctttgcttcattccagtttcatttatttagtggatatttatccttcctggactaggctttgggattacaacccagaactaacaagcaagaacttttccctctccaaaattttggtctgaagggaaagaaacattgactaatgagttttaagagtgacaaatattaccacaaggaagtacaaggttgggaactgtaggaacatgtaacaaagattatttatccaatcaatggaaatgagaaagcctcctcgaagttaatcccatttttgaagaataaatagatattggactggtgttctgggttggtagccacttgtataaagaccccaagatgttggaagaactcaaagctgacaagtattgctagaatttagaaagttatgagccagagatctctaagggcaataggaatccattaaaagttttaacactggtgtggtgttaatcagattggcattaaaacacacacacatgccggg

SEQ ID NO: 106519 - DNA, 1002 bp, Homo sapiens
tttaagaaaaagattttcaaaaatgagttaggattgagtggtccccaaatatagatatttagaggaaagtggaaaatgatggtttatttggcagaggggaggacatggatgctgctgggcaggaagaaatgatagccacccaccagcattatatttctctctgtgggcaagattccatttaacattttctcttcacttataatctgaattaaaaaactaaaatactgcacatgtactttatagtccatcacccctaaaagtgcttcagcactcctttcgttttgagaccttcacaggtaacccagggacttcatgggtggaagttacacttataactttagttgtctaattctgctgtctttaaaatgccttcacagttgggtacctgtgttgatttttgtcaataggaaagggtctggcaggactgaatcatattttactttaaatgctgaagtaagagagggcattatgagtcaaaagaaagtgtgagatacgtaaataaaatactgtataatgcttatggccataaaaataaacttgcttctactatttctatagtcttaacctttcctgtcatttattcgtggtgatcatttatgctttctgcccttgggttgggaaatggttatgaacacagcctttaggctttgaatatggccttgattctcatttcctgagctctctggttgtgttcaacttggtccagtctccttctttgagtctagaggagatgaccattaaatgggataataaatgcaaaaaagttttgcttactcctaggctcctagtaagtactcagaaagtggtagccattttgaagacagttacattctcatctttagaaggagatatcatacatctttttcttttcttttctttttgtttttttttgagacagaggctcattgttgccaaggctggagtgcagtggcatgatcttggctcactgcaactcctgcctcccagggttcaagctattctcgtgcctcagcctccctagta

SEQ ID NO: 106520 - DNA, 1008 bp, Homo sapiens
caggcacagtggctcatgcctgtaatcccagcactttgggaggccaaggtaggtgaatcatttgagaccaggagttcaacctagccgggccaacatggtgcaaccccatttctactaaaaatacaaaaaattagcagggcatggtagcatgcacctgtagtcccagctacttgagaggctgagccaggagaatcgcttcaacctgggaggtgaagtttgcagtgagctgggatcacgccactatactccagagcgagactgggtctcaaacaaaaaaaggaaaagaaaatgtgatatccagtgtatatatgcaaataatgtaagactgttcagctttaaaaaagaaggaaatcctttcatttttgacaacatgggtgaacctggaggatattaagtgaaataagccagacacagaaagacaaatactgcaggaatctcacttacatgtggaatctaaaaacattgaaccacagaagcagagagtagaataatggttgccagaggctgggagttgggggagtggtgagggaaatggggagatgttgatcaaagagtacaagtttcagttaggatgaatgagttctaggaatctgttacacagtaatggtgactatagttaataatactgtatacttgaaaattgctgagagtagatcttaaatgttctcaccccccaaaagatgaggtgacagatatgctcattagcttgatttaattattttataatatatacataaaagatcatatttacactgtacaattttgtcactcatgccttaaagctggaggaaaataaataatcacatgttggtattggttcattagctgtgacaaagatactatacttacataagaggttaacaatagggaaaaccaggtgtcaggtttacaggaactctctgtataatctttgcaacttttctgtaaattcaaagtcatcccaaaattgaaagtttatttttaaaaaagactatggcaaggacaatagtctatagttcaagtttaatt

SEQ ID NO: 106521 - DNA, 1031 bp, Homo sapiens
aatcccagttactcgggaggctgaggcaggagaatcgcttgaacctgggaggcagaggttgcagtgagtcgagatcgtgccagtgcactccagcctggcgacagagcgagactccgtatcaaaaataaaaattaaaaaaaacagatctcccttgtgctacccctttatagccacattcattcctattatcctcacagtccctaactcctggcagctgctaatcggttctccaactctaaatttgtcattttgggaatgttacataaatatgatcttttaaaattggcttttttcacttagcattttaaaaagaattttatttttaaaagaatatgataaaatttttaaacgaatatttatttttttaaagttgttacccagagtttgattcactaattttaagaccatatatttctagcttgggtgttccatactctgtgttgctatatttgaacagcagctaaagtcgaatatgccgacgtaatagctgattatagcattaaccttattgcctgctgttaaggatgataccttgatgttaaagggaaaattaccctgggaaaagtccatcctatcaacaaagtagatattacaattgatgaagagcaggaataagaagtcccaatgtttataccaaataaagtaactgaccatatttgtactccatttcatcttgaaatcttcaaaggagagagactttttggaacatgatatttaaatgaacagcagttgaaatatttacattaattaactaatgcaaagcttatgtcacagaattgtggaatgtcaccatacgaaatcaagtgtctgcatcatgttaagcttctttgaatgtcttaagtaggaaatggagttctatggataggcaagggctagaaatagcctcagaaaaatcaaatcttcagatgctggtatactattttctgacaaaatacggagaatattctaggatctataggagggcatgttagtgtttggctgcaaataatgataccatggctctagggaatgccacatggtcaaacctatag

SEQ ID NO: 106522 - DNA, 1043 bp, Homo sapiens
aggcaaactatgtgctcaggcagagaatgtaaatataggtgactattggcgatctctatcacaaatagtatttacaaaggcttagtagaagtggaagcattttccctggatcttttagagaagagtgaaatttgttgtgtgctgctcagcctgtatttaggaggtaatatttaaagaggtgggtagaataattaaaaactgtacgagcattattaatgaaaactacatttatcccactagccactgcccttactgtcagtcatttggtaagtgacctttgggaagccatttatctgttacagacctgcatttcctcacttacaagtattctttgtagggctgtggtgaagattaaacaagacagtgcatgtacagagtttagcagagggtctgatccaagttaagcactcagcgaaaattgttcttattggtagtgttgataagtatggcctcagagtaaaacgcgtgctagctgttcatttatttaacatctatcctaagggaccatgctagactagcaaagaatgacttgactgaggacacatatatgaattttagaattttgtaaccccaggccagtcataggagattaacgttcccctggtagactattggggaacaaactctctctgttccccaggctttcctcctcccagtcaactttaaagacacctctaccacacacacacacacacacacacacacacacacacacccgccaactcctgtcaacaggagtactggactttaatttgcctcttatcgctccttcacacacacacacacacacacacacacccacacacacacacacacaccccaactcctgtcaaccggagtactggactttaatttgcctcttatccctccttctcccttccttagcattgatgtctataggtgagtttgcctggtgagagtgaaggtaaatgccagagcagctctttattccactggcctaattgcgggttcttagcaaggcaatagcatcccactccaggcacatattaacctgagtggctgggtagccgtcaggacctgtg

SEQ ID NO: 106523 - DNA, 1052 bp, Homo sapiens
tccaaagaaaaggtaactggctgttctgatatcgcaaacacagttgaataaatataatgcttccagttataatagagtttgagttttaccaaaggatgatagtttattttaaggcatctgtgtaagatctcaaatgttaaatgtaatcctgaatatgatcttagaaaaataaaatgacaatgagtttaggagtatgatattattaggtatttgtttctcaacacaaaaactactaaataacatcccctccaaatttgttaaaattgcaggaagactttagttatagaatcctccttctttcccagtctatacccacttttttctggaagttatccaaaagtgtgctcttgtttctttccagcaccattcccccagctcctgttttcttgtctttccatgtaatgtagacccagctgcttagggcagggaagatcatcagcaagactgtaaaacaggcaagcgttcttcaggaacactttctgggcccattgcctttgcccaggctgacagacagctctgtggtaatgagtagtctctgatcattacaaaaatagcagccatcattaatggagtgtctttttttttttctttttttgagacagagtctcactctgttacccaggctggagtgtagtggcatgatcgtggctcactgcaacctccacctcctaggttcaagtgatttttgtgcctcagcctcctgagtagttgggactacaggtgtgcaccactacacctggctaatttttgtattttagtagagatggagttttgctatgttggccagactggtctcgaacccctgacctcaagtgatccacccgccttgacctcccaaagtggtgggatttcaggcatgagccaccaacgcctggcacattaatgttgtttctcactgcatgtccaccattgtacatttactgttttgggaggatagtggtgaagtttcacataatatgaagcaggaaattcctggaggaattttgatttaaaaaaacaaaaagggctgagtacagtggctcacacctgtaatcccagtactttgggaggct

SEQ ID NO: 106524 - DNA, 1033 bp, Homo sapiens
ctaagatcacaaagcatgtaagaggccctgtaacccagatctgtctaattactccacagctcacatgcttaaccattctgctgttccgagccctttccagaatgtacatggcttttcatgagcttgagcaggtcaccctaacctttgtttttcttatccttgtctagaaatactgacctttaccaaaagccattttttttaagtaaaaatatcagagccttttcttgctgtgccttacaacagtcggtgtgttgtatttagttgttcttttataacattttttctttgagggggaggggaagtatctacagtttgcattagaagtaatgggctttttaaaaaaagattaaatgaaagctaaggttgcagcagatagcaaacacaatcatctgggatttgtgccattaaaaaaaattcctttagaaagggagaagtgaaatttcactatttaaatagcatttcagtgcaagattgcttttaatcacattgttgttgaaagtttttattgcagtatttctaataaatgtgcccctctgattattaaagtattttttgattgaagttctaagaaaaagaagcctgttagtagacttagcagttggagttactgtacttttgagaaaaaggcagagggttacatttatattcatcttgtacagcagggattataataaatgagcagaagaaggagaacgatttttgcatttcacccactcataacgtaaaactagattaagtattcttgttcttctttgtaataaagaccctgctagcatgaaatgtttttttctcttatatgtaagcatatggcaaggaaaaagcactagttcattatcaattagattcacaatcttaaaacagaaactatttccctcccaggttatacagatgttttccataatcctgaactccagtcatgcaacagaaaaaaaggtaatgcttttaaccagtggtccccaggctttatatttcaaacaagaaagtttcagaaataatttggggactccagacatacggttgttggcaatttata

SEQ ID NO: 106525 - DNA, 1044 bp, Homo sapiens
caagtgctctgagagagggattctgctgggaaatgtgtaaggaatgccctctttgaatcagcagtggagatggctgctggtggaattgacaagaggtttagaggtggatgggggtttgggagagtaactgcatgaagtagagggaggcaccatgtggtggccctggagtgacaccccacttacttggagggaaggagaggtgggcagggttcccaggaccaacaacctttcccagtgctgccacagtgtcgtctatcttttggggacaggggttgtgacaggaaagattatttttggtacattttcttttttgttgaaatttttagaaagccagttgttgcattattgttttccacagttaacaaaacacagttttcaaattcagaatctttcacagtgactgttgtagtctatttacgtgccaaaagagggatggtattttctttcagtgatattggtgaaaatgtgtcggcagtcttctgtgaattcatgtattgctgatatccatctgtgacttttatgaacaaatgaatagttcctaccaactccagcaggcagttccgttaaaaccactgctaccaggacaagaaaacatgctaccgtggcagcaagtcttgtaaaatcagtcagtgttggtggtaaaactattctgaattggtgagcagcttattattcggagtagttaagaagccctgtacttttttgctagccaagctgcagttttaggagttaacaattaaccaggatttccatttgagcaatgatggtgaatgattgtgctgccattttggcatttccagttttttcagtctgattgctctcacagcatagtttgctttcttggaaactacatagtaataccatgatttcttgatgttgttttaatgttttaaaatactccagtgtgcctcatatttctcttcagttacttagtatttttaagaataaggtgtgaaaccccgtctgtactaaaaatacaaaaaataagccaggcgtggtggcgtgcgctcccacttgggaggctgaggcaggagaatggcgtga

SEQ ID NO: 106526 - DNA, 1029 bp, Homo sapiens
tttttccttagttgtattataagcaaatatctttaaaataaagttatgtcatttgtaggagcaacattttaatttctagatataaaatgtacttatttttcctcttactgatatctgtgcttttatgaatgtctgtgcctttggggctgctttagaaaggaattaaactagcaatggtattattcatgcatttaacaaaatttactggtgcctaatatatgctaggcattgccctccactgaggtaggaaaacagtgtctatgatttcatgcaccttatattctgacttaatacaatacattgtattaaggaggagagagaaaaatgaaattgtgtgaaatcagattgtttcaggtagtgataaatgctaggaataatgtgagagaaaatgactggggcagaccactttaggtaaggctagttaaagaaagcctgtctctggagttgatgtttaaactcagtgatgaaagagagccagcccatttgaagatgtagaggacaagtgcttcacatagaggaaatagcaagtgcagaggtccttagatggaagtggtcttggcagaaaggccagtgaggaggcctaaggacagtgtgcaaggaggaaaggggtccaagttgaaactggagaaagtgggtccaggaccagatgacactgggccctgcaagccatgagaagaatcaggattggacggcgcaggcaatgggaagtcgctggagggttttggccaggaagtgttatgatcacgtggttgctgtatggaacacggggcaaatgtggaaccagggagaccagttagtgagctgttttatactagttaaggtgagagctggatcaggagagaaagcttagattaggattgtagcagcaggggcagagaagtgtgaacagaattaaaatctgcatcggaaatataaagccagcagggcttgctgatggactgggaaaggaagggaggaggaatgactcatggggtttttggctcaagcagctggatgaatttacttgagcttatggatcaggaggttgtt

SEQ ID NO: 106527 - DNA, 1052 bp, Homo sapiens
aaagctgttttgtcagatacttcaattccacagcaaagtttcaaacagaacactgcgtcaagaggaagaacaacttcaaaatacaaacagtaaccctgggaagtcattcagtaacttaaattgagtgtataaaaatttaattatggactgactgccagaaaagatgattttttttagttgtgttattaaggtagccagcagagctaagctgattcttgggtggatgtgtggaggctggtctcaatattaccttacctgtctcagaccttctgtcttcatgcgggaagtgaggtgtcaattgagttcttcagttttcaggggattcagatttcatgccttgtgtaataatgagcttgaccggaaggttttaattgaggttgaaattgagctccccagttgtaggactttaaatatgaaaagatcttaaacctttaatcaaattgctgttgattctctataattgatttttctgaaaactcttgtcagacagttttaggttcactgtttctgctttcgtttttgcatgtcacttctgatgttttattagttgacagccctggcatgcaggtggagcagatactgtttctctcttcagaaaaaataaatgtgtgttgcagactcattgaaaacattggcattcctgggtaattaatcactcattccttattaaaagaatgtataatgaaggaatctgtaaggctgtgttcaaaatgtgaggtttttcttatttccatgttctggtcttcaggtattctgccctcccccacccagaataaggtgatataaaaaggatataaaaccagtggaaaatggcaataaggattgtgactggctcagtgtagcacttttcagcagatagttttgtcatttcgttgtaccttgcagagttgctcttgtttgttggactgtgggaagatgatgctccctgttgggattcctacacagaaatttctattttaaaagacaaaacagaaacaaccaaacaaaaacaaggcagctcctctaaattgagttttaccaggttccttttattctctctctttttatgtttt

SEQ ID NO: 106528 - DNA, 1081 bp, Homo sapiens
ctcggttatccagtgaggagggcgaaggcgatgacaaagaagagtctgttgaaaaactggactgtcattattcaggtcatcatcctcagccagcatctgtaagttccacgtccacccccgcgttgaccctccccacacagcatggacagggcactgcaggggggcgcgccagggatcttggcatgcccgtatgtgtgggacgcggtcaaggtgtgagagaagttcaaaacagggtgccccagaggcagcacacactctgtacgggggacatctcgtgcttttttccctttctcttccatgacgctcagggctaggcattgtcactctcatgcttcacagcctccggtactcagaggcagttctgtctttcctgattagctcctttcctgaaggatctagaaccctgactgggcatgccagtgtgggagtcagcaagcacgcggctatgttttctcttgcagttttgcacatttgggagccggcagataggaagaggctattacgtgtttgactccaggtggaatcgacttcgctgcgccctcaacctcatggtggagaagcatctgaatgcacagctatggaagtgagtgcctgttgttcttgggagaggagctgactttacacagtgctgcattgtcttttatttcctgtgagactgatgttatgaagatatgcttatctaaacaaaactggcctttggccctgagaagaaggtgccttgtcattcattcattcatttacccctttaccccacaactacatattgttgtgggtgctggcattcaaagcagaaggactcccacatgtatggagctcacagtctagttgggattgggtaaggggagaaaaaaactagtctacagaagaataaggagatgatagcttgtcctaagtgacagaatggaaacaataacaatcagcaagacttagtgagagccaactatacaccaaacaacttaaatatacttaacattcacaattctctgtcaggtgaccatgattataccctccccccacccctggttttttttttgttttgtttttttaatagatgacaaaactgagatacagtgtcatgcag

SEQ ID NO: 106529 - DNA, 1025 bp, Homo sapiens
ctgccacctcggtttaaattctgccaaagaagtttttgaaattttgttactgtcacatttaagattcagagctaaaataaaaggagaccctccctggtttgaatttagatggtttccgcatcccctaataaataccttgcccacacattcttaacagaatccattgttacaacaccatgctgaatatcccttgatactgtggggctttattcccttgttcaggccaatagttatgacctagcagttgctgttaattagctgcacccttccttttctctcattcattcctgacttctctcgacatttattcagtgccttctgtgtttcctgcactgtgctgaacactaggaccacaacggtaattaagctggggatgactctctctgcagaggatttggtgattagcaatccgacacttaaaggatgagcagaagctggggtattgggtcatggcattttctcagaatataaggaagtacagtggctggaagcagggaacgggggcgttgggggtgggaggtggagctagaggctggggcaatagcagcggggagttgcacacatacagttctgtaagaactgtaccaggaaggcattaaagaatttgaaggagagaggtgacaggattggctttgtagttcagagtgattgctttgatgtggatggtttctctttgtcacaagcaaagagggtggtgccatctgaaagtctctgtgaatggctgtggtcagtgtcattcactgtcctctaatttttttcaggaaaatcccaccagtgcccagtaccacctcacccatctccacacgtattcctcaccggacaaactctgtgccgacatcacaatgtggagtcagctatctggcagcagccaccgtctctacatccccagtcctgctctcatctacctgcatctccccaaatagcaaatcggtaccagctcatggaaccacactaaatgcacagcctgctgcttcaggggcgatggatcctgtgtgcagtatgcaatccagacaagtgtcctcttc

SEQ ID NO: 106530 - DNA, 1006 bp, Homo sapiens
tggagcagctgcttccagacatttgttaccagttttaaagagaggctgcagatctggacttgcatgtgaaatttagttgagatatatgtgtgtgtgtatatatatatgtatacacacacgtatacacacacacttttttttctcttcttaaatctggtatagcctatgtatctgtgggccatctttggctcatgacctgccattttgccacctttgatttttaccatgtagtggcactatgtcttactagaacaacacagacagcctaactttgggctttttccttaaaatcagttaaaatcagtttccacttaagtttgtgtttgagagagattttctctgtgcagaggaatactttttattatgctacacaaatcctggggcaagagcaggggtgcttgcttagagatcaaaggatcattgaaccccaagaagtattgcacatttttatgtctttgttcatttatcgtatagctttcataagaatctcaaagggactcgtgaccccaaaatgctttaaagaatgctgctgttacaaaagtagggacctctacttgctgttccttgtggagctgccattaaaacaaaaataactgggctagttgaagttttctaaacaaggggatgaagagtgggacatgctgggaagcctaggagatgatggggttgggtaggcacccccaagagtctgttcatggcctgtgccaccaaagatgtaaaagcccactgtgaatgccagagtttcctcctccccagcatgggcactgccttgagtgcgaactgtcacacctgtgtgtgctagcccttgaccttgttcccttctcagttaacaacctggaataccttcaaggacacaaaagcactggaataccttcaaggacacaaaatcagtaaataaaaccaaaaggcaaacataagagccttttctctaagttagaaacccaggcctgcaactcttctagccagttggctagaagtgaatctttgcaatgattgtgcccagtag

SEQ ID NO: 106531 - DNA, 1244 bp, Homo sapiens
aacaacaggtagaatgaataaacttggttaccagcctaataatgtgaattgctacagaattattcttattatgtaagaaaacaaaaactttatgcagatactttagctataaattgatgtaaaatactgatttttttaaaggaaggagagaacagtatcttgttcaattattatgcaatcaatcagtaaatgtttttaaaatgatactacaggagagcttagtaaggagagggcatggatgggccagtttggcatagttgggagaaatcagtctggtttccatcccagtcggggaagagagaggtgagagggaatcagaacgtacctagttgattccttggtgacaagtgcaatggggtatgggtagaatttattttcagagccaagaggacttgatggttataaataaagttgcctttagcaatggaatttacagatcgatcatgttgttccgaaagatgtgaataggatccacaataacaagttgattcagactaatgtagatatttagattagcaagtattgaacatttgatttcttagactgaggttttaaatgaatttcattatttctcccggtaatacacagagcatcgggattaggaaattagccattttggattctgtctgccacaaacagacctattctaaacagtgctattaaattttagactgttgttcaaatattttattttctcctaaactactttttatggtgatgaataattaagaccatttaaaacacgggagtacaagtatttttttgaattaaattaacttgcaaaaaccaaatttgcagtggttgggttgtttctagacagactttggtatcaatttaaaaccaagataatttttatattctttccaatagaatttcatgacaactcctgcagttttcttaacctacaaaaaaaaaaaaaaagtgctgcaatgatgaacaaagaattatacaaaacctacttttgtatctttattttggaatttcttgttctattataaatatggaagtatccctatttcagaagacatattttgttaaaaatgaattgtacatatttaaatatgtatttttgcacaggtctttttttctgatatcctgttttggtacaattgagatcatctagtatttatttattaattaataaaagtaaatacctttttataatttgaagtggttcactgccaagccaatagttctagaacctgcctcctttacagttttaagggatgcctctgttctgtgaa

SEQ ID NO: 106532 - DNA, 1041 bp, Homo sapiens
gtggcaccaagggttacagatctttttgtcagccagcaacttacacgatgtgtccgttttgttattcactcatgaaatacaatttaaaatatttaaaatattttgtattccaaaaatataatacaaagaagtacctctgagaacattgaaaaaaatgtataatttgaaaaatgtaacttataagggcagctgtcttcctgcaagagttctgttgccaaggaatttcttaatgtcgctcattctgtccagggggtttggggcgattgggctttgaaaaaatattcttaaaagtttgtttagcagaaaataatcacttttacattttgtgcaaaacattttacattttcagataatttaaatgagcactacatactgtcagtgtgaatgtagggccttgaaagcattttgcttttttttttttttttttttttttgagcttggttataaaagcaatctcctgtgttaaaaacgtgtgaatagtttgataatttgtacacataatcaagagcatctcagctggactttgtgttggctgctgtatagaacatgaacaaatgtcaagggatagaaaattactttggatatttaaaagagaagaaatatatagtctatttgttttgtaacaagtttctgtaaataaaataatttatactatttataagaaaaggttgtgctttgctttataagaaattagcttgtggaacaaacatgttactaaacgggcaataaaattaggacttctcaataaataaggttggctgcatgaaatattgtacgtttctgcctcgttgtgatactaaaccctttcagtctactctgacttttcatcacttttggcatggaacacccttgtgaagccccttcaatttagccttcctcttatataagctaaatacttctaaggcctggggatgtttccatctgggggcacaaagctttgctttggataaattagtaactgtgtaaacagtgaacattactgtattctggccttgcatgtttgtgaaagaaacgagggagttgatggattgagaaacacat

SEQ ID NO: 106533 - DNA, 1105 bp, Homo sapiens
ggttgtcatggattctttattctttttttctcccttaaaaagttacattttagatgaaatccccttttttaaaatgggcaaagcaataattctacatcatttctccccttcccttccacttgtttagactaagatatgttagagagggaaagggtcgttgttttagtaaatactattgctgttgacatgttaatactattgctgttgacatgtttactgatgggctgtgttccataattttgttttaggtcttttgtttgaaacagtttactgtttttatcagttttggtccctaatttttcctaacctacagtttttctctgagtacatatggtttcattgtttgatctactttctatctatctgaatatgaacttctaggatcatgtttattctagtagatgatgacttaaagcctgcagtataggagggacaacgtcaactactgcatgtgcaataacaagcttgaagggaagctaaatgtttgttacaaatttaagacagtattttaatgccgtttgcatttttctaagaattttctataaagctaattctgttattttttgtctctaaattagggaactgtccaggtttattgctgccgggagactacactgcaaaatagataaagtgaatgaaatagtagaaaccaacaggtactctcatttctcagaataaggggcattcctaaattttaaaagtaggtcaactattgtcatggaataatgtgactggtaaataattcattttttcttgaatttatttatagacctgatagcaagaactggcagtaccaagaaactatcaagaaaggagatctgctactaaacagagttcaaaaactttccagagtaattaatatgtaaagccatgtaactaacaaaggatttgctttagagataattatttggaatttttatagcttacttcacaatgtgcccaggtcagctgtataaaataaatactgcattgttgtttctttccatttatttttttcttaaacacataggccttctagaatcgggtccacttatgttaaaataatgtcacttgaattattcattaatgaaaatctggtttatagggtaaggttgcagctgggttc

SEQ ID NO: 106534 - DNA, 1011 bp, Homo sapiens
aaaaaatgatttttactttattttacttaaggcataagaagttctccgtggttaaaatattagtacgtgaactttgtcatctatgaacaagttcctttagaagctgagctctgatagtgatgtcaaatagccacctgttacttgaagacgatgtttgcatacctggcccctcctttatcactgctgttgctgccattgttgatgacatgatgtggaagggcagtgagaaatttgatacttgttcatctatctgttggactcaactagtagtgttgctttagtttttaatctttttatctgaaacggagagtctattataatttgtcattttattcattgcagcggttgtggaacaggaaatgaaaaaggactggctttttgcccctcattatcgatactatgtaagagaaatgagaattcatgcatacagtcagctgctggaatcatataggtcattaacccttggctatatggcagaagcgtttggtgttggtgtggaattcattgatcagtaagtttgaataatgccatgttaattgaagttttaaagttgccttttaaaatatgtgaacttgtacaattttttacttgtttacattggttccctcaatcttaacggggaggggagaggtttttttcctcagtattatcaaaacattcgtatcctgttgcctctgccttcctcatgtcatgtctgccccttgcattaacagatgggaagatgagttgtagtgaggctaagtgatttgttaaaggtcattagaccagttgttatcaaaagttgtcttctgttacttctttgtagaccacactgcagctacggtaatgactcttagatctgatatttacagttggtcatattccctctgataattccttccagtttttaggttgctgctgcaattctggtcagattggttgttaaatgtgggacttttagtacttgcatcagtgattaaacaaataaatacttaatgagccattcattactatatgtttggtattgtttta

SEQ ID NO: 106535 - DNA, 1979 bp, Homo sapiens
ttcacctgttattttcactctaataaacgtagaattatctatttctcctaggatccctggttccttttagtgggggatagtatttaaaaaccaagatcttagtgctaggtgtatccattgctgtattcccagtcccttataaatttgtgaaatataactaataattacataaaccaggcagacacatactgaaaactaccaagtgtgaacaaattattttattcatattcaaagcaaaggaaacattccacagtgctttgagagaaaattatatatttacaaatttagtcatattctaatagcgactaagatacaatttccaaaacccttcagatgatgttattttgatgtagtgtattgtgattatgagagaaaacattgaatatatagaacagagaaaaatacttaacaattgtgaatatatttttcttaaattgttttcctgaatctaagtatatgcttgggcatttcttatgtattttttaaactttatacaggtagagaaagtagaataataaacccttgtgtacttatcacccagcttcaacaattaacagttaatggccatcttgttgtacttctactcctacctcttccctcaacctttgaagaaaatcccagacagctgatagctttttttggaaacttgtagccttttctcacctattgccttggctttcttgacaggagggagctctgacagcctttcgcaagacatatgacaaaactgtggccctgggtcaccgattggatattgtattctatctccttaggattggcttattttatatggataatgatctcatcacacgaaacacagaaaaggccaaaaggtactttctaagggtgggattatattttctctaaattatgatgctacaaatgagaagctgatataagaaactgcctgttttgtttacagctagtaagtttggtcaaataattgatgtacttatttagtaaaataatttaaatatctcctttcggttcaagttgttaaaagttgttttctcatttcaaataacagacaagtttttaaaacgtggccttgtctgtttccagactatgatcttactgtttttatttcatagcttaatagaagaaggaggagactgggacaggagaaaccgcctaaaagtgtatcagggtctttattgtgtggctattcgtgatttcaaacaggcagctgaactcttccttgacactgtttcaacatttacatcctatgaactcatggattataaaacatttgtgacttatactgtctatgtcagtatgattgccttagaaagaccagatctcagggaaaaggtaatgaccaaactttaatactcaaatttaaagacttgttttttttgtttaaatacacaaatcattaaaatgtacattttttttgtatatatgttttttaaaatacctaggtcattaaaggagcagagattcttgaagtgttgcacagtcttccagcagttcggcagtatctgttttcactctatgaatgccgttactctgttttcttccaatcattaggtaaggatagggttgatatttttgattatctgtcttcatcttactcctgatcctatgtgcaaataacctaagacgatttttcacctatctgagaaatgtagtgtgtaggtagctgcatgtctttgatcagtattcctaatgtgcccagttttgtttagaagaagggtcatcagattgtggcctgctgtatggcccaggaggtaagaatgatttttacatttttaaagtgttgtttaaaaaaggaggatgtgacggagagctatgtagcttgcaaagcctaaaaatacttaccctctggccctttgctgagggtatttgccagacccctggttaagagtcttaatggggtataaggcaaaagtgagcaaatggttattaagtattgagcttcatggggacagaagtgagggaattctgaatgtgatttggggtggagattaattgaacct

SEQ ID NO: 106536 - DNA, 2030 bp, Homo sapiens
tcatttgtcttacctactaaataggctaatagtactacctcgcagcatgaagatgattttaataagatgaatgagagtaacgactcgacaaactatggtgattgtttttattaatgctgttattacattttcagttttcaaaaaattttaagctcccatcagttacaaacggaaagtaaaatagctaaaaagggagtgagaaagagattcaagaaattgggcttttgagttgggctgcacccactctgggactccgcagggggccttgagggtggaaaagcccccgtgaccacacaggggcgcaggcgcccaggccgggtgaggcgttcccggaggtgtccagcagaggacgctgccggcggagacgggaccggaagccgggccgcaggcggccgggcgtattcgccgactcctcccgcttccgctgccgcagccggtcgtaaccaagttgtgtcctgtcagccgctgtccccttcgccgcgatgccgctggagaacctggaggaggagggtctgcccaagaaccccgacttgcgtatcgcgcagctgcgcttcctgctcagcctgcccgagcaccgcggagacgctgccgtgcgcgacgagctgatggcggccgtccgcgataacagtgaggcccgcacgagcgccgagtcagcggcctaggcctgggccgtccccgcgttccggagcctgcggggactttttttgatggagctccagacccctctgacggggtctcagagaccaggcctggcttctccggcccttagggttttgctttggtttggggataccctgggggacctcgacttgcctcagcggggtctgcatctctctgtgccgccttcccctgtaagggcagcttgggggagaatcgtgaggcattaatatttacccctgtgctaggcacagagtaaaggccccgtgactttctgtcagtggggactgctcccgggcgcggggtattcctgtgggagagttcagcttgcctgtggaagggaaatttgggttcggttctttctggcccttctgtagtgaatgtgtatgtttgaacatatgtatgtgagtatgtgtgtataaaaagtctttccctgtttgaagacttttggaacagaatccggcaagagcaaaccgaggattgccctccctccagccctagtagaggttggcattgccaggattggccgtcacgcaaacctcccaccagcatacgtttatgttttgccaagccgattattaagcgccatcgcatgccttcctgttagtggggaagagactggtggatgacttgtggcggggcggggggtgaaatacgtgggcagactttgacttgagggcacaagtgtccccactcacacatccctctttttgcatgttagacatggctccttactatgaagccttgtgcaaatccctcgactggcagatagacgtggacctactcaataaaatgaagaaggcaaatgaagatgagttgaagcgtttggatgaggagctggaagatgcagagaagaatctaggagagagcgaaattcgcgatgcaatgatggcaaaggccgagtacctctgccggataggtgacaaagtgagtagagatggttttccctctctgtagttagtataggctaaaattggagactattccaggtaatcgtttctcattaaaaaaattaacttcgttttagaaaaagtataaaggtaatcatgcttgcttgtactggtgaatcaatgtaaagatgaaaaagtcgtctccatgaaatgccttgtcatttccccaaacagcagctagggctgtattcttccccatttcaccccatgccgataaaaacgtaagtgtacatctagagaattttatttactgcttttacaaaattgggatcattttcagcagttttctcacttggttgggaagcactggttctggtgtctttagtactttacacgagtaatacttagcagaaactaagaaacagtatagtaaatgctgaagttctgttatctttctttactctgtacctgcccagggatagg

SEQ ID NO: 106537 - DNA, 1057 bp, Homo sapiens
ttggcagccaggtggcattgaggatggtattcagggcgctttccttctgtcatatagttgtgggatctctaccaagtgtgaaggtgaatgaggtaagggagatcagaaccatgcttcctggtttttcatacatccaaggaagaagtcctggtgtgggttgtttgacaccttctttccactttcaccttttattttttattccttcctttctacccccaaccagtcgagcaaatgagcaattttgtgtttctaatacaggatctggaagtagtgctttctaatcctcatttcctgtaggatgttcctgcactataacaagattatgttttcttccttctgcagcagctttctgcttcttgggtactactagctattgttcaattcaggtgaggcctgtgatgacatatatgtagcatgtgctctgcgctccctgcaagctgagcagatacaaccaatgcatcactgtatactcttgctgagaatgtggatgcagcctcacagatctttgcaacactccaaccagccaggaccagttgatcagaactgatcttattggtctgataaccaatcttatttgtgaactgattcatatctgtctttccactcttggttctcttgccgtagaacaaaaacagtttaggaagcataattacgaacatttaggaaccaatatgtataagtaattcggagactccaattcacctgcccctcccccatcccaggttgtggaggctcgaggaagctgacttcttaggctaaaggacaaaaaaatctctttacctccttggccattttcatgttctctgccaattactataggcagtcttcattttgcagaggtgaggtaagacttcatcttattcttcatgtaatcccaccttctaacaaaaaataaataaatatttaaattccaaggagaagtgttctttgtgtatttctagcagaaaacagatgcttaagcctaagaaggaagatccgtccatgacaaaggaaagtggaaaactgaaccagttatctgaatacttcatgccaggacagttgctattagcaactgttt

SEQ ID NO: 106538 - DNA, 1028 bp, Homo sapiens
tagtgcaaagccgtgctttctctccctattcctgaggttccctagctgcctggccagaagcctgggagtgtggcatgctcaggtacagcccctggttggtctctatgatatatgccttcctggatatgttatgagaaacaaggggagctaggctttctttccacactcatgagataaaggaaagcaccccagaccctttgctgttccaaatgtggtctgtggaccagtatcttctagaagcttgtcagagattcagaatctcagacttagtggattcagattttcattttaagaagatccctgggcgacttgcatgcttctgaagcttgagaagaggttgccttagagtctggagacctgctttgattcttgcctccatcactgactcctaccctcacccatgaccttgggcaaggtgctcatcttttttctgttttcagttccttatctgccaaacgaaggtccatctgctgtctttccagatttccggaagcaccagtgcattttatgctcttaaaaagtataaagagctctataaatgcaagttaataatacaagcagtaatgattatctgaaaacttaattcttacctaagacctttattccatagcttctattttattagaagttgactttttcttataatttcaacttttattttagattcagggggtacatgtgcaggttacctgggtgtagtacgtgatgctgaggtttggggtatgattcctcctgtcacccaggtactgagcatagtacccaatagttagattttcaaaccttgcttccttccctccttcccctctagtagcccccatgtctcttgttgccatctttacatccgttgagtacccagtgtttacctcccacttacaagtgagaacatgtggtaattcgttttttgttcccaccttaattcacttgggaaaatggcctccagctgtatcgatgctgccacaaaggacatgatctcatacttttttatggctgcatcatattccatggtgtacatgccccacattttcttt

SEQ ID NO: 106539 - DNA, 1048 bp, Homo sapiens
acaagggcaagacggaggagcccatgctgaaccagcacagccagctgcaagtgagttctaaccggctgtcagccgacgtagaccccctgtcactgcagatggacatgctcagcctgtccagccagacacccagcctcaaccgggaccccatctggaggagccgggaagagccctaccattatgggaacaagatggagcagaaccagacccagagccctctgcagctcctcagccagtgcaacatcagaacttcctacagtccaggagggcaaggggctggggcccagcccgaaatgtggggcaagcacttcagcaaccccaaaaggagctcgtcactggccatgacaggacatgctggcagcttcatcaaggaatgccgagaagactattacccggggaggctgagatctcaggagagctacagtgatatgtctagtcagagtttcagtgagacccgaggcagcatccaagtccccaaatatgaggaggaagaggaagaggaagggggcttgtccactcagcagtgtcggacccgtcatcccatcagttccctgaaatacacagaggacatgacgcccacagagcagacccctcggggctccatggaatccctggccctgtctaatgcaacaggtaggttctgttcaccttgaaaacagatagaaagggggtagtctctgggtgactggatgctggtccccaggaattttttttttttttgaaatggagtctcgctctgtcccccaggctggagtgcagtggcacgatctccgctcactgcaagctccacctcccgggttcacgccattctcctgcctcagcctcacgagtagttgggactacaggtgcccgccaccatgcctggctaatttttttgtatttttagtacacacgtgtttcaccgtgttagccgggatgttctcgatctcctgacctcgtgatccacctgcctcggcctcccaaagtggtaggattacaggcgtgagccaccgtgcccagcctggtcctccggattttaatgttgtttctgccacgtgccctcttctaa

SEQ ID NO: 106540 - DNA, 1018 bp, Homo sapiens
gtttgctgtgattttatagcacataactgccatgaataaagagaatcacttgtgtttacctttgcaaaatgtaatatcctgtttacatagtactctcttctttccctgctgtggcagggattatggctatttacaaatggttggttccttcttcttccaggcacaaagggggaatgtactttctcagtccgtttaaagttaggcatgtccatgagacttgctttcaccaatgaaacctgaacagaagtcacatgtatcatatccaggaaaaaagcttttcactgccagtgttcagctccaaccatccttttctctgctgccatcctcatggaggcatatctccatatggagcccccatcacctgggtctctgcctacctataggaggatacagtgtgagacagaaataaaatcatggtatagataagggtttaagatacagaatatatacggttcaacaagaagacaactcagttaaaagatgactgaaggacttcaatcaacatctctccaaagacaatatacggtcggctgataagcacatgaaaagatgtccaacatcattagtcattaatataatgcaaatcaaaaccacaatgagatactgcttcagacctactaagatggttataattttaaaaactggaaaataaatgttggtaaggatgtggagaaactggaatttctgtgcattgctggtgacaatgtaaaatggtgcagccactttggagcactgtttggcagtttctctaaaagctaaacagaattaccatatcatccagtaattccactcctaggtatatatgcaacataattgaaagcagagattcaaacataattgtacgccaacattcactgaagcattatccacagtagtgaaaaggtaaaaacaacccaaattccgtcaacagataaaaatggataaacaaaatgtggtatatacatgcagtgaaataatagccacaagcaaagtcctgacacatgctacaacagaaattagccttggaaacatattaggt

SEQ ID NO: 106541 - DNA, 1128 bp, Homo sapiens
tattaagtacccatatgtgcaagctgttagtataggtgtgatttcaatatggcagttttccaggtccaatcaaaaactggagctttccaacaccagtctttatatgttgctttaggtggcctggagccatacaaaggtagatgtagaaagtgtctcatggaagacccatgcagacatcaggctttgtgctggcctccgataacttctgtcttttgagtaactatccttctgggctcataagtgtttgagagtctaagcttcgatgataactagctctgtgttcaaattttagctgtgctgctttccaacattggccaagttaattcacctccccaaactttcatctcatcttctgaaaaacaaggatgtcagtacttaactacagcatagttgtgaaaattaaatgaaacaatgttttaaacatttggggtttttaaagtggctgctcttagttttcttttccatagtcaaaaattggaaataactcaaaagtctatccacaggtacatggataaacatattgtattatatctatatagtatactactacttcacaataaaagtgaatgaactgttgatctatgcaaagtgaatcagagtctgagaatcattattccaaatgaaagaagccaggcaaaatagtacacactatgtgatttcatttatataaaactctagaaaatgcaaactaatctgtagtgacagaaagcagatcaatggttacttggggatggggaaatgagagggaggaacgacaaaaggattgacaagagttctgggggtgataggtacatttgctatcttgattatgttgatgctttcatgggtacatacatatgttggaacttaccaaattgtatacttgcatgtgatttattatatgttgatacctcgataaagtgatggaataaatgaatgaatgaagttactctttagcaaacaggaaggcaagcttcctcccatgccaatggtggaggcttcctaaggtttcatcaattgcctcagggagtagctaagtcttttgccaagcttttgtcagaaagaactgctcagtattaatcatgcacaatgaaaaggagatttggggtagaaactcatcaacatccagatggatggcacaagaaaatg

SEQ ID NO: 106542 - DNA, 1036 bp, Homo sapiens
cacatgagaatgaaggtggactcctacttagtgccatatacaaaaattaactcaaaatggaccatagacctaaatgtaagagccaaagccataaatctcttaaattaaaatgtaagaatacatctttatgaccgtgagttatgcaatggcttcttagaaatgattaaaaaaacaaaagcaacagcaacaacaacaaaattagacttcataaaaattaaaaacttttgtgctcaacagatgtcatcaagaaagtgaaaagacagtccacaaaatggaagaaaaaatgttcctatcacatatctgataaaggacttgtatccagaaaatatgtgaagaaagcttataactcaacaattagaacacaacccaatgaaaaaaaatggactaaggatttgtatagacatgtctctattctaagaagatacataataagcacataaaaagatattcaacatcattagacgttagggaaatgcaaatcaaaaccacaattaaatactgttttatacccactatagtagctacaataaaagaagacagacaataacaaatgtgacaagaatatggagaaaatggaacactcattcatcagtggtgggaatgtacaaaggtacagatattttgtgaaaacaatttgggagttcctcaaaatgttaaatctaaagttgccacatgacctagcaatttcatttctaggaatatacccaaaagaattaaaaactttggccaggcgtggtggctcatgcctgtaatcctagcactttgggaggccgaggcaggcggatcacgaggtcaggagatcaagaccatcctggctaatatggtgaaacccggtctctactaaaaatacaaaaaattagctaggcatggtggcaggcacctgtagtcccagctactcgggaggctgaggcatgagaatggcacgaacccaggaggtggagcttgcagtgagccgagatcgtgccactgcactccagtctgggcgacagagcaagactccatctcaaaaaaaaaaaaaaaaattaaaaacatatat

SEQ ID NO: 106543 - DNA, 1498 bp, Homo sapiens
accctccttatgactaagcactgcacatgttttccactagagcaccatggaccatttctaaaagtacattaattaaaaggagcagattttcaagtacaatatgagcctgcctttccctggtgggtgtagggggtaaactttagcgcatgtttggctatgaagtctataaagatcaaattggctgaaccaagcactcagatatgagtgttgacttggaagatgaaacctaacactccagggggcacagaatccagagatgtcgctggttggaactggaggcatgaagaaaatcagggctggcctcgtttgacaaagcattgccagagtcatgctcactcagaacagcagagtgaacctacaggaggaagcaatagtcgggggttctctgatagctcccttcttcctggtgctagtgtttgagctgctgtatgtgtttgagctgctgtatgtaagtgtttgagtgctgtatcctggggcactgaaggcagcacaggagccctttctttatctctttggacatggagcaagagccacttccggttggtatgttttccaacccagcacccagcctgcctcgagtgataggtggctgacttgagttgcctcgattcctctcacactgggagtgctattgtcttcaagtcaccctcctctcctcgactccttaaaatcaaaccttgtaaatattttccagccccatccagggttaagggtagccagggcagaaattcttagcatttcatttcaactgggcaagatgccaatttttccagctcttttcttggcatccattcatcagttatgagtccttagagatgcctgctcatgaaagttccaagacttaactaagaaacagcctattttctatggtcacaaaatctggtaaggttttaaggtaactgttaatatagaaggcaatgtatgttttgggtgtctatgtgtctgtgtatagtctatggttaatgttgatgtggatgtatgataactgtcacagactgagcgcctactgagtgtttgctacgaaagatgctttatgtaaacttgtcttgttaattcttacagcaatcatgcagctagatattattggttctatttagtaattgagaaatcaggactcctggaagttaagtaactcgttcaagcttacacagagagtaaagagtaatgctgggattcgaacccaggataattagagtccaaatcctgtccaccattctaggcttctttatacttttcattataatgtcccctggggatgtgtttgtttctcttatatagctcctttatgaatccctcatttgagaaacacctcattatttagccattgaattaaaatctcgttggttgatctttggtaaagttggaaacacacaagagaatatgtcagacttgaaacagaacataggggtgtcttcaccttctgcttttaatgtggcttttggaatgaaagtgtgagattgcttggaaagtcagaagacaccctgagatgagaagtaaa

SEQ ID NO: 106544 - DNA, 1046 bp, Homo sapiens
tattttcctttatgtaataggaaaagattgtcagagttttaaaagtagtaaatactagtgaaaataacttaataaatcaaaggtatttaaatcacagccttaaattacagctttgggtaaggaatttaaaaagaatttcccttaagagttaaattctcaactcattttcagcttcatttcaggtctgttactagcacaggtagtatgttatcatggtctgttattagcacaggtagtatgttatcatggtttctatagagtcttctattatttgatttggtttccaaagaatgttcattaggatcaaagatttgccacattttgcagtatggaatgggatggggagggaagtaatggtttttttgttttgttttttttggttttggttttgttttgtttaaatatatgatatcaaatgaaaggacaaggtttttccagctgggtttgtcttaatggcttcacctcttactcctttgatgtgaatggtgattgatctgtggttcaagtcaccaccttcttgacagctagaaaggctgaccttttttggtttaagaggtggactttaatcattagcctgcaacttactgcatatgtgggtgtcccggcatccacaggttggttacacattaattaactctctgatcttttctcattggaaacttattggggaaaggagtcaatttccctttgagttgactggcaagtttttgtttttttgcctaattatttgccatttgccccttattaaatgctttccttgaaatgaataaggagcattgaagaggagtctagatgaaaccatttgctgccaagacagatcattagcaagaagttagtgagaatgactcacaaaaattaactaacgttgagtgaattatttctaatatgcacttacattttcatctggtgagatagtgggctgcctttttaaaactgaaatgtgttcaacttactcctgcaaaaattttcagtgagtgaagtttcagttacataagttttatagcggatggttgggttttaacgttttgtggattgaggtgcccagc

SEQ ID NO: 106545 - DNA, 1066 bp, Homo sapiens
gtctcaaactcctgaccttgtgattcgcctccatcagcctcacaaagtgctgggattacaggtgtgagccaccgcgcccagccttgattcttaaagtaacccaggatctccagagcatccttttcataatctcctcacttattttcattcattccctccttccttgcttccttccttctccttttccttcctagcctccttctcactctctgtctcctgtcccttccccctaatatttcactggagtttatataactgaattaattagacctatttctcaaggagttggttttccagaaaattcactttgcagttggcatgacagaagagctggcatattaatcaaatgctacaatttgttctttgtatctgaatgaggctgaggttggacttactgcttatctgttgtccgtttttaccattctgtcctttgcagccaaggagcctggattggattctttgtgattggactgggtggtggttgtaagtgttgatagattgggcatagacctgctgaatggggacaaaccctatctccttagttactgttacagagtccccaggatataaagtgtctgtatgaaaataaataagagcttttcttttcctttgtttggctgatgatatctataccatttaatagaataaaatgataaaaatctttgtcctttcttaaataacatgttaattgctgttttatgtatttgttcattttgtgtttctgaaatatattcagtttatagacatttctgtccctcgatgcattttaaattctcaagcatcctcaaattatgtatattgaatataatcttgtatatgtggagggggatacactttgtagctaatggggagatcaaagttactagctttctccatttagtcagcttgttgcagaatacaaaggctgctcaaggatttgagttcatatcttaaaagctcatcagaaatattctaagctatagatttttttctctctcagcaacatttcggatatggaggttctcctcggttgcccttgcaagtgttgctgaatttaaatgccacaggaaaaaagaaagatctgttc

SEQ ID NO: 106546 - DNA, 1041 bp, Homo sapiens
ctcaaaacttggaagcagactcttccccagagcctctagataagaagccagtctgccagtgcttggtttgtcctgtgagacactaagcagagagtccagccaagccccttggacttctgacccacagaactttgaggcaataaatgggtattgccttaagcaactaaatttgtgataatgtgttatatagcaattaaaatctaatagagatggcaattgtaattcatctcccacggcagatttgatcattctggagtgcctacccatagagctgtgttgagaaggattctgactgcatgcaggctctgtgatggttcagccacatctggagcaacttcatgtttgccacaacatatgcatgttattgttagtctgggctgtttctactgagctgggattgtgaggttaggtggagttagattaagttgttaggctggggtcagaaacggaccataggatcatcaaagaaaaccagtcagcaatataagcataaatcaggccatgaaattttgcttgttttgatcactgctttatcatcaatgcctagaacagttcctggcatatagtaggtacaatggtacaatagaagttcttgctttgaagacctagataacaagggattggagttagaagatgacctagcagttaattgagtgtgcttttgtactacaggaccctgtggtcaaattccatttcaaccacgtaacagtttcctcatctcagatagagacaagaatggtttctttgcagtgtggttgtgagaattaattaaggtaccatgcatgagatgccaagcccagtgcctggcatgtggtcagcaattcacccagtgttagctgttttaaggtggttatatcagtcagggttcttagctgcaagcaacagtacagtcacgaagtcagactgatttaagcagtaagataattattcaaaggatatcgtgaagctcagtgaatctctaggaaggctggggaaccaggctctgagtgaagactgatataaaaaaatcactctactgagtcagacagccagaatcatgcc

SEQ ID NO: 106547 - DNA, 1049 bp, Homo sapiens
atttttactacctaagccaaataatcttccgttggatggttatgccacagccaatagacatttgtattgcttccactcttttactattaggaagaaatgccactgtgaccatggatgtacaagtttttgtgtgtacatctattttcacttctcttgggtatttttttaggagtggaattgctgggttgtatggtaactttatgcttaacgtttgagaaactgcccaactgttttccaaagcagctacaccgtttcacattcccattatgtatgaatgagggttccattttctccatatccccatcagtcctagttattatctttttaattatagccattctagtgtatggaaagtggtctctcttgtggtttccattggcattcccctagtggctataatgatattgaacgtttattaatgtgtttattggccttttgtatatcttctttggagaaatgtcttttgccaattttaaaaaaatagcgttgcttgtctttttattattgagttttacatgttctccgtatattctggatacaaacatttttgacataggtacttggaattttattaggccttgacagcttctgggttaatgagaatatccttattgaagtctgagggaagaccaaaggataggctaagctacaaattgaccatatggacagcaacttggttgtgtcatttaaagatttctctgaacttgattctttatttttctgcaacttttaattgtgaaaaagtgtcaaaattacttaaatgaaacaacagcacaagaatacccttatacccttccccttcattcactgatcattaacattttgctctatttgctttcttgttctctctctgtccgtgtgtgtatactctttttcagagctcaatcatttataagtaatttgcagacattttgattcattagcctgaagaattttaggatgtataagctatgaaccaggatattctcctatgtaacaacaataccattttcacacccaagaaatattacattaattcaataatatctaatatagagtctatattcaaa

SEQ ID NO: 106548 - DNA, 1066 bp, Homo sapiens
tatcaactgaagacagtgagctaaatcagcattttagacattggagctcagatcctactcttcaggggcagaaaccatggccttttggttcagtgactctctgtagaaaagcagtacccacaagtagatgtttaaattgacaaatggatcctgatggggaagcagtgctgggggaaaggggcagatggtgtagagtatcagtctgtggtctcacttcttcttataactttacatctgctgccccaactctttgaaaaagaaaagcgcatcctcaggaattgtctcccagaaaatgagccacttgccttttagttgaggtctttggggtggatcaagggaggcctgaattggcttcctgggtctctcaattaccagcattttgaccttgagcaagtcacttaatctcttgttatctgtaaaatgggaagggtatattagatgtgaattaggctgatgtaagaaagcaaaagatgttacacagaacctggtgtacagtgggtatgactattgttgaagatggaggtaaagttggggaaaggaatgcaaacattgtgttcttcctacctaaaactctgaaatcctgcacgttgtcttgggataaccatttgattgcgtattagtggaggttgttcagagaaacaagaccaataggatatgtatacacacataaatgtgtagagaaagatatttattttaaggaattggctcatgtgattatggaggctggcaagtccgaaatctgcagaattagctagcaggctggagaaccagggaagagttgtagtttgagacaaagtggtctgctggcagaattccctcttcttaggaggaggtcagtctttctctttttaaggtcttcaatggattggatgaggccgatacacattatggaaaatagtatgctttactcaaagtccatcgatataaatgttaactcatcaaaaaaaaaataccttcacagagccatgtagcataatatttgaccaaatatctgggtaccgtggtctaggcaagttgacacataaaattaaccatcacagactgtgttgctgtcactgggtgacca

SEQ ID NO: 106549 - DNA, 1021 bp, Homo sapiens
accataaaaataacattgcaagccaaaactttgcaaaaaatcttaataagcagtaggaaaaaattaaatttttactgtgacctttaaaattttttttaaaccattaaaactttattactgttggttatacatgcatagggaaataagaaaaatagtaaaatgaatatttagtatactgcaatttaaaattagtaacactgaaaatcaaaatgttttatttctttgtaaaaaaatgtatcaagagtggttgaatagtgcttatctttctctttgtcatattatctgtgatacagagcaggcatgttttctataacttagcaaattgtcatacttctttttaagttgggattagcttccaacattttatgttttgtagtttgaatatcttgacgtttctctgagagtttaccagagggaatgacactgaccaaaaactctacgttaaagaaactcccagagaaatttcaagatattgaaatgtgacttcttgtcacaatcactttcctatttacatcggtaagtttgccttattacattcttctggctgcatagccaaaccctgttgactagtaatgtaatgtagatataacatctattatgttctatttaaatagaatagttattaaatagtcttaagaatagttatgttctatttagaagataaatagaattccataattctattttctatttgaatctcactctcagcatgatcactttttggtttttgcctgcactttaaattttggtggccaattcacttacttttaaaaaatgtcacataggtatatatcactgggaggcaaggaggcagcacagctacatgctttgctgtcagagagtgaaccaaataacagatatgcagtgaccaatcattgacagactttgaaaaaaggaaatgtgactgctcactgatcacaatacacatttgttatttttatttttatttttttgcgatagagtcttgctctttcccaggctggagtgcagttgcacgatcttggctcactgcaaactccgc

SEQ ID NO: 106550 - DNA, 2001 bp, Homo sapiens
agcgcaaatctagcagaggagggatgagaaacaggctcttctccatggttaataatgtcatatctatctttgggtagcatctgattacaaccgtgtctattatttaaaaggttctttaaaaaaacatgaccacaggggaaaatggagtggctgttctcttcctgccgtctgcagattatgttttaatcatgccgcatctaaagatgcagcgttttctcatgaaatttgtcaaaactaataaggcgattttctaacctatggtaaccccacttaagtaatttatgtaattacttaggacaacccaggcctgctctaggtttttaggccatgttattctttttctttattcccttcaagacctacttgggatgaaccaatacccctaggttaagcacttccactcgaatcttgtaaatgtatgtgcagctgcattttcaagggatgaaaacattgctgtttagacgttaggttcatttatatagaaggagattttaatgagaacagcttagagggcatgatacttttagggtctggggagagagttaaatgagagagaagcaagacctccttgaagctgccatagtcctagaaatctagactactaagctgtgaaggtatttagccaagcctggggtggtggaggggcaggggggcagagggttgttgggggagcttgcagggaagaaagcattcttgtcagactgtactctgtggaagcctggggccctacatgttccctgaatgggtaatgactcatggtggcataccaaaactcaaagcaagggtcagcaaactgtagcccgtttttgtaaataaagtttcattggaacacagccatgtgatttgtttcattatcatatgtggcagctattgcgttacagtggcaggactgagtagttgtaacagagaccatatgacctccagagttaaaaagatttactatctgaccctgaaaagaaagagtttgctaacccttgaactaaaaggctggattttcaacttataggccacaatttcccaagggcatccattgatgggcatcagtgtaatgaatctcctgaagttatatgcagaatattttatatgtgcacatgcccacataggattttctggcgagagagtgcatggattataataggttttccaacgtgtctatgatcctaagatgaagatccttaacttgaaaggatatgcaaattttaccccagtttacactcttgacttctgctttcccttgtattctttttttatcctaaactctttaggatcctgctaagtaattggtctgaaaaataaattatatctgaagtctaacaggaaagtattttattccataagaacagttttatcttaaccagggcctttcatgctagaaccttaaggtgtatgttatagggacagcatgagaaactagatcacggatggggtgggagagggggctgcatggccaggaaactgctggctggaggggtgtggaagtttgcatcctgcctaaggagacagtaagggcagttatcttcctggacaaataaggacataaaaccataacagtagcttctttttaacaatgtgtaaggcaatatgctgagcatgttatatgaaatatctgacttcatgctcaacatcccagcaaatggatgtctgtaatattagaacagtggccagcacaaagtatgcacaatgtaattgttagtgattatcctttatcatcctcagcctcaccattcccatttatcatttgaggaaattgaggctcagacttgttcaagatttcccagcacctaaataacaaaggaggaactggaagttgggtctgtcagtttcagagaaactggaagccaagtctgttcaattccaaagttttcaccttttaaaaaaccctattctgaccaactccacataccccagtatgtgagtcctctttcaaaaggcacccagaaaggctcctgtgatagtggtgttaagagacacatcttctcccacatttccaccttatctcac

SEQ ID NO: 106551 - DNA, 1103 bp, Homo sapiens
gttaactgatgtatcccaaggacctagaacagagcctggcagatagtgggttctcagtaatccttactgaattaatgagtgaagcatcatgtcttctcaagtgagagtgattttaatctcttattctcatttaacctggtgcactatcctgctttaggaggcactctataaggttttaattacatgatgaggctggggcaaattcctcctaaataaattgtgacttaacagcaccttcatgtgaacctcgcataattctttagtaatttctcttcttgagcctcctggatccatctggaaatcattccaacaaacatccatcctatataatagatcactattttcctttttaatatgattctggctccccagagcctgcagtcagcgtcaagttggatttcttatctctgttgcttcattaagagtgtacatatttggttgccaatgctacggtcctccacagtgcagtttgttgcaacaaaagaaagtgtttgccaaatgatttgtcagcatatgttataaagccacacaggcactctttatataactggaaaatactgatcccaattagtgacagatgaaagaccaagagggaaaggctgtgttgctttattcaaaggaacttaaggggttcatgcaaaggtgtaggggtggggtggagaggaagagggaaagagaggcagagaatagaaaaggagcagattgtgggtgatggaataacattttggaaccaaggaaacggggatttagcatcataggtgccagttatctgtcttcttgactcctagcattcttcaaggtaataacctttccaggccaactggtcttatgcattagctctttggaagacaaacattcttgggctttctgaaatgccagtgattggagctgacctccccaggagcaggagctcagcctttgtgtcatgctgagcccccaggtgggttggtgagctgtgatgcatgcacagttggggaaggaggccctaactcctgagcttggcagccatttgtgaactcagcagcttgtaatccttcctgcctttggaagtgactcacctacacatcgggagagcatgttaggcgagcctggcctcttctccg

SEQ ID NO: 106552 - DNA, 1038 bp, Homo sapiens
gccctaactctggatttcgaattcaggaagcctgaggaggtgccaggtaactgtgccaaacacacacacacacacacgcacacacacacacacacacatacagttctcatctcagacctgacacttcaaagcatggactttgaagtatctctctccatctgtgaaatgatgataatgatagtaccaaccacacagagctgttgagatggtggcataattcaaaccttgtgcttagcacagagcccagcgtagatgcggcttcagtttccattagctgatgttgccattttcatcgtcgccacctctgtcctagaaaccttgggctgttcttgactccttgttttgtctatttcttcctaattatccaatctactggccaaatccagatgatttcaaattttcttcagtttttctatagcctacccctccttttttgtattctcacctctctggctcatgccactatccatcttgcctagacaacaatcagcctcttcactgatcttgttgcttctccccttcctgacttttctccgaggtgcagccagagtgatttttttttattgtgttttatttttttgagacagagtctcactctgtttcccaggctggagtgcagtggcatgatctcggctcactgcaacctccgcctcccgggtttaagtgattcttctgcctcagcctccaaagtagctgggactacaggcacgcaccaccacgcccggctaatttttgtatttttagtagagacggggtttttgccatattggccaggctagtcttgaaatcctgacctcgtgatccaccagcctcggcctgccaaagtgctgggattacaggcgtgagccaccgcgcccagcccagagtgatctttcaaatgtacattgggtgctactccctggcttaaaatgctttattgcatttagggtaaaacgaacttcttcccacggtggccctgcctgctgtgatcctataggcgtcacctcatgccactttcttccctgctccctgtgtttgagccacagtgatctctgggca

SEQ ID NO: 106553 - DNA, 1027 bp, Homo sapiens
gttgtgatgtgatgcttggcatagtatgtggcacacggtaatcaggagttcagtgttggtctattaggacatctttggcacatttagcccttagaacagttgcagaggttgcatgtatcagtcatctgtctgaacattgtatgctttctaagtttaaaaaactgtcatgcccaaagttgaacttgggtacaccttacagttttttttctttctgtttaccagtaaaatctttctcaaacccaaagttcctgctattctcctattttatcaataggacaataataataataccaacagcagcagcaaatacttaaaatcatgcattgtactaagtattttactcatttcatgatcacattaaccctatgaagttcaaacttttatccccatttggtagattaagaaaaggaggtaaaacgagtttagttaacttgccgaaggttatacagctaataaattatggagtcagaattgaaacccagactgtctggttctggacccctgactcttaaccactaggtgaagaatttcccaagtagcaatctttttatcctttccacagttgaatctagcctgcccctttaagaagacagagacagtaatagttgagcatattcaaagcaaggtttcactctggccttggaaggaaatgaatcatgcttattccttgaatgctttttttttttttttttttttaaggcagagtttcactcttgttgcccaggctggagtgcaatggtgcaatctcggctcaccacaacctccacctcccggattcaagcaattctcctgcctcagcctcccaagtagctgggattacaggcatgcaccaccacgcctgcctaattttgtatatttagtagagacggggtttctccgtgttggtcaggctggtcttgaactcctgacctcaggtgatctgcccaccttagcctcccaaagtgctgggattacaggcatgagccaccatgcccagctttttttttttttttccttttcttttcctttttttttttttttttttttt

SEQ ID NO: 106554 - DNA, 1062 bp, Homo sapiens
tcacccctgtaatcccagcactttgggagatggaggtagcagatcatgaggtcaggagtttgagactagcctggccaacatggtgaaacctcctctactaaaaatataaaaattagctgggtgtggtggcaggtgcctgttataccagctactctggagtctgaggcagaagaattggttgaacctgggaggcggaggttgcagtgagccgagatagtgctacagcactccaccctgggtgacaaagcaagactccgtcttgaaaaaaaataaaataaatgtattacaataaaaatttaataagcttaaacaatagtaaatacaaataacaaaggtgatgtgtatagacaaggttgaaattgctacagtgattggtggtgggctacaagcagaagagatagcctcatggttgaatgcaaatggccaggatttgagaaatggtagttgatagatcttggtctagactggtcaaggaaaagacttcatcttcagactagaatggagggagccttgagtgcctactaggcccacacatcctcattgccaaagaacatctgcctctcgggagctgtgtgaccttatatacatcagtgtctccatttgccgatctagccaaatgggtatgggtaatagcaagatctacttcatagagctgtcataaggaataggtgattaacatgtgaagagcatttagcatactgcctgacacaaaccaagtgctcgctgagtgttagctgctagccaatttcaatcacagccaaggggaagctctgatccctccccatgttccatcccatcccaatttgatctcgcagtcctgtcttctctctgcccatgctgctcacctttccaaacagagagttctgctagaaaagtacccccttctgagagtgaggaaaagctttcttcagtggagagtatttgagtagctgcattgtcctgctgaaacatgccggccagctttcaagccagaaacacattgcccttaaccaagtttacaaaaccacaggttacctctttatgttttggcaaactgcatcaaatcaaaccctgaaagccaaa

SEQ ID NO: 106555 - DNA, 1072 bp, Homo sapiens
tgggaccacaggcacacgccactacacctggctaatttttgtattttttgtagagatggggttttgccatgttggccaggctggtcttgaactcctggcctcaagtgatctgccttccttggcctctcaaactgctgggattacaggtgtgagccaccatggctggcctcacccaggaataacttttagataattatttagtcacaaatcaaagcctcagtaaaagaaacatgtcaactgagcatgatggagagtgctccctttgataagtgatgtagctcagtgtgcttctcttctgaaagtaagagagatgcattctgggtcatttttttcctggtctcttgtggttctgagccgtttctcgatttctattctcaaagtccctattgaaggcctctgagcacgagatagaacatagaaagtaggggtcattggagaatttgaacacaagaagtggtattggataggaaaggaggcataattgcggatggagaagggagggcagagtgagaggttggggaaggtaaaaagacaaagaatgaaggaacagttctatacctggctgaatttctgtggcaactctaagcacagtgtacaacaagcctggcacaatgaactttttttgttacgttgaaccatggtagaagttcataaaagtagtagtagtagtagtaatagtaacagaaatggcagctaacttattattgggtgctgactatcaccctttaacatgctgtgttttaattggtttatctcatttaatcctcataacttgaagaggatgaaatttattatcctcattttcctattgagaaaacagaggcttaaggaaagagttagaaactcaaagttaaaagaagtaatcattaagttggaaaaggggatttgtaatatatacccttttctttttatgtgagatatctttaggtgctcgtttgagaccatctccatgagaaaattctcatccagatgagacagagatgtcatgaatgtgaaagtggaagatatcgtgaggtgggcttccactatttgggaaatattacattacagtgagtcaaagagagatcagaat

SEQ ID NO: 106556 - DNA, 1045 bp, Homo sapiens
cggctaatttttgtatttttagtagagatggggtttcaccatgttggccaggttggtcttgaactcctgacctcaggtgagccacccacctcggcctcccaaagtgctgggattataggcgtaagccactgcgcccggccttctctgacaatcttaacagcttccctgactacaaaggataagcctggagaggattattaatgccaaacatctgttttgctttttatggtcaggcttgtgctgagtctgtctgacacaatatttaatagtcacagaaaccctacaagggagatcagcttgtggttatcatttacagatggggagactaagatagtgatattgagaaatttgctgtgtgaccatgagcaagatactggacttctctgggccttaccttgtttatctgtaaaacaaagacattgagattaaatagcttccaccatccccattttctctaggcttgggacaaaataaaatcaaaaacactaaagccagacttaccatggcagtgggattgtctgggggtggaggtgttgatgttattgacaaggaagcaggcccatgcttttgtcattggtttaaaattccttgagccgagcctatggcatgttggaaacccagcactggcttggtttaacatccataaatgttaagacgctgagcctcatccaattttagcagtaacctgcttcagttccctaggaatgttaaaatgggaactgcgttagtggctctgaaagcctggccactgagcgtatgcttctgctcttccatgaaatgcagaggcgaattgtgaatgtactgaattataccaaggagattaatttcattttgttcttcccaataaaactcaccaaaatgacctgacttgtcccttattcttaaaaaatttccaaaaaggaaacaaaagaacttttggtggtcagtcttgttagatggaagttttattctcccaggcatgaaccaactgtcagaagacttattctgagcaggtttctaatctttttatattctctcatacatccccagcctggccctggatgct

SEQ ID NO: 106557 - DNA, 1030 bp, Homo sapiens
tgtgtgaaaatatctgtaggataaattcctagaggtagaattatggaatcaaatcatatatgcattttagttaggtaaatattgctaaatagaaaaaaattggttttcaaaaatgtatagacttatcaatttggattacaatacatggctggctaattttaaatggctaagcacttaacttcaacaaaccttttggaatctcatttaaaaattttttttattgtggtgaaatttacataactggaacaccatttttattcattattttcatttgtcaacttcacgttcttgcaaaaccactaaattggatttcatccgcttgtacttaagatagaaactattaaataattttatcctggcagagtctctatggaaataagacctagcatccttatcatagatagggaccaacatgctgtcaatgtgtaactcttgataatgcaatcagctactgagttttggtgttagcagactgtgaatttgtgttcaatgtgagtttgtgttctgccacaaggtcgggtggaatgaggcagaaggctgggtgttaaggatttcggtactggtctgttttgccccctcattttttcaacccatctttgggtcttgatttacacatctgtaaaagtcaaggggttaagtggattagggaataaaactcttccccctcacttttcccatcacaacctccagaaatgtttctttaaattaaaccttgaacccagtttggaaatgacaggataaatgtgcctggaagcatctgtttctctccactcccaccacaacactgctgtagtccaaacctccactacttcttgcctaaacaactgccctcacctcctaaatagttctctctacttctgcctttctcttcctctaatccatcccctgcaaagcagtcagatacaaagaaatggttcttatgaaacattgagcagatacaaaaatgttgataaaatatgtataaggcataaacaatggtgatataatggacacccctgagcctaccacctggctttaggaaaaagaacct

SEQ ID NO: 106558 - DNA, 1041 bp, Homo sapiens
taaataaaaaaattggaactgtattatagatgaatgccttcacaaatttagtaagtaaaagccatgtctacatttagatattttctcttaggttttcttccccttactgcccattctctggccacactggcaaccttgctgtgccccagacagaagggcatttgctacctcgtgggtagcatccctacctcagggcatttgcccttatgggtacctgccacagatatccatgaagtttgctccctcactgcccccgaggcctgtaaaataacactccattcactcactccctttccccttcctctcttttctgttttgtcatagcacttatcactacccgacatattatacttctggtagattgtttttcgttctgccttaaaattaattaatttagcctacacaagaatttaaacctcgtaagcatgtttacttccatgtctctttggttcaattctctagcacccagaaaaatcctgctgtttagcaaaaatcctgaatattttgaatgaatgaatacatgaatggatgacatgaaactgggaagtcataaaggaagatgaactattttgacatgaataacttgaaaattgtcaaaagtcaaaaaacattgagaaaattatttggagcgcctatgttatggagagacccaatttttaaaaaatatgaaaaacaactctaataaaaataaacattaaacagctcattagaaaattgggcaaagtatcctagcagacagatgtgtgagaaattatcatttgttgtcttaatgaagatgtaaccatttctaatgtttccatttatttgtgagtccaatctaaatatccattagataataggtgtagaatgatgaactctgtgttctgtgaatgatagcatctcttttcctagaaattatttatttgtttttaagatggggtcttgctatgttgcccaggctggtcttgaactcctgggctcaagcagtcctcccacctcagcttctcaaagtgctgggattacaggccacctcgcctggccttttcctagaaattattaaaa

SEQ ID NO: 106559 - DNA, 1141 bp, Homo sapiens
gtgaacgggagtgatgattcttgtctcatggactaaacttagaagaaatagagtggagggcctccttgtgtagaactttaggttcgaaaggaatgagacttctgatggaataatagattcatattgcacgttacacactcactttaggtgaaatggagtttgatagaattggaccctacaacctcacaatcgttttgcctgagtgaattatgcatatgatgtttataaaaacagtttgtaaactgtaacagaaaggtaactttcaaactctgcccctggggtcagtacataaaaaagggcctttcttagaccctgcgtcccaccaactggacaatggagattcatgtctgtgatgaaaaccacacatcatcaaggcaatacttaatcagtttccctctagcctgcttaataagtatgagtttttttgactcccgttgtgccacattaaacatttccatttacatggtcacaagtccctaagtagaagctccctcttctgaagcatgagagacatggatatttatataaaatttgaacctgagatcacactctggaaactcctgagattagatctggcctataggtgtattttgttagcattgcacaggctttaaattttaaattagtggccaacatttaagatattgtgtaaaaattcagatttgggctttctctggaaagatgacactatctggcaaaagtagcctaatatttcttcttttcctttaagatgagacgtgttcaacttttttacagtttccaccattccctattgtcttacacctggcctgccttgctcatttacattactcatcggccactgcagacatcagattttgtgactactgatttgaaagaaaccagtgagtgagtgtacatgactggaaggatgaaatgaatggtggggtggcataaagtcactacctggcaggggcagctgtgctaagcaagtcgtctcagcagctaagccctccctttctgggagatacagtaaaggaggagcagacattattgagggcctgctgtgtgcttgatttctttcaggaatcacttcatttcatactcaaaacagtttcctgaggcgtgtcttttatcttccactttttaagtatggggactcagggaggttaggtagcatgca

SEQ ID NO: 106560 - DNA, 1042 bp, Homo sapiens
gtttgatccatgcaacatattaaagaaggaggctttttctaacataaacccaggtttccggcttctgttgaaaaatccaaagaccaggtaacattagggctactttcctgcatttccgacagtatctggcaggagctgagtagttgccccttagatgggcgtgacctcagttcaccatcctctccagcaatctagttgagttcagggaactcttcaaatatttaggttacctgtcagggactggaagtgattgaagcttgcaaatcctgaatgagcaatctcatctcccccaaagagaaagtaagcttctctatcagctaccattttaaagcttgacaatgccaggaaagtgttttacatcttttccaccttatcattcatgacagccctagaaggtaagtgcagttatttacatccattttaacaggtaaggaaactgagtctcagaggagttaagtaatttgcctgtggttacacagccaactgcttaatggtattttgtccctatctgacttcagaagtctgtgttctgggccgggacttctgaaacttgcatacaaattactgagggctcttgttcaaaattcagattctgattctacagatttgaggtggggcctgagattttacatttctaccaagctttaagatgatgctgtgaagctggttgagggaccacactttgaatagcaaagctctagactggtgtcagtaaaatacagcctgctggcccaatgtgacccttttcctgttttgtatggctcatgagttacatttttagatggttggggaaaaaatcaaaagaagaatgtaatatttcacaacatatgaaaattacatgaaattcagattttggtacccagaaaaaagtgttatctgaacaaagtcatactcatttacttacatcttatctgtggctcagatatttaggttacctgtcagggactggaagtgattggagcttgcaaatcctgaatgagcaggttttcgtgctgcagtggcagacttaagtagctgcagccgagattgtatagcccagaaa

SEQ ID NO: 106561 - DNA, 1932 bp, Homo sapiens
aattgtgtcaaatttttattactagtgtcttcaaaatctcaaccagataaagaatagagctgacctcacctcatattcattcatccctttatttgatatcccaaaggactctccctaggactatgcaaacctttggatgctcgataaatgtttgcttaattggagaaattctaaaatatctagaattgacttcaaggtagactttgttaacaacaccaaaatggtggatagagacatcttcctttcttagccaggcctggacttgagcaaattttacgtttaacctcttcttctttcccctgcccttctctaaaccttcagcctcctctgcaggaacattggagacccgtcattacctctgtatgatctgaatttaagatcaaggtggcccttctcctggttgcatttgaagtcttctctataattgtgataattattttatcagtgagaggagatgtctgggggcagtggggcaggggtgggcgggtggggggacgcagaagctcatcagactctcaggaaatgagactggttggctgtgagacagctttggccactaggttctatttcgaagctttttttttttttttttttttttttttttttttttttttgccgttaagtatgaccatgtcgctgagttctggccagtacatgtgggtggaaatgacatgcaccacttccaggcctgacccatctcatgctcctccttccccttccctagccacaatgggaggccacctgctagacatggaagagccaccggatggaagaagcctgggtctctgaaatactgcttggagtagactactctgcctgcaaactaggagcactgattttggactttttgggaggtgaaagagaaatttttattacgtgaagccattgagtttggggaggagactggttatctgctacagcatctagaatgttaccttaaccagcacagtaaggaggcggggcactgcaaaagaacgttgaatgagatactctctgtgctgtgtgcgaaagcttgggcaggctgtgcaggaagttgggctgggttcagatcctgccttgccatttcctgcctgtgctattcttccaaaggctctgagccagcaattttaaaagtcttaaaagttgagacacccatcattgcctgatcactctcttctgaagaggttctgggagaatcagacctagaaagtaggtcaagggttctttgatttcagctctgttttaatatttttaccttggctacgagtttagagcaaaataaaaaaatgccctgcgggaacagcttttccagttctccttttgctgcctcttttttccttccttccatatcttaggatgaatgtggatacaggcagcctgaattcatggccagctctgccattttgatgtgtgtgacctcagccaagtgtcccggcctttctaggtctccatttccacatgtgtaaattgaagagaatatgaccttaccttgcccggttatgtgaattaaagatgtaatattaaaagatgagcacacaggaagccctcgggggatataacagaagcaggacagggctcccacttctattagtactattacttctaacctttactccctgattcgtgcttctcttcaacccttcattcagtaaccatttattgggtacctactatgtcccagggagtgaacaagaaggcaaagtttctgccctcttaaagtttgtcttctggcagagaggtaaatgtattttaagtgaacagaaataacataattgcaaattgtaatagataaaggaaataaacagtttgctgagatagagaacaagggctgaggggaaggtgagacatatgttgaatgtgacattcagggaaggtctccctgaggcggttacatttctatgagccctgaagactgagagacaatcagacagcagaagagctaaagggggcacc

SEQ ID NO: 106562 - DNA, 1693 bp, Homo sapiens
gcaggaggattacttgagtccaggattttgagaccagctgggcaacatagtgagactcccatttctgcaaaaaaaaaaaaaaaaaaaaaaaccatttttaattagctgggcttgatggtttgcacctgtagacccagctacttgggaggctgagatgggaggattgcttgcccaggaggtcaaggctgaagcaagccatgatcatgccattgcactccagcctcggtgacagagtgagactgtgactcagaaaaaataaaaataaaatctagagaaaataataagtgttaattttaaattctatatgtaaaaatttatcagttgcctattcttaacttgcagcatttgaggcagaaggtttatattttctggtttgtttatttcaggtgctttgaagaggaagccattatggatggatgaaggatagtaatgcaatacctccaccttaatttgggtgcatgtgtatgtgtgtgtgtgtttgtgtgtgacttgtatgcttgtgtgtgtaaatgtgtgtacatatacatatatacatatctacacatacatatatacacatatatgtgtgtatgtagatatgtagactatcctaatgatgtaaagtttaatatttatgtttgaaattatttattgtgatgtaatatttttgtacgtaaaatgattctattatgactgcctttgcatgtagtaatatgacaaagtgatccttcattatcacggtacactattgtttacttttcatctgtaaatgttttattgttacttttttaaaatgaatttttttaaaacaatctagccatcatcaaggtgctataagagttgtataaaagatatttttggcatttctaggcaagtatcagccaataagtatgttagtgatatcacagattgtaccaactattaactatgttaaataagtattcagtttcatgtgatctctgggaaaaaaatatgctgccttggtgctaatattgtatgtatttaaatgatcatccgactcagaaatataaacacttttaatgaaagggaggaacggaaggacaatttccagtgcacagaatcacttggatgaaataagaccagctctttacccttatttttggatatgccttttttggaagagacttagactttatccttattgttgttagtgttgttaatattcgttgcttcagcccacggtgccttggtctctccacaatcaaatggaggatcccccaagcagcttcattacagagtgatattgggaaagtgagatcctctcaccattttgccaagatactctaaaatgacatccaagtttaccagtagaaagacacaggatgcacagaatgggcatgaccttcagctcacgagcacacctggagaaattcagaaccaggttctgaatcatcacgattgccttttgcatgaaaacatcggctggtgatgtgacttctcttcaggccatgagcctaacaccctgccggttttcatgcccgctgcagtaatggacgtttgtgtgaagaaatgaactgtggagtacaaaatgctttgagtctttccgattgctcattaattcacttttttgttacttctttccaaaatggaagtgctgaagccatggtctttctgcccctccaagctgatgaagggaagcctttgccaatggcccatggaagacacttggtttgagaaaccctgcccacttcca

SEQ ID NO: 106563 - DNA, 1031 bp, Homo sapiens
atttcacactcaaaatgccgactcacgggtcagctgctgctgtctcctcttcccttcccaatttggtggtcatcatagctttagaaaagagcagtttgccaacctgtgcagttgggctgaagatgcaaactgaatgaatgacagctggagcacctccccctcctcctcccttcgaaacctccagaaggggtttgaggcaaccccacctgcagtgggggctgagaagatgccagtggaagcaccagatcccagaggcaccctgtagggttgcctgtctcctgtgcgctcagggcctgccacttgaaatgaataaataagctaatgaagtgggagctttctgcagcatagtcacacggtcagcgcttggtgtggaggtcaggggcctattgtgggctgcccccaggaactgctcgaacctctcctctcaatccctgtctttgcagtgctcagtgacctgtggaaaaggctacaaacaaaggcttgtctcgtgcagcgagatttacaccgggaaggagaattatgaatacagctaccaaaccaccatcaactgcccaggcacgcagccccccagtgttcacccctgttacctgagggactgccctgtctcggccacctggagagttggcaactgggggagcgtaagtagaagactgagcactcaaatctgaaagcccttggatctcaaccccgtcttaaacatgtcctgcctaacccgctctccttagtaactctacttccaggagaaaccctggagttagcaacttgaaatgggctaacagggatcaaagggacttctttctgtttaccaaagtggctttgtgcttagaacatgggctctgaagccagacagtctggatctgaaccctggttctgccacttcccaggtgaacaaccttgggcaagttgcataacctttgtgtctcagttttctcatctgcaaaactggtagttgtgaagatgaaatgagtttacacagattgagcatccctaatccagaaatccaaaatccaaaatgctataaaatccaaaca

SEQ ID NO: 106564 - DNA, 1218 bp, Homo sapiens
ccagagagaccgagtgcaacccatacaccagaccggagtcggaacgcgactgccaaggcccacggtgtcccctctacacttggagggcagaggaatggcaagaagtaagtagagccacaaaggggtacctgccaggcatttcacgtgtgcgccccttgctatcctcacatctgttccctataaagccagagaagtcaccgagcacggttacaatgctggctctttcccaaaaggttcactgtcagactcgcgcattcgctccaacaagggtgggagaacttcttgtttttaagcaattcctacgtctgtctgtattcctgagtgttccaagtctggccgcctcaaaaaaaaaaaaaaaaactttaacaggctgtgggccgaatgcattcagatatctttcacagaaggagggggagatagaaggaatattttaaatacgtgtctccagatttggtcattctgtatctgtttaaatagccgcagggcagactttaggtagaacctactctgtatttttcctctttctatgactttggctgtcaggtagaagataggcattcatgtgaaaccttgattaattagtgaaagatttctaacatttaaaaaaaaaaaaaaaggatggtatctgaagaaactgctccgttgatggtccgtgcagaagtggacaggccttgctttttccctggcttcaagttaatgtttggttaaggaaaacattgtgtccatggggaaaagtttggccagggaggttttataggaggtaacctctgtttccagaacagaagattaaactgtagaaaagggggggaaagaattagaaagcaaaacaatatccactgatgttggcataaaaaacaaaatgcatgctgcttgaggtgcagagataatgaaaaataaggcaggaaattccccaccatgaagagtttttcagaacataaagaaagggtatggtttggagaacagttagactgtacccctggcactgtgctgggtactttttgttcattgcttcccttaatctttttaaccaccagacaaggtgagcattattattattatcatcatcccattttgcaggtgaaaaaactgaggttcacagaatctgtgtcatttgtccaagtgtcacatacctagcacctagcaagtggaagaagcaagacttcatgctaagcttgttctcttaaaccattaagaaatactagaactgcattctttacc

SEQ ID NO: 106565 - DNA, 1057 bp, Homo sapiens
aatcctggaagaaagtatataaaactatttctaggttttcaagtatatattatgattccctaaacatcaaaagttcaatggagattctttctctctatggaaataagcatcaagttccccttttaagttggtgagttctgcatactagcattgcacagtggggagtagagagagatgaaacatagctcccagctcaggagttcagagtgaaaaacgtctactttgaaacctgcacgaatagactgtggtggtgggatgatggctgtggggggagcacattaatagaggccattcagatgttttcatctgcaaacgaactaaaaggtgtactgaacagaacaagaaaacttggatttacacacacatacacataccaccaccatcactgcctccggggtcacacagaggtctttctgctgctgttttattcatggggtgcctgcacaaatctctcagaattccaagcaagcctggctggctctctatgcaaactgttgcctcccttgagatagcacaggaagaaaagttgaacacagaaaactaactccgatggagtggacctcattttgagcaaagattactgtgaatgcattattcagaaaggcaggcttgtaccttgctgtgagcacttaagtcatgtagaaacttttgaatgtggtatttcaaagctggctttgcatcatgaaaatcagaagccagaatgacatatcgtataattgaactttcctgtgtcttaatttgtcttttgaaaaattatcaaacattgtaggaagtgattttttaaatgttggatacttatggctcttagtaccgtgccttcgttgaaccataagtaattttttcaattacaatagcttcaaaaagaggtttcatttatttagtagcctgaatagtcttatacattctaaaagtctttaaatatgttttcatttttctttaggttattaaaacattatgagattctgcatatagttgagtcctataccaaactcaaatttgtttacaatattctttctgtatttgtatttggatatattgttccagaaacgtgctcttt

SEQ ID NO: 106566 - DNA, 1102 bp, Homo sapiens
agtgatattgggtacagttactactattctcccatcttacagagaacaaatctgagctgagagatgaagtcacttgcccctagtggcaccttggtaaaatgacaggtagggtaggattccagcccaggcctgtctgactctcaaacctttgcaacattttaaagcaaaatgaagacaagcaccctccccaccaccccagctgccatttcctgtgttggcagcacccaagcaccccttggaatttgctctttgctggtgctttggaacaagaggttgttacactcttgcttaggggtgagaaagaatcagagtgtgtggttagctgtggtttttgaacaacaccataacctagccccaggcccccattgcgacgggagccaaatagcattctgtgctagggacagaagattcttcagcctgcattttctccttccctgctgtgtgaccttgggcacaacatctctccttttctctagtcttgaatttgtaaaataaatagatggacagaataatctttgagatgccctgcagattgagcattcaagagatttttccttggtgaattgccagggggccaaaatttacaacctgcagccttcccttcttgaccgtgtaaagagcattcacccatcaatggaaatagtaatctactatgtggcatctggcaggcctcaacgagttaataaaccctgaaaaatgtccaagagaaaagtagggtagcttcagtcaaggggaaatgtggccctttatttatgggattgtatgtttgctttttatagtgtctttcttcacaggcactaaaggtgttgtgagaaaaggcattaaagtcagagctattaacattgcgtagctactctcttcgtgggagactgaggaatcaggcaactctaaaagtcttaagagacatttcctgaggtccttgctttctgttgttgccatgggtaagtagaggtgagcaactggttgtcttaaccaggccatttttccagtgtagcttaaggattaaagtggttggggtgtgtgtgtggggaggggggcggtgtgtgtgtgtcttgccctgtcaaccaggctggagtgcagtagcacagtcatagctcactaa

SEQ ID NO: 106567 - DNA, 1036 bp, Homo sapiens
cgtagaagagtaggtgagaattagattaaattaaattagagcttaattaaattaattaaaaggaggtttagggaagtctccattaagaaagtgacatttgagcaaacataggggaaaatacaaaaggaagccatgtaagtatctgggagaagagtattacaggttaaggcctgaaagcgggagtacaccaggcatctcttagtgataccaaagagactaatgtggctagaacagaggatgtgaatgataggataggaaattacagatgaaactgagggagacgaacatggaggcagactgttgggcaagtagaggaaggagggttagcctattggacggagtttttgttttcactttgagataggaagggactggcagtgaaaacgtgggtggaggcactaagcaggaacatgaatttgtttttaaaggttgactctggcttctggatttagcagagggtacaggaggaacacacatggaagtggtaagaccattgtagtaactcagatgagagaaagcattgctcagatgacagtggtcacaagggaagtggtaaggagtggtaggatttggaagaatttttgagatagtgccaaaggattagctgagagttgactatggggtgcaagagtcagaaaggggtcacaatgactcccgttttatggactggacaagtgaaaggatggagttgccaccgattaaaatggggaagcctacaggaagaacagatttgtggaggaagagcaggacttctgttttgaacatgttaagtttgagatgtgtaggcgtcatcacttcatatctctgttaaacagaattgaatatagatgtttgcagtggttaagcatcctgccaaaaataacaaagaaagatatttccagtcagaccaggtctgactgtcctaacaccgtattcatagccactacacccttctgcctcaatcttttgatttccatctgaatacatctcagagtagtgtaggaatcatttgaatttgcagaaaaccatcaaatgtaattttagcctttttcaatgc

SEQ ID NO: 106568 - DNA, 1045 bp, Homo sapiens
ttttctatagatgggggcttcctaacccttttagctggagcccctgacttcattgagcggatgttcagcaggccctttacaactcccatcaacaaagaatctctgtgtgccctgacctcaccaagtcaatttgaatcaattcagttttgagaacttgctgaaggactttctgagaaccttagtataattcaatagttctcaattgggaggtgattttagcctgcggtggacatttggcaatgtctggagacagttttggttgttacaatggggatgcaggtgctatgggcatctagtgggtagaggccaggaatgctgcttaatagtctacaatgcacagcacaaccccaacaacaaagaattggcttaccccaaatctggaaatagtgccaccattgagacatttggagcctcattcaaaagcgaaagctgaaagtcacagttgcaagtcccgcagctatctgaaagctcttctctctggagagttgaatttcccataaaatgtaggtgagattccagggagccatcaaggtcagtcaaatcgaagaaaggttttcaaggatgagctgaaaatatgagatctcaaacttgtctcaccagactgtgaatctgcaaatcaacaagcaccatcactcattttgtggggcggggttgagggttaaaagaggtggcagatattgtaaatgtgtgcagatgtgcccaactgaccaacagacattctgcatggcaactttgacaagagtaataaactaaaaacagcataaatgtgggtgggcatttctaagaaaacaagggttatatcctcatcatgttcataatgttagcattgtctgatagcactgatagttcatatatagagattcctttttaagtttatgtttcaaacagagcttcccatatcagtgatagaatatgaatatatgaataggtcagcagtatctagggattggtcagacttgagcatcagagttgagtatataggtttctcttttgagaactcttctggaagtaggattaattctagtgagcattttacctgataatt

SEQ ID NO: 106569 - DNA, 1563 bp, Homo sapiens
gactgaccttgatggctccctggaatctcacctacattttatgggaaattcaactctccagagagaagagctttcagatagctgcgggacttgcaactgtgactttcagctttcgcttttgaatgaggctccaaatgtctcaatggtggcactatttccagatttggggtaagccaattctttgttgttggggttgtgctgtgcattgtagactattaagcagcattcctggcctctacccactagatgcccatagcacctgcatccccattgtaacaaccaaaactgtctccagacattgccaaatgtccaccgcaggctaaaatcacctcccaattgagaactattgaattatactaaggttctcagaaagtccttcagcaagttctcaaaactgaattgattcaaattgacttggtgaggtcagggcacacagagattctttgttgatgggagttgtaaagggcctgctgaacatccgctcaatgaagtcaggggctccagctaaaagggttaggaagcccccatctatagaaaacgtgccgtgtacaacgtgaaatcaattcccatgcacaacaatgaagatcccaattacaatgaacaaacacgttcttctgaacagaacttcctccctgacattatgtccatgaccctgcaccctgcggggggctcggatatgttacgtctgattcaaagacaaccaaaaagaaggaaataatgatttcaccaagaaaggacacataccaaggcaggaataggtaagtgggctaggtggggcttttattaatctcaaggaaaacaaacagcacacatttttgggaaaatgctttcattttcaaaggaatctggatgtggactggatagcagtcgattaagaaaaggcagagtctgcatatggccagatatttactggaatttactaggaagagatgcaataaaagtctagattcccctgggaaaagggaagcaaaaaaaatgcaccattctcagaggcctttcagtttagctgcatgggtgggatggggaggagggaggaggagagaaggcttaggaaagagaaaatcatgggaaaaggccaataaaaaagtaggaaagattctgtttctgctgagctctgccacaccccactcccttttttatcacattacagtgcaaatctcagattaaaaacagcttcctagaatgtgtcagaatttttaaagttgtgaaataaatccagatctactctttacttccttgtgaaggaaaaaacacactctgaatacatttgtttctttaagaaattttataaagtaacttattttgaaaattttccaacttatagaaagattgcaagaacatcataaagatctcccttatcccctcatcctgagtccccaattgccaacatttcaccacatttgctccccccatctctctctctatatgctattattattttgtctttccctgaaaaatttgagagtaatttagagacataacatcccatcatctctaaaactcttttttcctcaaatcaaggacactcttttatgtaaataccgtacaactctctaagtcagg

SEQ ID NO: 106570 - DNA, 1127 bp, Homo sapiens
ggcctgctttggaagtcacattaggcatttatggaacccctgtagagggcctgaggcacaccagaagagaagacacatttctgccctccaggtgtgtctataggatgtgtacatgaaacagccccacagtggggaagttcttgggttttcctgattgctttttgtccttcgtggatgacttgagaatgcttttcagcacatttgtcttaacctttcaaccagctgcttctgtgtccctaagatggagattgaggtggggattaacttgtcgactgatgtgtttagtgttccagtacctgtgctggcggatcccagcggcgtgttgttgtatgtcaggatgaaaatggatacaccgcaaacgactgtgtggagagaataaaacctgatgagcaaagagcctgtgaatccggcccttgtcctcagtgggcttatggcaactggggagaggtgagagtgaactatccgtctataaatacagaggaattgtgttaaccaaactgtatttatcattcagattttattttcaaggagaagaactagctctagtagaagcttctggggtggggattaactaggaaacctgtcttcttaaattctggactattttaaagtgttcctattaccactaagagacagtttgggtacacaggtgaggaaaattaggtgagaatacagataaatactggtttaagttatttgttcacctctgatgattaaaaaatagatgcttttaaagtgattgaaaatatgtgttaaatcggtccatggaagtcttgccctcttcttcatagttttggggtgtttgtgttatgccctgttcccatggcataatgtctcccaacattccaagtcactaatgaagccagattgagtaggtgttataattcctatgaaagatgatgtatttttattgcagaagtgagtagttagctgtgttttctcaaatatggaattatttagctgctaccttttcagggttgcctgtgacgactgataggggacaactgagtattggaagctgagaaaaccgtgtcctgttctcagctctggctcttaaaagttttgtgaccttggcaaataatgtagtatctttgccaaatatttatatcctcatctgtaaataagga

SEQ ID NO: 106571 - DNA, 1079 bp, Homo sapiens
atccatctgtccatccgtcagttcatcttctctaagatccatctgcctactcaccagatatttgtgaaagcttgctagagaaagagcagtgaagaatgaataataaagcccctaccttcatggagattattccaatggatgatccagtcaatgaacaaataaggaagtatgtaatatagcaagaggtactgataagtcctagaaagaggtcaagaggagaagtggaatagagaaagatgggatgtgcttttagagagggtggtcaaaaaaggcctgacattgagcaggacctgaatgaagtgagggaatgacacacatgggaatttaagtggtacagcaaaaggtgcagtaggtatgaagtccctcagatggaagtgttcttggcttgttcaggaagcatcagtaaggccagcatagctggagtgcagtgagtggcgaatggtagatgggtcaaaggggtagtcagtggccacatcataaagggtctagtagatcaatgtaaggattttgggtattattcaaatgagttggaaaatcactggaaggaaggataggatttgacttttgttgtaaagggttatattttgtgattttgaatactgagctgacagatttctcactgaaatggatatgggatgggaaaaaaagaggagacaagggtgattccaaggtttttggcctgagcaatttgggaaagtggtgggccatttacagaaatgcacattcaggaattgtcaacccctccaccaaatgactgaccctttctctttctgaacattcaacctagtgctctgtgacctgtgggcaaggtagggcaacccggcaagtgatgtgtgtcaactacagtgaccacgtgatcgatcggagtgagtgtgaccaggattatatcccagaaactgaccaggactgttccatgtcaccatgccctcaaaggaccccagacagtggcttagctcagcaccccttccaaaatgaggactatcgtccccggagcgccagccccagccgcacccatgtgctcggtggaaaccagtggagaactggcccctggggagcagtgagtattccctgaagtttgc

SEQ ID NO: 106572 - DNA, 1780 bp, Homo sapiens
gtgttgtcttcggctatggtgttagggtaatactggcctcatagaataagttaggatgtgttctcctattctttgatttttttttttctgaaagcatttgaaagggattggtattaatgtttatttaaatgtttggtaaaattcatgagtgaactggtacaaactttttgaggaagactttgattaatgattcagtcattttacttcttatatgtccgttcatattttttatttcttcttgagtcagtttttgtgatttgtctgtttctaggcaatctgcgtaagttggcatgttttatctagattctctaatatattggcatcacttttattgctgtaaggtcagtagacatgttccctccttcatttctgatattcagtaattggagtcttttctcattttttcttagtcgtgctagctaaaggtttatcaattttgttgatcttttcaaaaaatcaatttctggttctgttgatttttttctattattcttctactctgtatttcatttatctccattctaatctttattatttccttccttttcttgttttttttttttttttttggttttagtttgctgttaattttgtagttccttaggaagtaaagttaggttgtggatttgagatctttcttcattttttttttttctttattagtgtaggtgtttgcaactatagatttcctgtgaacattgctttcattgcatctcacaaattttcttatattctgctttcattttaatttatctcaaagtattttctaatatcccttatgatttctgttttgacctatgggttaagaatatgtagttcagttttcacatatttgtgaattttctagtttttcttctattaccgatttcttgcctcactccattgtgcttgtgggatctcattcttttaaaacatattgagacttgttttgcagcctaacgtatggtctctctttaaaaaagatccctgcacgtttgagaggaatatgtagtgtggtaggtgggtaatcagaaatgccaaaattgagtggcttctttttttattaagcattcacctagtttctgcaaggttttgtttaaattccacagttccaaaaagttgattccagtttttgccagcttaacagttgcttcagtggagggaccaattcttggagctccctagtctgccatttctgtggcatcacttcctctacttactgtttttagtctgctttttataatctaacattttgccttttagtggctacattattttcctaactacctgtatgctgtgatattgaacttttggttgttgcatactttggtggtgtccagtttttttgtctcttataaaaatattgatgcaaactccagttatttcttcaggataatttcctagaagtcaaataaagtcacagagctctattaagtacctattttagccacagcactctgctaggtagtgtgaaagatgtaaaaatgatggagatgcagtctgctccttctaggagttcacagttaatgagttgaacccctataaatatcatttcaatgggaggcagaaataattccaagggtcatcataataatgaatcagtataatttgtacagagcaggattgcccacttcgacctagtttatttgagcgccagccctctggcctactgtgatggaagtatttctctcttgcagaatgttatggggaaagtaagggaaagagaagatttgctgaattgtatataccttttgtcctccttcttccagtgcagtgtcacttgtggacagggataccagct

SEQ ID NO: 106573 - DNA, 1072 bp, Homo sapiens
ctgtaaagaaccaggctgcacagcaacagttgagtggtggataagcattaccgcctgagctccacctcctgtcagatcagcagcagcattggattctcaggagtgcaaaccgtattgtgaactgtgagatctaggttgtgaactccttatgagaatctaatgtctaatgatctgaggtggaacagtttcatcccaaaaccacccccacccaccccatctgtggaagatgtcttccatgaaactggtcctgggtgcccaaaagtctggggaccactgaactaagcatttgttccccaccccactcttccctcagtccctggcaaccaccagtctgcattgtgtttatggatttacgtattctggacatttcatagaaatggaatcatgcaatttgtggccttttgtgcctaacttctttcacataccgcagtgttttctagattcatctatattgtagcatgtatcagtacttggccaaagaatattccattgtatggctataccaaaatttgtttatccatttatccctcaatggccatttcggttgtttctacctttggctattgtgaatagtgctgctatgaatatttatttcaggcatttatttcagtacctggcttcacttcttttggatgtgtatctaggattggagttgctgaatcataccgtaattctgagtttaactttttttttttttttttttttttttgagacagagtctcactctgtcgcccaggctggtgtgcagtggcgccatctcggctcatggcaacctctgcctcctgggttcaagcgattctcctgcctcagcctcctgagtagctgggattacaggtgcgtgccaccatgcccagctaattttttgtatttttagtagagacggggtttcaccgtgttagccaagatggtctctatctcctgacctcgtgatctgccctctttggtctcccaaaatgctgggattacaggcctaagacaccgtgcccggctctgggtttaactttttaactaccaaatgatgttctacagcaaccgcataattttgcatttttattatcatataatacaaggg

SEQ ID NO: 106574 - DNA, 1051 bp, Homo sapiens
catcaccttccctcctctttgagccctagctaagtcactgaaaggaaatcatggatttattaatcataaagctatactagctcacatctgaagtcaacatgaagtttcctacttccttgtctttgaaataagagaattagaccccagggagtgacctctctgacttacccatccaactgcaagaaaaaaaaataaaactcggaaaaaaaaaaaaagaaaagaaatggaccagactgagtattccagatttatgcctttctcatcctttactttatgaagcacaaggcaaaccctccattgcttagcacagatggtcccaggacaacaagagaaagaagatgcagcctctttcttgcttttatgatatagtattagcactcactattaacacagcccagtgttaacacagcccaaggagattcttaccaagcagggactcactccacgttccttaaggggaagaagggaaataagaaatacgaaacagaagtttcctttttaatgggccaaatcaggaatatggggaaagaaaaagtctccctgctacagctcctacatccatgctcttatcccatccttataagtgcagtattaactgcttattttcaccatcaaataaatctgaaaaggatactcttaatgcccctgaaatggcagtcaattaacagtgtatttgattaacagtgtctgattcctggacaaatgaactgcaaacctagtgctttagttctaggttaacaaattgcctttgcttaaaaatctctagtatttggttaaaaaaagataagtagtaggtttaaattttacttagatagctaatactaaagtataatttcaaactaagtaacaaacctttgcaataatatgcgataaaatgggggttgggagatcaaactgtaaattcactataatccaaagttgcttaaaaagactggaaagaaaataataaaatattgataatggttatccttgggtagcgagattttgggtcattataattttttcatttatgtttttctacagttttcaaattttctacagtaagtatgga

SEQ ID NO: 106575 - DNA, 1037 bp, Homo sapiens
cagggccaccatgttcgtatctctttagaagaaaaagtagccatttctgtgatacttatttgtctccagtacacttagctcttgattaattgtggcaatgggaagatgggaatcgatgcagtgcaagataaaataggatttttttttttcatctgatgattttaaggatgtctggggccaaaccatttatcacggcagatcgtaagaggaatccgatatcatttgtgctcctctctttctccctactcacatctactggaataaagaatatgcatggaagggtgaaatgccctgagtcagcaaagcatgaaaggaaacctggagacattggaaaagaccccccaaattaacccagaatagactatcactctttgcatatgaccacactggattatcacttgatttacagaaccggcatctgactttttatttcctcctttttatcaagacatcagctgggtagctagcatgcaacttcatttgaaagaactgggtgattttgttgacagcacatcatactgtcaccatttgaatgacccgcattagggagcagcctcaggatgcccaaggtgccacggaaacaaccttggcttcagtgacccattgaaactcctgcctctttcatggctgatgggtctcgcgctgcaggagctgcaggcaagacgaggttgtcagaggtttacactgactgagaaagagtcatttggctggaagcactctatcctccttgtcatgagtgtcagactccatcaatcacttattctttcagcatcatcgattgagcacctactatgggttgggatctttcttgggcttataaaagtaaatttgtattttatcatcttatatatttaaggggtaggactacaggtttcttacgtgcatatattgggtagtggtgaagtctgagcttttagagtacccattacccaaataatgagcattgtacccaataggtagtttttcaacccttatcctccttttatcctcccacctttggtactctccaatgtctattagtcaaaaaagtggatttt

SEQ ID NO: 106576 - DNA, 1042 bp, Homo sapiens
attcccaaggcaggctcaggatgcttttggagaagaactgtgcagagaaaatgatagatccatttttagttgttttagaaaagtggccatgtctagcagcttttattaaagatgtggatatatataaatatcctgaagagtatttacacattctagaaatgccaaagaaggtgaatatattggcatagaaattctctgagtgttttgctttgtttctttttcatagagttgccagtatgtgccttttctctatatgctagcacattctgcctcccttggctgctgggttaatgttttttctttctttttcttctttctgttctgctcctgcagcagtaatctgtcttgggctgctgacacaatgttattttgatgaatgactcactaatgtctctttattttctccactctcttaagtccattagcattttccttttaaacttatttgtgagtctgaggtttgaaactcttttgtttcaagtttcatttggacaaaatcaacctccaagtccccattccaacctcttaaaaagatacatttctataaaatattatttaaatggttttggacattttaaataaaggctgactttattttggctcttatttcaccagccacttaatgttttgttataatgtaatagtaattttgctatgtgattattatttgtagaatttgcctggtaaaatagattatcttggtgcatgtttcccaaacagacccccttcccagcatctgtcatatcagacacttttcatattcctctgaagttcttcctttcttttggacacctgtcaatggtcatattactgagaaatatttaatttccatatcagttttgaattagaagttttcttttaaaaagcaactatgaggacatttgagtgcagtgctagatggtagcgctctgataaacctacccccttgttttgttccaatgtttatagtaatgcttaatgagaagagtggtcatttggaatttgctcttgtgtggaagtaaaatctatagaataaagagatccagaaactgaagtctgaagt

SEQ ID NO: 106577 - DNA, 1895 bp, Homo sapiens
gccctgaaatagagctaaatatagcaaatggaatagatctaaaaaacagagtgtttagaggaggaagaaagcaagttgtaggatatgtcagtatggtgcagttgtaaagcttaaatgctgtctattactggagatttatatgcatttgtagtaaaagtgttggaaatgatgaagtgatgaacactactcaggactgtggtcacttctggtaggaaaaggaagggaaaggaacctaggatgagtacatagggccttcagctgtgtctgtgaagttttctttccttagcttggtggtgggtacatgggtatccattaccagggatagaaatgtgttttatgggctgctgtctatattttagcatttatcataccaagaaaagaatttccttccccacttaccctatgtcattggtgaaacattagttgaaagcaagctttgctttgtttgatactgccaaataaatcacttgtcactcaattgccatttcattgaattgagcagatgcagtgcagacggctctggtgcaataacgtcaatggagtacacaaaggctgccggactcagcacacaccctgggccgatgggacggagtgcgagcctggaaaggcaagtaatgccctgttctgtccttctgtcttagggcagaaatgtgcaagattttgggtgtatgatcagacaccgatgtttagaatataagacaatgcagtctgttttagcttgcataatattttttagaggacagatgtttagaagttagacaattaaaaattgtgaaacttagattatagcataatgctgataccagagaatatacctatcattattgcttcaatattaagacattctgtcaacttaagactttctctcatttaaacatttctaaaattacagtgtgcctatgggaacatttaatgcgagattgtgtttctttttcttctcttttggggatggcactggaaagctattggtaagttgatggaacagtttagaatcaaggaaatgtagaaatatagtacatctattgcaggtactactatgataccaggcttttgccaaccggtgttgttccctttaaggagctataatgtcattcaggatatatccaaatccaagttctcgtgagctggttataattgttcctactgatttgttaatagataaacaaaatctgctacttttgtggcccaatggtaacagtgtctcatgcacctaggagtatgattaacttaaccttctgtacctagtgtgcatctagaaaaattggtgacatgttagtgataccatcatcagcccaaaaatttggtaacaaaaagttttagatataaatcttgatttaaaaaaaaaatacacatggaaattggcattctatctgtaacttaccaaggatacaatctctgaatgatatttctgagtgttttgttatccttatatatatttttcccttttttccctcctctttccattgtccactttacttacttttaataatttattctcatctcatttccttttcctccgctttaccttatagaattggtagcacccagaatgtttctgtggaagaagtcctaagagatgatggaacttaattccctgttccctgatcttatagacaagaaacttctcagtttcttgtctcacaatgagtaacttgtccacagtcactcagatcatttggtgcagcccctccccaccctcatttcctctactgctttgtctgaaggggcagcagggcctactggagtggccctaactgaagctcactgagctcctatagtttctgctggtcaaagaggaagactagtggttttttcagtgttaaaggatcctgaggatatgaaagtttaaaaatataaagtccaatgcgaaaataaaaacttataatgaagatact

SEQ ID NO: 106578 - DNA, 1038 bp, Homo sapiens
ggtgtgaattttccgggagaggtgtttgctgaaaacggaaagaaccagagggttgctgttgttctttttaaccagatggtgtaaggtgttttctttctatgagtcattgattcgctcacgcatcccttcagcaaacatttactaatcacctgttgtcatggacagggccctgtgctttgatgaaaaagacactatctttgcccttagaaagcttacagtctattgggaaagatagtcaaacataaacagataattgctgtgaagtgtgatcaacgttgtaacaggtgtatatttcctactggctatgttgtattcattgcatgtggttctacaaagtaaacagcaaaaatgtaacttcagcatctggatttaatcttggatgtaaagaataaagcacatgttaaaaagtaactgtcctctctaccattacaatggtggggtggcctttactgttacctgggggagaccttgacagccaccgttctcaccatctgtgtgtttctgtgtgtttccgtagcactggttatggcgagtgtttgcttaacgaacctgaatccagaccctaccctttgcctgtccaactgccaggcatcctttacaacgtgaataaacaatgtgaattgatttttggaccaggttctcaggtgtgcccatatatggtaagtgtaggagggccacttctgccctcatctactgattctgcacttctttttattcatagttttccattgcattctaactcgactataaactacccaaggaaaagctgagagtaaaattgcatattagtgatcataataattatgaggatgacacaacagtactgctgctcagtgttaaatagtgctttacctgcactttctcatttcatcctcgtgacagtccaaaaggaagatgccatcatcactttcattttacaagtgaaagtgaggctcagaggcagcaaggttacggagttgggaattacagagctcagcttttttctctccttgttgcctttaatgcccttcgacttgtccaggtgacctaaattatagg

SEQ ID NO: 106579 - DNA, 1022 bp, Homo sapiens
ctgtattacacattgctgtttttttgaacgattcgagatgggtccagaaaagcccgtatagacttcctctttctcattttcagccgtagcataacttttcttttaatagacgagccctgatttacctgaactgaaacttatttttaataaatcccccagatgaatgtgaaaagcaatcctgtttgggcatagctttagggtttcttcttccccccttgtggcctatggtactccttgcctttttgttcactgctgtgacccattcccctctgcgccccccaaccctgcctggcctccgtgcccctctcacccccacatgccgctcagtcccagatactccagccctctcatgcccatgagggaagggaacatctaatcaggccctgcgcatatgcacagcctcattttcacctcttaatttcagttctctcctaagaattttgattatgaacatggactttgggtcaaactgccctaggttgagagttctggctcttctactcaccagtgtgtagcctcagacaagtgacttaatttctctgagtgacttagtttcctcatttgttgaacagaaattttaatagtacccagcccagagttttgctgtatagagactaaatgcatttgtgtatttagttttcagcccagagtttcgctgtgtagagactaaatgcatgtgtgtatgcagttttcagccagctcacaataagcatttagtaaatgttagctcctataattaattataatactgcaaaaataaaaaccccaccaggttaacgaggttgtcaaggacacaatgggtggcaaacattaaagaatagcagtgtcggctaacgtgcacccaatgtgagattctataagttggcaatccaggacttcagatgagaggaaagagcttgatggaaaattaatatccagtgttctggtacagagaactgttaagtcacgtggcaatgcaatttcagaggaatttaaatttgtttgaattcactgttatctaaaactgtgatctatgaatttta

SEQ ID NO: 106580 - DNA, 3055 bp, Homo sapiens
tacttcttcattgtacaattctgttgcctattttagaccacaaactggtggcattaaagcattaaagcacatttatgatctgattgtcaagttaactgatgaaattctgtttttactcaaagtatattttggcaggcactttaatgcttattctgtttattgcatagttgatgatgcaaaaattcagtattttcatcagtaatataaacttcaagccaagttggaaactagtgattctcaaaatttcagtgttaatatcagtcacctggggatctagttaagtttagattcaggcctggggtggggccaaagaatctgcattttaacaagcttctaattgtcaattttgctggtccacggaccctactctgagcagcaagactgtggagaacccaagaagaggcctaggcatgagctggaaatgagtagagctaatctgacattataaatcatggtcccagctgcctgcccagactctcggagtttaatttatttccttaactgagccctggagtaagttaattaaaaattcagagacattgaattgctgtgattctaatattttaagtattgaaatgatctaataatgtaataaaatacctggttgtgcattttctacagttcctctgtatcgtctgttagcctgtccacttctcagacctctttgtattagaactcattgaatagcaggagtgatatatatgaaacatttcctttttttttttttttttttgtttgagacagagtatccctttgtctcacccaggctggagtgcagtagcacaatctaaactcacgtcaggctctgcctcctgggttcaagcaattctcgtgcgtcagcctcctgagtagttgggattacagacgtgtaccagcatgcctggctaatttttgtatttttggtaaggacagggcttcgacacgttggccagtctggtctcaaactcctggcctcatgaaattcacctgcctcggcctcccaaagtgctgggattacaggcatgggccaccgtgcccagcctccatttaagtttttcagagctctgtagctacgttactggcccttactatatctatggcaaataacagtgagcgtgagattccttgaatcaatcccagcaaagcttttgttaacaaatgaataagaatcacgtgcaattgtttcccttaagctcgggcctgattttctaataccgtaagcgagcaagtatgaaagcttcccagggaagctaatctcaaatccttagtcacttaggtgggagtacggattgaggtgcatctgtagagtccatggaggacttgtttttgtatgtagtttgaccacagagggatcaatttaaaatgtgtcaaattaaattcttaatataaaatagatgtggcttgaaatgtaatgcataccatctgatttgttacagaacacaaaaataggcacagtaaagacaagaagaaaaccagagcaagaaaatggggagaaaggattaacctggctggtgacgtagcagcattaaacagcggcttagcaacagaggcattttctgcttatggtaataagacggacaacacaagagaaaagaggacccacagaaggacaaaacgttttttatcctatccacggtttgtagaagtcttggtggtggcagacaacagaatggtttcataccatggagaaaaccttcaacactatattttaactttaatgtcaattgtaagtacattcaaacgaaggtgatttatgaggtctctaaatgtgccattggggaatgggtttccactcagtgctttggaggaccattcagaactggcatttcagccattcaggcaagtgactgaagagaacataagattatttgttggttgcctttttaaactgacaacagtggttatcaatacggagtgtttattctgtgttagacaatgtgcttcttacttaaaaggtataattttgaatccttctggcaacgctgccaggtgagattatcaatcatgcccattttatagataagaaaactgagtctcagaggagttaggtcacttgcccatggtcaggtaaatcactcataaatcacttggacgctgcctgtggcctttagcttgtccagttccgaaaaccaatgctttttgcctcacttaggaactttgtacagccagttgtggatattcagtagtattagggaggctggttgtgaaccatagtcacctgtggaacttctaaaaatagcctcttccccaggattctaattaagtagcctggggagtgaggcctaggaggctttcattctatttttctactcccattttgaattaaaaccacagtaaatttgcacgattttttaaaaatcagaaccaaagtctattgttaaaaactaagtatcattctctatgcagacttccaggccccttcccagtggcagccactgttgaaagtttttgtatatgtttctaacaagcactgcccaatagaaacataatgcaaaccacatatttaatttcaaatgtatttaaattaaaaaaaattcctaattttaaattttcatgtagccacattaaaagaaaaagtttttaagaaaatggccaagtgcagtcactcatgcctgtaatcccaacactttaggaggctgaggtgggataatctgaggcccagagtttaagaccagcctgggcattatagcaagacctggtctctattaaaaaaaaaaaccaattagccaggtgtagtggcatatacctatagtaggctcaggtgctcgggagctgaggtgagagaatctcttgagcccaggagtttgaggctacagtgagccttgattgcgccactgtgcatcagccttggagacagagtgagaccctgcctcaaaaagaaaaagtaaaatataaacaggtaaaattaattttagcaatatgttttatatcaaatattattttaaaaattattaatgagatatttcacattttttatactaaggcttcaaaatccagtgtgttttacactctcagcatacctcaatttgagctagccacgtactagtgctcactagccacttgtgatgggtggcca

SEQ ID NO: 106581 - DNA, 1062 bp, Homo sapiens
aacaggtccaggggagcctctgcataggtaagaatgcaactgtgttgttttgcatgtatgttgcatgtgtgtatgtgcatgcagacaggagagaaagagagagccagagggacaatgagactgagacagagacagaggtagaagagtttggtattaatagtatgagattcagtccttatgaccacatgccctgctgctgaagagggatagaatatataactccataaatcctgaaagcttccattctgtgctttgtggacaatttaaatgcttttccagcggtatctttgattgtatacttttttttctttcaagccagtttcctaattcttacatttcatgttatttcattgtaacaagtcagattagagaaaatagaagtggtttttcagaaactattatctgttttagcaggtccgaaataaaattttcccagtgagtaatggagatgtgtagactgtactccccttaatataatttaacatcagcaaaagtccactccttttgtgttgttctctctcttttggagttattctgtcttattctaccctgccaccctgctgactgtttcatccatacactttctgacagtgacagtggctcagggggaatctctgttgggttttgcccctttggaaacttaggacttcatttttaatcattattcacttttatcttataaaatataagaattcataaatttttaatactggaggaaactttagagagaacttctattccaggccttctctttatggataagaggatcaaggcccagaacttcgaagggactcctaatcttggagctagaatgaatggcaaaattgaacacaggcctcttacttcccagtcctgtgttctttccaggctgtaacaaaaggaaaagctgcagatggtgcctggaaaggggatgttcaaaagtatgactcaaatgagctttgggaagtgccattgtatttaagtgtgggaataattaagaatgaactggtgagactgttcaagaagttgtctcaagcttatagagaaagatagaaagctttcaattcatttaagggattaagt

SEQ ID NO: 106582 - DNA, 1167 bp, Homo sapiens
ctggcactgcaactcaagactgattatgaatttttaaagttagttattgccatttgggatttatggtttgagcctgatttcctttcattttcccctttttgttcttcatcggtgtttatacatttttttctcttttttatagtcttcaatgactttctgtctaataaacagtcaatataagcaatgacctctaaaatccttggtaaattattagaaaatcactgttttaaatacattaattctttatttcttcaacttgatctactgaatggtacttataaaaattctgctttcctttttttttaaaaaaaaactttagtgttaatagtgcagtactccaataaagtcattaagaggtagtaaaaaagaaacttctaatacaggaattgtaccttctttcatttgttcccacttattcattaaatttttttaaaaattatcattttgtttttaaaaaccattttattatgaacatcttcaagcatacataaagctagagacaataataaaatgaaccactgtaaacaccatgaatcttaataatgactaagatttttctacatttgcttatttttctttatgctgagtatattaaaacaaactcaagataccatctctaaatatttcatgataaatctttgaaaagtggggatcttttcctaagtaactataatattattaatatttgatacgtaatattaagtaatattataaataatgtttcagcaaaattaacaattccttcatattgcctacacagtacctatattaaaatttttctcattgtccccaaaatgcctttttacaatcatcagttagattgtgatctaaacaaagtccacacattgcaactcatcgttgtctcttacgcaacttttcactttgttgtcgtcatcgctgttgttaaaattgctattttcgttctagtttgagatttgctgcatatagcccctttttcccttccattgcccctactctttgcttcatctttatcatcatcaggtcaggctgcagttgcaaggattagaaaagcaaggccagtctgcaaggccagagcaggtacccagagcaaagcccctgggccattaagccacttctcagagtgatttaattgaagggaaaggcagtatctttgggaggttttttgactccttgtctgaagtgcct

SEQ ID NO: 106583 - DNA, 1137 bp, Homo sapiens
aactttatgggtttagaaaggagtctacagttccgtttcttcattcatgcgtgcatttattcagttagccatcaagtctttattgagcaacttctctgtgccaggaggagaaaaccaggaactgtccatattcctggttagttgtatgacttcaagcacactttagaatataaagtgaggataacatgtacctttcaagattgaagttagggctaaatgagtatgaaataatgaaagctcccaggacagtgtttatttagcatgtggtagacaatcacagaatggtaggtgttttttaaggttcatgaaaatagaaaacaaaacaccacaatgaggaaaggaaaactccaaatactaaaattcaaaggtaatagcccagtgcttctgggtaatcatgaagggtttaggggacttgcccaaggtcaccctgccagctagtagcaaggctgagggtgctttctgtccccttgtttcctctgtacccaatgcaacatttaaatattttctttcttgcaagtttctcttggcccagtggctgcccttcctgattgtctctgttttgtcatcactggttatgtctatgtgtatacatttgggccatttgagtgtctctgcatttatttgtcttttcatcctatttgtgagttctttagggttcacgatgggaagtggggtgtcttctctccctatggcatgcccttgtgactgcagtgtcctttacatactgggtcctcagtaaaattcactgtgctcactgcctgctagccccacacaccaggggcacaagcaaaaggcctatgggagccctttggagagtggcttgcttttataagccacttcctgcggatccttcccattgcttgtttccagatgagatcccaagttctgtttcacggacactctctatttgaccctgaattttgcacaagaggatttagtggttcttatcagtgcttcctggtaggtgggtgagagaaaggcagggaagaaggctgttttgtttgcctgggcctggaaggcaagtgtttttctctaactcaaacttctccctcaccttcccatctcagcaaggccaggtaatttttgtttcttaaggcatttaagaactgtctactctgtgacccatcaatgctgtgc

SEQ ID NO: 106584 - DNA, 1570 bp, Homo sapiens
tgtttggccattgtcaaggatatgtcattctgggcaccctggaaagcttctgtctgtgtttcttcatctgcagtcttgtagcaacacttcactgcctcagaagcctggttactttctgcctgatgataggttatcctatgaaataattcctcaatttggtcctgcgtcttaggatgttcgtgaaaatacttaaaaaaaaattcttggacttccctgtctctaaaactttatctttctttctattctttatttttaaaattgcttctccaaattaaatagcatctcagggtctttctggtatctccaaacaaggcctaaattcaagaccaccagggagtttcctcaaatgctccccagaggatcacttacttcatcttatacctgtaccaggttgttcactgggatagcatgtggtgtcctattctctcctggaattattatttctaaagtgaatcctttaataaaagataacattgactatttataacctacaagtagccaaatttaagggtgtaacattgtaggtcttttggctttatcccatccagttctgtgttcttaccaccataacaagatggaatataactaaagcattctgtcagactctaaagagccaagggatatgaggagtagaggggcaagtatacttagatacatcaaaaacaatagtttcagcagcaggtatacagtcaagactgccagccaccagcaagtttaatggacaggacatttatcacagttttgaccgtgctagtaagaccattgacctaaacttcttgacttcccaaatctgtattagcaagtacacattttagacatgtgtataaatgtaaacataacatgaaatgtatacataacatacagaaatgaaatctgcagttcccctccttccatcttattagtatatattcagaagacactgaaatatttttttcactgatgaatttattgaccaatgacacttcatgatattcttctcccctaaagcggctacaggtcaacattttaaaaaatgactatttattattgttttattctgtacatgcattatgcaaagcactgtacatgtaccaccttgcttaatccttatcacaaacctatgaggtagttaccattcctaactctgttgtataatacctggaaaaggagctgagatttacagagatgaagtagtttgcccaagatctcacagctagtccacaatgatgacccatgtttctctgtcttattccgtgacccattttctctgtgcaggagtctgtgtggaaaagagagagggggcagaaagagaaagtcttaattagtactgtgattcaaaaaaatcttcaaggttcattttaaaatattaattatgcaagttaatggacatttgatttcctgggctggaggaaatgtcattgtcaaatcctgttaaaaacacaaagaagagtgaatcttaaaaatgtcaggctcgaagacaatgaagatgcgttagttaaaaaaaataaaataaaagtctattttggttccagtcgttattaaggttggggcctttaattaccaccttccaaatcacaatgccagtactttt

SEQ ID NO: 106585 - DNA, 1092 bp, Homo sapiens
ggcgaagtgggagggggtgctgcagtgagtcatcgctgccccaggacctagggcaagagctctggaatccttctggtccttgaaaggttaaggctcgggtaggcagaagccagccgtctgagcccagagcctggagtgcccctagattccaagatagtaacccccaattccaggaccgtagggataggactgcgtgtgtacgtcaagtttgtaaacagcctttactcctcctctctccccgcctccacacccgctgaagcctagtggccccagcagttgtataaatattttactgcgcaggaccttcattttcattggcagttttaggtggtagtgcgcacgtggtttctttgggaactgaggactagggcttcagaaacgactacctggactgtgataacctcatttatattgcgtttaattcgcagtctgcctcttttggggaaaagggccctcatacatcttaaagatatgcgttctggttcttcgtatcttcagccattaatctagctccaaaacccctgcccctttgtcttccttctggaagttatctcctcccaagacttccccttaccacttctgcagcagtggcatcaagatgttgctagttctccgcctaggagtcttccaggaaatcttgaagagtctaccagagtctaccagattttggagtgggctgtgccatcctgccacccctagtcagttgtcagtttttctgaatttcatctgagatgggtcgcccgcctctcctgaacatctctaccctaaatctatcccgcttcacttttctccccctctctccttaggactgatgtctaagaaatattacactgggcttcttctccagtctttctcctcgatcgctaactccatttggcatttaagactatttacagtgcactcactcacatccacatgtccagtctcagctcccaatctttcctccacaaatcctgcatttcaggccatgggttttacactgctttctctgcaccccaccctcaatcctagtcttcattgcctttgtgccttggaatttacttggtcttctcactcatcttcacatgctcaaatcctacccttctttggagg

SEQ ID NO: 106586 - DNA, 1063 bp, Homo sapiens
tggctcacacctgtaatcctagcactttggaaggttgaggtgggaggattgcatgaggtcagttcagcggttcaagaccagccttggcaacatagcaaccccttgtctctacaaaaaaagagaaaagaaataataaaatgaaataaaataaattggcccctcataaaaatttgctctgaaagaagcaaaccttttcaaggtcacctggagttaaaggagggacagtttttagcccgttttcttcgtgggactttactggaattgaatggtattgtaggttaagtggaagtattcattggctgattcgtcatgaaaattagatcccagaggagtgatgaatgatattagtcactagggagagataatccggccaatggaaatgacagtgatgacatcacaaatgactctgtttgcctaatgccactggaaacagcaggaaggagacttgaagcaaagccatcaatttccacagaaaggggaaacccacacccaaatggtagggagggcccaggagccagaattcaagtgaatagtttcctgagtggtcagcagcgtcaggtgatttggggaacagataagcccctggtacttggtagcactgcattctggtcagtgaatcaccaagctgggacctggtgctggctgagctctgtgaccttgggcctaaagaatcttagggagatgtgttttacatgacaagaaatgaaaaggacaattgtgctaactaaataatttgggttccaatcttttgtctgaataataataatgagaatcttttcttgagtacttactatgtaccagaccatgtgtactatgtcctctctgatccggtttcctatttgcagactgcagcaggtagaaactgtgttgtctttgtttgccctgtgagtgaatgaccttagtgtattttttaaaagtcttctaactactgacttcaagcaacaggtactgtagagaaagtagtttgtatcattattgataataacagtagattcccttcattgagttctttgtgctaattattcaatcctcatagctatcctgccatctgggttttaccctc

SEQ ID NO: 106587 - DNA, 1047 bp, Homo sapiens
aatacagggtctgtcctattccctgtctcacaactgattcatagtaggctcttgacccaaggagaggccattcatgatccatgcaggtgaaccaggtctgccgttccctgcccagagtaacaaaatgtggaaagacccaaaagtcttacattctaaccctttctatcaccaaccgcaagaaaggaaaaatgggctttccaaatgtgtttccattacaggatcgagtcatctattattttcatttcagcaatgccaggaaattcagaatcagccacctcgtccaaaatataataatctttcagtattatatttatgataacatatagggaaagaggatatttcacccgggaaccaaggcagtctcaaggagactgactttcttcagcagcaccatgttattataataagtttgagagagctctatactgggttaaatgcaacttttcacccccactggcatcgcaaactaaactgaacggagaaggcagcctctagcaaaacaggattagatttcacaaaaagatatggaaagggatacaaatcgctcaccgtgcctcctgcaaaaatagaagagcctttgctgcactgtttctattcaaaagcgactgctttcttacataagaagtttaggtggctgcttgtttaagaaaatctttatgaagttaggtattttattttactttgttttctatttaggatgcatttcatggaggatttttgggtgtttagatttggtaggaaatgctgtgattaggtcccaggaagaaaacagtggttacttttggtctggggccccactgggtcaggcaattaggagattgtcaaggtggcagcaagtaccaggggcctgtttaaaagaatggcctcgagtatgtcaccagcaccatttttattagaattttctttcaatttcttcgtttttctttctttttttgagattgcaacaagtctgtggctatttcttaaaataatttagtgcaaaagttgtgccccttgctactctgagatcttgcccaagatttgaaaatgtgcccaatgcagatgtga

SEQ ID NO: 106588 - DNA, 1050 bp, Homo sapiens
ggtgaaacccaaccccgtttttactaaaaatacaaaaattagccagatgtggtagcaggtacctgtaatcccagctactgtggaggctgaggcaggagaattgtttgaactcaggaggcggaggttgcagtgagccaagatcatgccactgcactccagcctgggtgacacagccaaatcctgtctcaaaaaaacaaataaacaaaaataaaaaaaattataaaggcattgtagagtcttggtgtaaaatacatttggaaccactgagataagtaagagagttgtttgttgaatcgggctgcccttgtaagttgacacaagacactggaagagtatctaggtgctatggaattgttcaggacatgtggctaattttggtagtgagattgaaactagggccagtttcaatgttttttatcttgcaaccctgtttccttatcctcctccttccctagtggggaaaaatccttaagtcacttttagaacagctaaggaagttgtgtaatgatgggcaggaaaggctattaactctaaggaaggcgttttcaatataatctaaccaactgtagaatttagaaattctagattttttttttctgaaatactggcaggcctagagcccagcaaaacataaaatatatggcactatgcaatttgaagtcttgtttgtcattcctgcagatggatgagtagcttcagtgatgatgaggaaggactcatgcttgtcagggttgtttctctttttttgtttgtttgttgtttttggacagggtctcactttgtcacccaggctatagtgcaaaggtgtgatcacggctcactgcagcctcagctttctgaactcaagccatcctcccagttcggttcccaagtagctggaacaataggcacatgccaccacacccagctaatttttaaattttgtagagacatggtatccgtatgttggccaggctcgtctcgaactcctggcctcaagtgatcctcccacctcgacttcccaaagtgctgggattataggcatgagccaccgtgcttattaatttaatc

SEQ ID NO: 106589 - DNA, 1024 bp, Homo sapiens
acagctcagttcctttgctgtatggcttttgcccccttggtcagtatcttgaaaaggattggcctaacacacaagatctccttcctggctccctgtttctgcctccactttacctcctcctcctattgatcctacaaattccaaaaccatctgtgctagtaggcagagtaattggtgttgaacagatgtctatttgggtaacaatgttattttttaaagtgggcattttaaaaacattgctgctagatgattttggaatgtattttacatcataattcctcaggcccagcaggtttctcaacttgacttttcttaggttattagtgatgttgtttggatgtccttggtacacaccaagagagtggcagaaagagctgctcagcaatgtgcaagaaacccagtgacttctttgagatgaagtgtttcttctggctaactttccacaatgtgttgcagacatacaactaatgggcaatccaggtcctttaaaatcatttcttcttaaaaaatagactacagtaagtgtagctgtgctattcggtaaatcaacatgtgtttatcacatttgcaaagccctgggttgaatagtcattcatatgtaacttctgcatattagagtttctaagctgttttcttccttgccagttcttcttgtgtctccagtggttttatgttcattttttaagggatcagtgagaggacatagataaggctctttgcaaagtgcaaatccctatgcaaatgtgagggttttaaatcgctatttcatcactaggtatacagtatccttctgcccagtaaactgcttcttggttgtgatgggtcaagaaattgacttactagtctactgacttctcagcacttcccagcttctttagaagttttctgggaaaggaaggaaaccatgaacgaggtccactctggaaatctgtcttctcactccatgccctgccagtcagggcatacccaaaatatgggctttggcacagataaaacttgagactcctatttcttgcagggctga

SEQ ID NO: 106590 - DNA, 1038 bp, Homo sapiens
aaaatataaagtagggattgacgcactacagcccatggaccaaattcagcttaccatctgtttttgtcgataaagttctaataaaacacgaatatactcattcgcataggctcttgtacattaatggcagaactgagtagttgcaaggcaaaacctaaaatatttactatctggatctttagagaaagttttccaattcatgatacagaccatagtgcatatcccagaataggaagatggtggtgggatctgaggaggtatcccagaggaggcaataccaaagctgagacacgagggatgcatgggaattaaccaaacaaggctgagaagtcaggggaggccaagacagaggggactgcctgtgccaaaacagggagataaaagagagtgcagtaggtcctcggaattgcaggaatggccagaccggagatgtgggctgtggccacattatgattcttcaaaagtcaagaggatccttgaaagttttaagcagaggcagggctgatcgagtttgctttcttgaaagttcactctgcagtggagtacagtgagcaaaggatgggttgaaagtggactgcttcctttccctcccattttcccctcctccacctctcaaaatatttagcctcttggaatcaggccggtgtaagtgtccaaaactgcctgaccttgccctggtggcctggggatacccacatgaccttgtggccctccagtctgccatggtcttgtccttccccactcagggccacctggtcctacgcataatgtaggagcagggggagtgggggcttaggatccaatttctccacttgacacttgcagccccttcagcctccagacagaaatttgagtggcagtaatgggataaacagtttaatttaatagtaacagaagaactgggcccagtgcaaggaatctcattgccctttttcaaagtgactttcctttcaatgcatgatgtagcagggccattggggatgcagagaaatacaagggattgattttgcctggcaaggggtcagattgtaagaagcg

SEQ ID NO: 106591 - DNA, 1027 bp, Homo sapiens
tcctcacttgtgcctttttcctgatctagaatgttgggcttctctggcagaagcagaaataaataattgagaaaaagcttattatcagatgaacacattatgcattgatttgttcctgcatgtgtattctcataagttaggtttaattaaatgtacaatatagtggaaggattaagtgaaatatgggatagcaactgggcaggatattaggaggtcacggacattagtaaatcggaagactgagtagctacacagaaagcattcacaaaatgatactgagtaaagcctagcactgaactgtagtaatagtaatactacaatcctaacatgagtcatacacgtttccgtcattataattgttacttcccaaaataattgttatctgtctgctgtatattatccacctcccctaattgcaacgtgtgttaaatgggacttggtctcttttgttggtctctatagccccctggccttgtggcagagtttggcaaactatggccaaccagccaaatctgacccactgcctgttttttgtaaacaaagttttattggaacacttccagacccactggtttacatattgttcgtggctgcctatgtgacaaaacagtgaagctaagcagttgtgtcggacactgtgtggccctcacagcctacaccttttactatctggtccactatggaaaatatttgctcatccctggcctaaaccactgactgacaaatattaagtgcttaacaaacactgatagaatgaaggagtggaagaagaaatgaatacacatggatacagagtgtaagaaaatgcagataaatcaaaactgtgaaaggaataggtctgtgcttaaaatttttttctttttaaatcctgttgtattttgtttaacaatataggttgagtatctctgatctaaaaattcaaagtctgaaatgctgcaaaatctgaaacgttgtgagcaccacttgttggagtattttggatttcagattttcagattacggatgcttaacccataagtataatgcc

SEQ ID NO: 106592 - DNA, 1046 bp, Homo sapiens
catgaagtgtctcttttatcacattatgggtaggagatacagcagtggagaagatggatattttctataccctcaaagatcataccctggaataaggggtacaggttcaaaactaataaaagaataaatcaagtaagtgttatatttgaagataaataaggagaggagatggagaataacagggtttgggtagatgctttttaggaagtgtgctcaggaaaagctgctctgatttatttgagctgaaaaataaagacagagaaaaagtgagccatgtaatgtttgggtaaagagagttctagaaatccaaaatactgtgtgaaaggactacatccggaaagaaacgaggatatttacagaactgaaatgagactacatttattgaacatttgccttgtacaagtgatcatgccgagtcatttgtgagtgtgagagtgtgtggttgtgtgtgtgtcaggatggagtgtagggggtgtgatgctgttcaaggactagttagccttggccttctgttctgggccttttttttttttcctctgattcattcactcagcccccagatgctacatgatggtttccaccatgttaatacagaacgaataagccatttggctgtgtcagttctacatgtagagtcatgtattgtgttctaaccattggtcttgctaaaggtttcttttcgatctcctgcctgtggttaagagctattccttgacattcaggctaaattcagttttccacaaacaactttaacaaggtgaaattgctcaacaactttaaatatttaatgaggcttgtcactgtcttcattgtggtgctacaatgagagatgaaagaggctttggaccaaaattggggcatgatggcccaaatcaattctccttatatatattattgtaaaagagtgtcagataaatggatactttaggtagattttaaatataaagagataatttaagtatttattatggtacaggtaaagattttttattttttattttttgagacagggtctcactctgtcactgaggctgcagtgcagtggc

SEQ ID NO: 106593 - DNA, 1142 bp, Homo sapiens
ttcttattgagatttagtaaatatacttgagtgtatatttctccaattattgtaggacaatttccagaagctttaaatgattttttaaaccgtaattttctttaagtaaatggttgctttatgggggagaaagtctgctggtctcccccttccatcatgccagaagttggttttctgtcctatcttttaaatgtcatctatgagctcatgatgcgcatgtgcctgcctctaacctagcctttcacctggacaccagacttccatatccagcagacaacttgtcatcaagtagttttggttttttttcctcataaatgttctcttcaggccttctttatctcagtaaatgaaaccgccatctacccagttcatcaactcagagcctgagcatcagccttaatacctccctcttgtcaaccacatgtaatccattagaaagtttcattgggtctgtctctcaaatatgcctagaaactgctcatttctctccagttccatgactactgactctgaatcattccccttcacttgatctattaaaatagccttttaatgggctgtctgctttcactctcactgcccctccaatctgtgcctcacactaccctccgagtgatcactgtatgtatatttcccctagacatatgctttaaccctggcttcagccctgtaggaactggctgctctttacctctccttccaatctcatctgaaggccctcccttgacctgtgtattatagtcacatggtcctctttgctagcgtgctttcctttgcgtggaacagtctcctccttctccctttgcatgctggcattcctcctcttctcttcttgttttagcttaaatgtcaccccctctaagatgctttctaggtggcttctcctttgttgttctctgttgtttcagcccattcatttcctttacaattcttgacatggtttgtaattattatttgtttaatgatttattctctgctgttcctactagatggtaaactccaggacagcaagaacctcatagttgttttgttaagaaccctgaaataaacacttacaaatagtaagagctcccacttaccaagcagtaagtattttcaagaaatgttctaaaatatatatgaatatatatgtatatgcatac

SEQ ID NO: 106594 - DNA, 1047 bp, Homo sapiens
taagtgagatggggaggcattgaagggtgtcaggtaaaggtaccatctgatgtgatttatatttttaaagcatacacactggctctgtgtggggaatggaatgcaaagaggctggaaggacatcaggtgagatccactgtgacagtcaagacttttaaacctggccgggtgcagtggctcacgcctgtaatcccagcattttgggaggctgaggcaggtggatcacaagatcaggagatggagaccatcctgactaacgtggtgaaaccctgtctctactaaaaatacaaaaaaattagccagacacggtggtgggcacctatagtcccagctactggggaggttgaggcgggagaatgacatgaacccgggaggcggggcttgcttgcagtgagctgaaattgtaccactgcactccagcatgggcgagagagcaagactgtgtctcaaaaataaataaataaataaataagactttaaaacctaaggccaagcacggaactaaagaaactgtagcatttggctgttgagtgaacaaatcaacaatgaagaattaataaacagtggaaccaaagaatgaatcaaagccaggagtgaattatagtcctagaaactcaccccatatccattggcgacccttccagttagaagtcaggaccactgagcactcctgttctgggtcagccagccctctgctcatatttcagacagaatgcattttatgattaatcttaatcctcctacctcccatagaagtaaatcatctaaatgctttcctcaggggaggagaaaaggtaaatgatctctccaaacataccctttaaaattttttcgatgaaagcaaatttttaaacccacacatttgagtgggaactgaatggtgctaaacaaatacccaacttctacatgtgagatctttgaggtgaccccatgtctgtcaccacagaatgaagtttgtaaccacagccaaggtttctaccctcatccttgccccgacttccaactaacaggagccagaagttgcctaggttaagacaggagatggct

SEQ ID NO: 106595 - DNA, 1832 bp, Homo sapiens
gagctgtggttgggtcggccgtagccccgggatgtggtttaagtggattactgcctagctgagccaaaatgtttgcttgtacctgttggaccactacagcaaaccgctgcttacagtgcattgtgtatttctgtagtactgttttgcattttccatagagacagaaaactttgcaagtcaatcactgttgttcccatggtactgtaagaaaaaaaaaaaggaaaaagaaaaaaaaaaagaaaaccagccaatcattgcgtgtacagagctaaaaattgtaattaatagagcctgttgggaaaaaaaagaaaacaactgttgcctttttttcttgtataaaagagaatttatgacaaaatttagctgtgaggaatgtgatacgtgtttatatttctgaatatggaacaaattgattcatggggatatattttaatgtaaactaaatcaggtatgtaaagttgttttaaaatgggagactatataagtaattctctaaagctttagttggtttgaatatcatcatttcctccatggtgagcctgcttgtgaattattaagcacttgtttgcattctctgttcttcactcatttatttcttgcagtgtgctatggacttaatgctctttctgtattgatgaaaagcagtatgtgggccaatctttttataaaacactatgcatatataaatattacattgttcatagctttatttgacttatgggtttatacataacattagaatgagtagctgtagttgtgtggacatttataaaacaagttcctttcctggaacagacacaatatacattctgtagctaaaaaggagggaaaagtctgtgaatgctatttttattattaaagttttccatacaaagcatacattgagctgtagtaaggctgaggaagagtacaactgaataatgatgttctttttcatcaagttcctaagagctgacttggagattttattcccagggctccactgctaggattcttctcactagttctaacaaaatctgtgatgttaaatgactgatgctctcaattgtgatccagagttttaaataaatgaaatcaaggtggattttgggaatatatcctgaagttaacatcttgatgtccttcttgttgtaagatgatatttggcaatttaaaatctatgtgctacccacctgggcttgtctcaatccgtggactttttggtgtggcagtttcacctgaattccacacatcagatttgtttggaaatattgtactgtacagggactatgcattatgcagaaagatatagttttctttgaactgctgtaaccttaaattggaaactgattcttgtgagcctactttccttaatcccgccgcccccctcccccacttaatgtaaatgtcttgatgagagataatggatgagtattttgtatgatgaaatcaaacgatttaggaatttgtctccctccgttacacagttgatgcctgaaagaatgttgggggggaggactcaacaccctaattgtattttttaagtttcttttgtgaaagattttttaatgcatttttactgtaaaaatacatggaaatgtatgcattccacaaccactattgcttctggattgatatcttccttgtctctatgttgtctcaaatgtatcagggtcaagtaatcaattgagggcccctgactccaacttgatgaaatgccgttgtgttgaaagagcaggatctatgccattgcaatagcatagtgccttgctactcaaagtgtggtctgtggaccagctgcctcatcatcactgaggagcttgttagaaatgcagattctcagccctactcca

SEQ ID NO: 106596 - DNA, 1033 bp, Homo sapiens
gagggcacccgcagcgccgacaacactttggagaggagggagaagcacgagaagagacgagacgtctctccggagcggaggcgagagcggtcacccacccgcaggagagacggctcccccagccggcggagacggtctctggagagactcctggagcagaggaggtcccccgagcgcaggagagggggctcgcccgagcgcagggccaagtccaccgaccggaggcgcgcacgctcccccgagcgcaggagagagcggtccctggacaaaaggaacagagaggacagagccagccaccgagaaagggaagaggcgaatctgaaacaggatgccggcagaagttccagacatcccccggagcagagaaggcgaccttacaaagaatgtagcaccgacctcagtatctgagacgctgagtcacattccaacctttaccgtgtcaaaggttctaagaggaaagtcacaaacctgaaattatttagtttcttacctaatgaagcatctgacacctgatgatcctatgaataacaacaaacattttatgcatttgaaatcttataagaaaaaatatatatgaaaagtattgtgcctgatgtatcatattaaagaaagtatttttaaatgcatacttttttggaaattatttgccaaatgctggcccaaagggatataaattttgtttctacgtaacctgtagaatcgtcaagaattgttcccgttttggggcaatctttttctctcctggttaaatggggctgttgatcattttctctacgtaagggaatttattgattaagtttaattaatttgatatagactgtcatgtagtgatgtagtgctatactgtagtcggaagtttttcttaaaagcaaagagcaaaaatgcaaagttttatttgtaaaagctgaggacccttggggatggattaggtttgccgatgatcctaaaagtaagcaaactgtatgacaagactactattgcaaatgaaggatatttatagctaaactgcgcagcacaaagaagttttatattg

SEQ ID NO: 106597 - DNA, 1352 bp, Homo sapiens
cgtggctgtgcactgtactgaacttctgaccattaggtgtattgataccactgaaactgtgtaacattgtctcccttttctgtcttccctatgcttctgttggatgtgatatttcatttgagagtcatcgtcagtaacctgtgtaccttctcaaaacctatgtctgttgcactgaggatgaaaatccaacactaacaaatgttctttgggctaaaaataaagatcatttaaatacatggttttccaagaagggttgaacctgccacagggttgtgctactgtaatgtctccatgcgtcacttggactaaatctctctaattccattgattagagtcacaaatgggttataatatgttaagttccaatatttttctgacttgattggaacctgcttctctgtgaggctatttttgtaatgagttttttgtacttaatttaactgccgcggtctttggtgggggtgggaagggattttgttcttttgttgtttattgttaatgctctcctatgccagcctgtcattgttccagttgtttgaaaaaacaaaacaaaacaaaacaaaaaaggatgcattcgttgtctgggttctcgagtcaccttatggctgtctaaaaatgtcactgttccgattgcggtctctgcagccttatttgagtgttgccttagactgtctgactggacaaataaactctctttgccctatgttaacaaatgtagattttttttctttcctctgtgttatagggaatctaaatgttcaactttttctctttctctctttctccttctctctgactgttcttggtgctgggccctcccttccacagcgatgatacctcctaatatcgctgcatgtatgagaaatgaaaagctcggggaggcttgcttctaccttatgggccataatcaaactacggtttgtagctcaatcaatactaggtgtttctgtgctgtggcctaatttcctcattgcttctgcttagctctgttttgatatgtttggcaattcattctgagcaccctgcgttctttgaattgtaagtacaacgctgaccctgttgaagtgttgccttcccttgtcttaaaagtaggcataagaagccactggtgatccaagtgccttcctgtatccacatcttcacatgacctttgttaagaacctgttttttgttcattctcgtagccaacccagtatttagaaagaatgaaccttgtttcatggagccctgtatcgtagggctttgctagatgggaagacgagatttcctgcttggtcaggtatctctttgcaaactgcagtccatgggcccaatcctgtccatagcctgtttttgtaagtaaagttttattg

SEQ ID NO: 106598 - DNA, 1616 bp, Homo sapiens
agtggcacacgcctgtaatcccagcacttgtggagactgaggcaggaggatcacttgagctcaggagttccaggccagcctgggcaacatagcgagacgtcgtctctgctaaaaattcaaaacaattagctaggagaggtggcttgcacccgtagtccaactatttggggcaacgggcaggatacgctggcgggaggatggctggagcccaggaggttgaggtcgagcttcagtgagccctgatcatgccactgcactccagcctggatgacagactgagaccatgtctcagaacaaacaaaataaaataccctggaaaaaaaacttttaagcctgaacaccaaaaattatcatgcaaggtggattatccaataacagttggcattataaaggcaattttaaaatttaaatatgtaggaaatataaaattcacatagacaccttgtgctaccttggttagaaacaagtaaacataaaactggtacaacatagttgaggattgatattttttaaggcaatacatgttctgctgagcatgtgatttcatccaagatgtttcaggaatttggttgatatgataataagcctcttctctagttactttgtaagtgccagaagcccggtaaagggaatcaagtctggcagagggtgaatatgtgatgctcaattttttttttttgagacggagtctcgctgtgtcacccaggctagagtgcagtggcatgatctcggctcactgcaagctctgcctcccgggttcatggtgatgctcctattttaagtgggtctgagaaacagcattttggaaattagagttgaagcaggggagttagatttctcaaaagatgtgggagatccaggaggattttgcaaacccccagaagacaaagagtgagcattacagttcagtgaagagataatcacactggatccacttcctttctgtgaaagcgtgttggacatagttgattccaaggtaaaatggaggtgcctatgcctcaggtctctttcagattttttactcgaatatttacttcatcaagtggcccaaaaaccatttgtttcatgatatctacaaggagactgaaggtcttaactcagagtggtttctaagctcttagaaatccatcacgtctggggccgggcatggtagctcatgcctgtaatcccagcacgttgggtggccaaggtgggcagaatgcctgagctcaggagttcaagaccagcccaggcaacatggcgaaacgctgtctctactaaaatacaaaaaattagccaggcatggtggcgcgtgcctgtagtcccagctacttgggaggctgaggcacaagaattgcttgaaaccaggaggcggaggttgctatgagtcaagatcataccactgcactccaggctgggagacagtgagactgtgtctccagaaaaaaaaaaaaagaatccatcacgtctgggacactgttctcgaaaccccagcaggccctttgaaaagatgctctgccctttgtgcagtgcgtgagtctactctgagtccatttccatgtctagttcatgctatctaattctttgctcttgtcatcggtagccttattctttctgcagtttcactcatctcagtc

SEQ ID NO: 106599 - DNA, 1344 bp, Homo sapiens
aaccagaaatcctatgtcaggcctcaaagccagccacctctctctagaagttagcaatgacatgcagtgcctcaaagtgcacgaataaacctttctctccaaatgcacttttctcggtctttgatatgggtaactgatgatgagaaaggagatgattaaaggaaaaagggtgaggaatgatttgaacctagctttggatcaatgtcctcagcctgaataggtactagattttcgtagtcctttgaggggatttttgtgaggcagcagaatgatttcagagctaatgaaccagtcaggccacgctctgaaagcacataagactagctgcttgagcaaaggtcctaaaaggaaaaataagcttcaaggttgggtgctttcttggctcatctcttataattacaccctttttctaaagctttcatcattctggggagaaggcagaaagtctgagtgtttgttcatcaggtgttttcagattgaatttttggtgctagcagactcttatgcctcaccagatgcccagtgattatttttctaaacagagaaagaacaaaacattggcagaagcttaaacaacagctggcaaaaatgaagtgacatgaacacagaatgagtaaaagcatccatcccagccttgggtttcacatttgcagtcccaaaataagcgaacagccagttattttggggctcttaaaaatctttgaagttgccaactatcccaaattttgtaattggtttaaggaggaaagctggggattcccctaattttgaatctggaaaggatggcagcaatgaattctagtttcagggcagtagctccttatacagacaccctgagtattgccaatgttttgaccatcggtgcagagctctcctttaataacatttgcttaatgctttaatttattaacacttaaccttctctttcccttttcaaccctttttctcttccctttgctatattcccacgtaactttaaaaaaattaaaactcaatatcaaagcaggcaatgcatgtgtggctatgcctcacaaaataggtcggattattgaggggagccctgctgaccgctgtggcaagctgaaagtaggagaccggatcttggcagtaaatggatgttccatcaccaacaaatcccattcagacattgtgaacctaatcaaggaagcgggaaacacagttaccctccgcatcattcctggggatggtaaagtatacctattatctctctctctctctctctttttctctctctctgtctctgtcttttccttttctctttctctctctttgattagtgttcgtgtaactgaatagtattaatttagtggcagctttattcat

SEQ ID NO: 106600 - DNA, 1091 bp, Homo sapiens
attattttaaggaagaagaaagtgacttaaagataaatcagaaagtctgtttaaaccaagctgttctctttcatcctctagtagaggaaacatctggtgacttaacatgacttccgaatccttagatctggcttcagaggtgactctgacttagcctgagtgttcttggacatggacacctgctttgtggtgtggcacataataattttaatttacttaattctccttgcaagaatactgaggaaagcagttaatgctgactatttgtagttaaggatcatggcttgggcttgattcggaattatcaaacagtgatgggtcctgtgaagaactttagggctcagtgactattcccactgtttatccccgtgtcttccattatttcacctgttcagagtattttgtttctttgcctatattgaaaatcttccatctgatcaagcaccaccattcttgtcctgcaactgtgttcatcttgggggtatcattgcttttatcagtaaaataatccttctcttttttctcccctctctgcagttccagattaccaggaacaggacatcttcctctggagaaaagagactggatttggatttaggattctgggtggaaatgaaccaggggaacctgtgagtcttttgcttgtctctcttcccagcatatttttctaaggcttcaaagcaaattggcgacagtgacaaatcaccaagatttaagtccagctagatgcaacactgactctttaatcttgagtagtgtgggtttctcattgggttttgtggagctctctttgtcttgaggaagaagagactagattctttctaaaaagtttgtatgagtgtttgtgaaaggtgggagctgcctctgtagaccaccccttttcccccaagggagatgaaaacagaaagcaaaacaggaataggcatcacctaatatcacagtggcctggtccttctggccaggtcccttcactctgccagcaggtagtaggctttgtatgttgagttgctggtgtgcagagagtacttcgcaaagccttatgagacagtgattggagaatgtcagacccctgcctttacaaaacttgagaa

SEQ ID NO: 106601 - DNA, 1059 bp, Homo sapiens
gtagcaagactttctttgtaacgtgtctgtgtgtcgacgtttatgtctgtgttttctggctcactcttgtgtctttaacatccctagtgtcagtgggcatcttccttttcaacagaaaacctttaaataaatttgccatttaccactgattctcagaaggaaacgaagcttttttttttttttttccatgtggcctaaacggtgtgataagcctaaatctgttggccacaacctcccataccatgctagctcacacctaaatgagcaacagtaggcagaaacttgttacatttggtgtcactgtaggatgggcaaatgttctggtgttaaatgatgctgagaaaaatgggtctgggctggaagtctctgcagaggccctttcgttgttcccagaaaagccacacactcagcagacctaaaacagactctgccaggagcccagtgctggctggaaagcaccagtggtctatttcagtaataatcctcttgcttgagtgactcaaagacggagacacaacttgatttaatttgttgtttcattgaggctattacagcaaatatcctgtagccagctactcgaacagaaagaaaatattgttaccttagcgtgctcaagaaaatattactctcaaattgtgtttatgggagtcctgtgcagtagcttagctccatgttctgggtgttttgcagcttagcctcagcaattataataaaagcagtggatagaaagcacccatttacagccctggcactgagatagctcaagtaaaaagatcagattcaaactcctctgacttgtacttactggtcacttggtttcttctctgttggtgtattcattcactatacattttaagtttgtgggtgaatcactaaaaagggacatctcttcgccaacctaaaatctaaacatccaccttcttcttccctattccattgtacaaaactggagaagaaaagaattaaattctcaggcctgcgctttccttcagccccaaatccagttaattaaataagaaggtatgcactatagcatttgaaaatctcctttaggattca

SEQ ID NO: 106602 - DNA, 1083 bp, Homo sapiens
caaggcagcagtattagaatgaatcagtctgaattacaaatgtgttcatgaatccttttgaagggtttcaatgtttaattaaaaacaaagacgagcactgaagtcctttaaaagccatgttgcctgttttatggtttctctagaattgtgcacatcttaaaaacgacagcgatgcagtgttattagtaaatgtttaggaaaatcagatcctatccagtagcatttactacaaaagaaattataaggcttatagttgaaactttgcctgttcactatatagtttggaaagaaaaaactgaaaactgtcctattaaccaacattgtaaatctgtcctgccttggagagacatgcttacaagtttggaagtggcgattgagcttctttatcatagtgagcttaagaagcttggatatacctccagattttaagagcaattatgagtttgtatttgtgtgtttgttcagttctcggatagatccattgatctgcatctctaaatataagactattctggcttgaaatgcttagaattcacctgaacagatattagtacaagaatgaatttcatcctggacttgatacacttttgaataaatgctgtagtatagtggtagcacaaatatacttaaatttttcaaaaagcaataaggttttagacaaaccatgattgaagtaaggccattcaagaatgtgtactttagaatgtcattaaataaggagagtttaagatagtaataggagttataggaaactctcagtggtgcaattgtaaattctaccttttttacaagtaaagcactgtaaaaaaaaaaagaaagaaaaaatggaatcaaactatagtcttttaacataacagccatgacctttattgtgaaagctgaactgactgttccttatcaatcaaaactaaattaaagtgaactaagagaaagaatgtacattaagctttgcaaaattgtgaaattaatattccagctatgtcaccttcacctgcgtcgggattgagcaagggtgagagagagagagaaatcaattccacgaattttggagaatgtccgagtaaggatccgctgaaaactttt

SEQ ID NO: 106603 - DNA, 1050 bp, Homo sapiens
tggccatgctgtgcttcctttgccggccgaggtgcatgctgaaagtcgactcctctgtgacccaagcaaaatggggcagtgaggccagcatccttgtctgaggaggaaagttggtcagtccactgaatgatgctcagcagttggggggcagaggtgagcctggagtcttgctggttatcaaatgttaggagtcactcagggcttcatccttttcctcctcaagggagaaatattactgccttcttggtaccacaatgcatggaattaaataggctgttttggctacaagttcactctgctgacaaaaagcccactaatttgagcagggacttatttagtcgctggactagaaagacacccctaaagtacccctgaggcctgactaaaggaaatgaagttccatttggaatgacctcatatgcagtggatgctaaccaggaaccaggttctgtcctcattgtgtctcctcgctcactgtagtgatttcactgaagaaaaccatttaagagatatttccaaagaggagcgttttcacattccccgcgcatttctctctgagcttgtggctcgtccagtcaatggcccaacttcagttaatgttgagatattgctttattgaccgaactcctgctctcctcaatacagtacacatttatgattgagttttcctgtatgaatctttttgtgataaaatgaattgcattctgaagggctggcgggggcgtcctgggttgacaggacaattgtaaaacatccgtttaatagaaggctcttgctcaaatgccatttttaccctggtggcggcaaattttcttaagaatttgacttaatcaaatgtgtctaaaaagttttcactaggaaaaaaaaattaggaaaatatgtaatgtggccatagccagctactgtaagtactgaagttgctcaggtggcagccggactgaaatattcggggccaggcgccacggctcagtcatataatcccagcactttgggaggctgaggcgggcggatcacgaagtcaggagttggagaccagcctggccaatatgg

SEQ ID NO: 106604 - DNA, 1038 bp, Homo sapiens
aaactcatttcactgagactctcagtctaaatcacccacaaggatgttgtgtatgagaatttaaaactaaatatcacaccaaaccctgaattttaagtcagtatccaccgttttcgtatgaattcatttcccaactcttctcccttaatctgtcccctctttttttttgagatgaggtctcactttgtcatcaaggctgagtgcagtggcacagtcatagctcactgcagcctcgaacttctgggcccaagcaatctcttgccttagccttccaagtagctgggactgtaggtatgcaccaccatgcctggctaatttttatattttttgtagaggcgggagtctcaccatcttgcccaggctggtctcaagtgctcctcctatcttggcctcccaatgtgctgggattacagtcatgtgccaccacacctagctatcatcttctatttatccatctgttgctccacctacatattcatctttcatccattcattcatccattattcagaaaactagtatttagaacccattaaataacaggtttggtgtgaagcactggaaatactataataaataaggtggtcatggcacctctcttcttgcagtttgcaaacaaaccgtgtattgattgctccttgcaaaaaaaaaaagattaattgccacaaatttccaaaatgtttatgcagtcatttcatcaataagtatttattattttatgtgtgccagacccagtgccaatattggataagaattaatcagaaaacatccctgccctcatggaaatggggagggagaaataataaccacattaacaggcagatctacaaagatcctcacctcatagggattaaagtgtgatgagcattaataaagcagaaatataacatggaagcaagtacgcacataatgtaatcattccactcttaattataataacttataagtcatcataaaatgccaacacccacgattgaataagtgctgtgattgagctgtggagtactttggagttccccagcagcctaggcaacatagga

SEQ ID NO: 106605 - DNA, 1034 bp, Homo sapiens
attgtaaatttaaagtcctacatttagaattatgcattgataggttttcgaataacagagaaggctcatgtggtctgagattgtgctcagaagtacttttatcttctttggtatctaagaccagcccttgaccaagacctcacagtcattttctttcagtggctttcagtggtccctgatgactccctctctagctcctactctctctgtctctctccccctcgatatatatatatagagagagagagatctataactgtgtgtgtatgtgtgtatacatatatatacacacacacagttccctgccccttgcacactgtattacctaatccaactccaggacagtttttcagtttttattgcaacatttgccttgcgaaactgtaaggtatcccatgtgttcagtgacatgtggattagtgacacagcatttgttggaatgcttaggaggaaagcaaaatgtttccactaaaatgctgaagtcgggagacccaaatgcagaggggaatgaatatcacaatgaaaaaatgtaaattgatgacaaaaatagtacatttttcttatgcgtagatccattttgtatgtgacagacactttaggattcaccctttcaaagcctctttgtgcagtttttcttgattcattcagttagtgaggttggttggcattcccacttcctttaaacctggaggaaattaggtccagagaggtccactctctttcccagcaactcaggttttgtttgtctcagtgctgaaatggcaatgctcggcttctgcttggtttccccaacagcccagctgagctctcctacttcttccgtatttacatttaatcagtaggacaagcacaggtcctaatctatgagggttctttaataaaactatatgtatgcattcattttggggaaaagtaagcaactcttggaggatatagagatcaatgatgctcaagggattttaaaatgcaacaaaatgttctgaaatatgctgcatttatcttaaaaagcagtatagaggccgggcgtggcggct

SEQ ID NO: 106606 - DNA, 1518 bp, Homo sapiens
agttaacggttctttttctttcctttctggagagaagatgccatagttcactccacttctgactcattccatatcttttctctaagcccattaataaaaaagaaattttgttattaggtagcgtcaggaaacatttgcaagctagaaaaagctcctgcccactttgaaactgagtttttgtggccagtcaacctgttagttgtgtagctttaaagacatgcttcattgtcccaaatcagagactgatctcgttgtatttttagcatgtgtagccttgaatgaccagtgatttaggtactgagacttggagtaaaatatcagggatgtgttaagaaattgattgactgtgcatacactcttcggctatctgtagaaaagaactgtcttcccaaatgcatgtcgcagttatgagccctagataccttgaccccgttgacctagcagttgtcagtggtaggtccatgtatttcataaagctatattaaaaattttctgtaaatgcatttggtatgtatgaatggctataggattaatcttatcgtagtagactctaaaccaaaataattaaggaacctttgaatgacagcatatagtttaaaagcacaggcttggttttagaccaagtatccccagctattcacctgactgtgtgacattggccatgttacttgaccatcagtgtcttggttttctcttctgcagaatgagaagatattagtacttagagtgcaggtacgaagaataaatttatgtcaaagacaggctctgaatactttttagttatttttgcactaagctttcaacctttaggcatacttcacatgttttcaagagtagcaacaataggatcatccatatcatttcaatgacaccttctctggagtgaccatttatttctcaggaattgcatggagacaattcatccatcttacccaggtctttgagcagtccaaggtatttatgactttaggtctttcttacctgtgccaggtcaaggcttgtgactttgaggtgaaaggctctgtaagccatcaggaatcaccagctttgcaagccatttatttctactgggacatatttattagactatgtgtactgtgtaattgaagcagacttctctgtagctgtaaaaccagtacaactatgttcttaatcttcttcacaaaatgccagctgacactgccttgggagctacttatttcagacatctgaagtccaactatctctctaaattatgatggtcaaaatacttcataatgaccattattaagtccccaaaggaaagaatgtcttcatctttttggagacattgggtctgatacttatgttcttggcagctggtatcatatttgtattgaaaaattatgctacggggttatgatggtatttagccagaagaaggagaaaaaaaaaatgaaacatgttcaaactgggatcgttttttcattcctttttatggattcaattttgtgatatatagtgtttataaagtccttcagtgaaaatgtactctggttt

SEQ ID NO: 106607 - DNA, 1053 bp, Homo sapiens
ccactgtgtcatagaatagcagtcataataactatgaagctgcaacatggaccagctatgactttgtgatggagggaatccctttctttccctagcattggctgttgactccactcattcagcaacctgagtttttaattaggcttttatttttgcaatcggtatgcaaaaggggtcttggcatgatgaacctgtgtaaaagctatgttttaaaaagctttcttatagttacataaacatgaatttgttttcaaaaatcgcttggaaatagttggaattaggtctacacgctcttaggtatttttgttttttctaaatttaaaaatggcttgcattctgtgtagttacttttgccatagagaccacttaccaaaatggcagatgattgcattgaaaaaataacagcactgcccatgaattaatgggattctatgtttatatagtttgtctgcatctgcaaatcaactttcacgtagactttggtaactaaaggaggaagagaaggctgttttataacctagcactagctgccggtagcacccccgtctccccagttttaacaaccaataatgtcttcagacagggccaaatgtcctttaaagagcaaaattagatgtgcttgagaaccactgctttaaccccttcaacacccatttggttttgcttcttagaaactctgtgttctgtttgtttaggtacaaatgaaatccacttctgggttattttttgttgaatatggattgaagaaattttattggagaattccccacttcttcttagtgttgcctctgcatctcctcagtaacggagtggcagtgtagtcagctgtgagggtctccagcgtgatctctgctgtcacccagcagtgcagcctgagccagccctgggctgtgtccatgagcctccagattatcatctgaagtatgggtaggactgcacccttctcagcactgtcatgacgatggaataagaagagggcctgttacaccttcagcgctgccctgttctgatgaagagtttcttattttctggccccttgctctgtcatattga

SEQ ID NO: 106608 - DNA, 1059 bp, Homo sapiens
gggttagtctgtgtaaactgtgcagaagatggaactagatttgatcattctttttccctctaaaagcaaactattgaaatttctatttatttgaggctttcctatttaatttcatagtcctagtagtaatagccacaagcctctttccatttgacccattcttgttcttcatgaaggactgaggatattgtttgtgcacagttctgaaataaggagaaaatagtactcacaatctagttagggaggcaagactaacaagtgagctttaccgtcagtaatatgtagtctgagtctgtgccatacatatttggataataggtgaatggtggggtacggaggatggacaacagtctgctggaactggagcagagtgccccagcctccacagtttgtcattttgggccagacagttatctgttgcgggaactcctcctgtgcattgtaggatgtttaacagcatccctggtctctactgagtaggtacctgtcacatacctgccccctttctccaacggtgacagtcaaaaacatctccagacaatgacagatgtcccctaaggggcaaaatcgccctctgctaagaacagctggactaaagcagtgctttgaaatataggaaggatttaaagttaccaactggtccatgggcagtatttgacatgactcatcatgtattttttaatcagtcttaaaaaaaatattttcagatctgaatgcatttagctggagccaacaattccagcttccccctggcctgctgtttcttacatctgtccttactcttgcccattgtgtgcctgtggcccacaaatcacctgagtttgagacccaaagacagcatacacaaaaacatcaagaaaggcaatgatatcatacatgaatgtgcaggcctgttgtggatccatttcctaggactttcttttcaccatcatctcaaaatcccagtaactggcaacttttcttttctttttggtttaatttatgctttaaaaaaaaaaaagaaaccatatatcatcagacatttccccccttaactttggagtttgtttcctaccctta

SEQ ID NO: 106609 - DNA, 2145 bp, Homo sapiens
ttaagcaagctttacttatttaacatttgtatgcaactcagactttattggatgatttgagttttatttctgttatattcacaatgcaaagtggttggcacacctaaaacttttacttttgttctacaaagcaatgtctcattctccttgaaggtaaacttaatgcattgagttacttacttatatgcattatttattacaaatgtgttcgtgtgtgatttatagttctcattaaggtgtggtgtcatcccttcccctttctggaagagtggtagaatttcattcccttggctggcaggctgtagaattattgttctgtgcttttatttaagtgtggaatttgaatataaagaagttgctttgttgtctctttttgggggacaaattcattaacatcacgtgcctgtcatcgtctaggcactgggaatagagcagcgtcatctgcaaatgaaacaaacaggctcctgatttcatgaggcatttattctaggggaaggggagaaagggcaaaaataaacaaatgaacaaaatcatgccagccaaagaaaagtgctgtgaagcaaatcagagcaggtaaagtgaacaggtgtggcaggcctggcagtgagggggctcttgtagattagaggtgaaacttgagtgaccacagagaaggaaacggtattccagcaggaagggacagttagtgcaaagaccctaagaaagaattggaacagagacctgtgtgcctggagaaaggggagcaggggatggggatggctgaagtcagagactggaggccaggacctggagttcgaattccatttgcagtgtgaggtccagattcacacggtgaagggacaggctctcagtaacgtgttcagatagtccctgtggcatatatatgaagaatgtattttaggggaacaggaggggaaggggagacctgtgagggcttttgcagtagttcaagcaagagtgttagcaacttggactgtagggcagacagaggatcacggcagtgggggacttgggacacctaaagaatagtcagcaggactccacaggttgactgtaaagtggggggacacactttttctataaagagacaaagggtagacatgttaggctttgtgggccctacagtctctgtccccactactctactctgcccttgtagcaggcgatatgtaaaggaacgggttggttgtgttccaagaaaactgtatgtgtcccatgggctgtatttgctgaccccaactgaaggaaaggaaaagggagggagccaaaatgaccccagaatttttgacctgggaggaatctttgctgagatgtggatcctagggtagaaacaggtaggacttgagctgtaaaatcaagggtttcttctcacacttgttaattgtgaaagcccatttgacatccaaatgaaacagaaatgtaggcagttgtctggaatctggggtttggtggttgtgaggttaggtcaggaaaaatacgcatttatgagccattattgtctcaatgagtattctataaactgtgggctgtgacctattactgggctgtgaaatcaatgtattgggctacacccagtgtttttcttggaagtgaaacagaaaacattagagtgtatcacactcactgaagataagtccttttttatgaaatatttactgtgtgtgtatacccacgcatgcatacatgcatacacacacacacacatttcataaaatgggaaatacaatttgtaacacattcatacacttgtgtgtgtgtgtgtgtgtgtgtgtatgaatgtgttataaaatgtatttcccattgtggaacatagtcacataagtttgtaaaagatagaatcagaggttatttagagccatggggctgaatgagattactgagggaaagagcaggaaggagggagaaaaagtgcaagacagaaccctgaggcacatcaccattcaagggtcagactgagcaggaggccccagtaaagatggagccgccagcgcagatagaagaaagaacaggaaagcgttgtatcacagaacccaagagaagacagtgtcacaagaccattgtagcagcactcatgggtcaagaggtggaggcctgcaggggtgaaaacactgcctgtggcataacgtcccctgagggcaggaccca

SEQ ID NO: 106610 - DNA, 2013 bp, Homo sapiens
tggaccttgaactctgccgaggttatccattgccttttgatccagatgaccccaatacaagtttagtgacctcggtagccattttggataaagaaccaattattgtgaatgggcaagagacctatgattcaccagctagccacagtagtaaaacaggcaaagtcaatggcatgaaggatgccaggccaagcagcccagcggacgtggcttcaaatagttctcatggttatcctaatgacactgtttctttggcttcctccatagccactcagccagaactcataactgttcatattgtcaaagggccaatgggctttggttttactatcgcagacagtcctggtgggggtggccaaagagtgaaacagattgttgacagcccaaggtgccgaggcctgaaagaaggggatctcatagtggaagttaataagaagaacgtgcaggccctaactcacaaccaagtggtggatatgctggttgagtgtcctaagggaagtgaggtcacattgttggtgcaacgaggaggtaagtagggttgttttgttctttgaattttttttttatcccaaattcattgcttaacttactcatcttcagatgaccactgggggctttttaaatttatttaaatgtttcaaaatgcctactgatttctccaaatactaacctctttagcataaaaattgtggtttatacattatgacagacatatgcagttagaatgataccttaaaacagaaatcagattttgcctttttaaaatgttaagatttaaaaacctaagttgggtgtggtggtacccacctgtagtcctggctgcttgagaggctgaggcaggaagatcacttgagcccaggcatttgagtccagactgggcaacatattgagaccccattctctaaaaagtttttttatatatatataaaaaataataacctttatcctttaaatctcctgaacttggcctgcatagcctgcaaaatgtggctatggtcactccaaacttgtctcatgttcctctcctccatctgatggtgctttagccacactggctgcttttatggagctcctttaatgcttcaagccttttcttgcctcaggccctttgtatttactgtccgttctgcctggaatggtcctttcccagctcttcccagctggctcagtcccattcaggtctccttatgagagagggcttctcccatcactttatctaaagtagctcccaacacttccatataatctttatcacagtttttcataaccttgatcatcatcacctttttagcacaagacgttatttcatgcttttatttatttttcattatttgtctttcattagaatataaagctccataaagccagggcccatgtgtgcatgtggacagctgttatccccagcatttaacacaacacctgactccttttaggtatttatgaatgaataggtattaagtgaataggtatgtgattatttctatttggcagaaacaagaggtctgctaatcatattaaacacttccctccacatgctcgcgtttagtagtttaggatctcagagatctgggttattctaaatctcgaggcattaagcttcctcctttctccttgagtccgtatcccaccctctgcctcaccagaaaacacaggacgtcacactgagcaatactttccaccatattgaagtgtcttgctcctggaatatatacttatatgtgattagtcgtgactgatagttttacacagtgggcctgagaatggctgtttccctgatccttgctaccatgatttgtttcatgaacaacatattcaggccttttgaaaagagatcaagaaccagactttgacttccttttggtttgttgcaacaggagagctcatttgtgtcacagcagccagattctcatgttttcatgaacctgtgtgttctgcgatcagaatggctggggtcatttgaaggaaacccaaaatacagagtagctgtctatgtgaattgaaatgctcaatgagcct

SEQ ID NO: 106611 - DNA, 1119 bp, Homo sapiens
agcgatacctctatctgtaaatttattttatttttattatttttttgagacagagttttgctcttgttgcccaggctggagtgcaatggcgcaatctcagctcactgcaacctctacctcctggattcaagtgattgtcctgcctcagcctcccaagtagctgggattacaggcatccaccacctcatctggctaatttttgtattttttttttttagtagagacaggatttcactatgttggccaggttggttttgaactcctgacctcagtgctccacctgactcagcctcccaaagtgctaggattacaggcatgagccaccacacccccagcctaatttattttaaataagacagctgaatttggagctgtgtggctactgttagtaactacttagtttagggattttgtgtgtgtgtgttgtggggggggtttctttgtttgtttttttggtttgtgttttttaaacaaatatcctaaacttgttttaaacagtaattcttagccctaggcatgcgttggctatatcacaaatttaataaaagatcagataaataggaaaaaatcagttgaatttagaattcaattcaaagtaatgacccttaattttgaaaatagtcattctacatttttgtcaaattattatttgtgactataatatgttttctggtattatctgtgcattttcagcctggattttccgtttgattagttctgttggtttttcaagtggaagccaggcccaaagcagcacatcagaagccatatagcaaaataaaattaaaacaaaacaaaagacataaaacagaccagttccattttctgtgaaggggtttgtggcagctcaattcctgtcaaagtgcatgaatggaaaccaagaagtgtgtcacctgacagggactagtttcatccctctcttgtagtttcttttggaccctggagttgacatactcaatgctttacctccctccatcaacactggggcctaggaacatccttattcctcaaattaagagaggactttcttaagatgctatatgcccaaaggctctagggcataagcgtgaagaattatctatatgttgtctcaaatcttgtttaattctccttttcacc

SEQ ID NO: 106612 - DNA, 1143 bp, Homo sapiens
agatcgagtgtccaatgagggtccacttcgtggtttatagacggccattttctcactgtatcctcatgtggtgcagagtagagagagaaagtactagttctcttcctcttgtaagaattagcccatcatgtgggctccactctcatggtataatcacctcccaaaggccccacttccaaataccattcaatagtgtctgaaggttcaggctcactgaactctccttgagattgactcgtttattcttaccacccttctactgtgtagtctctctgttgatccacacgtttcaagcacttttataatctttggaatataactgataccaaagaaaccagttaaaatccataccatttggctccaagctgtgatttcaataaacattaacctagactttagcctcattggttataactctgggttacctgcctaccggttaagtgtcttgattagccatctagtgtctagtgtcttgtatcttgggcagtatctagtgttgatagactgtcaggaagaagccatatagctaatttggttagattgtttggtagtaattttgccaagttcacaggccaactaaattctcccctgatcaagagtgtacttctaatcttagcaagtgataatttggagatttgctcttatgaaaactctccagcttcaagcttatgcttggagagagatttttgcagctacccctccaccacactcactctatcaccaccgccatcaaaacaataactcacttattgagctcttattatgtgccaggtaccttcccaggcactttacctacattatctgccatggttgtttctcacaactatcatgtgaaataggtatcatcattacctccatttatacttgtgatactcaggcagagaggtttagtaacttgcccaaggccatatagccactaagtagcagagcacagatttgaacactatacatgaggaatagtttaacttctgtttgaaaggtttttggttgttttagtttttgtgggatacctcatttgtgtagtctaaatctatgctgttcggtatggaagccaatggttacatgttgccatttaaatttaaatgaattacagttaaaaaatcaaaaaattaagtttttctgtctcactagccatatttcaag

SEQ ID NO: 106613 - DNA, 1048 bp, Homo sapiens
ggaggaaatttcttgcccccgcagtatttgcattgcaactggtagctaaatccaaaccacttttagcatttttactttaagtggagttactgggcatgaaactaacttttaattttaggaacattacatgtaaagaatcagaaagagctggtagttttgggtgcttttaaaaattacagactaattcatgctctttgtaaaaatatgggcaattcgggagtatagaacattaaattctcccctggttgcccccttcccattctcagagataagccctgtgcagaaattttctagggatatagatatacgcatattttaacaaaaatctgataataatttatacgtatatagtatgtatgtgagacctgttttctcactttttatttcttgcacatattactaagttggctaatatagatttagcttatactttttaatggtgacgtaatattccatttcatgaatgcctctgctttatttagccatttgtttattactagatactctggctttccccagtttttcattgtgatcttttagaatcataggcttaatactcccatcaatataatatgtgaatatcaaatagaatatcaagtataatgcttctgttactataatattgaatataacaaatgtaaaccatagactacaggttggcaaactttttctctaaacagccagataataaagattttaggcttcgtgatttaaacagtcaatctctgttagaactactcacctcagccattgtagtatgcaaatagctgtagacattatgtaaatgaataggtgtagctgtgttcaaataaaactttatgggcactgtaatttcaacttcatgtaattttcatatgtcacaaagtattctcctttttattacttttcaaccatttgagaataaaagttattcttggctcacaggctgtatccaaacaggaattggccccagtttggctagtgggccatagtttgccaaccactgccctggactgtacaatttagagagagtaggtatgtatgtctgtgtacattcacccattgaaat

SEQ ID NO: 106614 - DNA, 1053 bp, Homo sapiens
aaaggggggaaaacctgtctctttgtttgcaaacaagtaacatgtggagcaaaaactatgaaattaatgtctcttgatgtgcagccaaatctgaacaaaacataaactttgagtaattagcctgtatgtgtttgtgtgcatgtgcatgcctctacctcagtctggaactgtttgtggtatatgtaagccttctgccctgatgacatcattatttaaattagtgaccacatgattccttgaattaaacaaaaatctatttcaaatatttcaagtttgtagtattctatcaaagttggtcttaatagctacttctaggactaattattcactttagagtgtggtgttacataagtttgccttgactacgtgtatcagggaagctttaaaattaagttgaataactgttgttctgcctgaaaggattgtttaatgacaaaaaaaacccacaacctagtcccttctttcaccaagtaaaataatatggtgcagtgggcctttccacaacagattcttgttcagacagaactattacctgtttaataaagttttggcctttgatatgaaaccttaggaagttctgtagagcatggttgagttttcagaaaggcacatacatcccccagtgccattgtaccaccacatttaaagaaataaaatcatccgccttagatagtgagctcttagggatcaggagctgtgttactgctttcacaggttaagtgctgagaaagatgggccagcccagagatagcaattgagtgatagttgtgtgcagttcaaaaacccaactgcattttcattaggaacaaggagaagataacatgcagattttattttatttcaaggagagcaaaacaacactattgtactgaaaatgaaacattaattttcatccatttttgcttgtgtaataagatggcctaggaacaaaatgagaaaaccgtaaacatttaagataggaactaggcattcaaggcaagtttaacctatattttcactaaaatctaatttaatagtgatttagaataaaggctgcattttgttaagttttat

SEQ ID NO: 106615 - DNA, 1210 bp, Homo sapiens
gaacagagactagaacgagagttagcaaattggtaatgggtagtcttgtaaagtgaggattgggaaagaaccgaagagatgctcgctgtgtcccttgaactttggcataacctgtctcagtcttatttctttatttgtttagtacggatggttatttgggtaatacaaaaaagccaagcaggacaaacaaaaatcaattaagactagtttaaggaacattataggagcacttgcaataaaagaaggtcactgaggaattgaatagttaagtcttaggattgtgttgttattacgtcccagaccacgtgttgttgaccttgccattgtagtgagtggttgtttatatagtgatgcagcatctgtatgtactgtttgccttagagttgtgtcaatgcaaatcaagtcttgactactctagttattgttgtttaggaataatttatactagcagatgatgccaaattcttgtttctttgctattggaatatattgaattacgtttgctattacgttcagtcctttatgttcaaccttgaacaacattaaaattagtttgcattccgtctgatacatttgctgatggatacataggaaagcataagtttcagctaaattgctgatgaaagcctcggctgatggaagattctttagcaattgaagattgtttaagtagaagattgtttaacatcagtatgagtggaactgtactaagattattgaatctgcctggcatttttgagattgcctaaagacctgaaaatataagtctatttagtatagattattgcattcatttggttttctttatttttgttacgtgagataaagataatcagtcatggttggctagaattatgatagaatagaaccaagctctgtttttcttaacatttggaacctgtctgttgtaattgatgcacatgccaacaatggtcaataactattgatggatctatttttaaagatgtttaataagttgtctttgtggtcattgtgagagggatgacttaaggttcaccctgaatgatagaacaatttgaaactaatttgatcaaaaaaagaatttgtcaatccaatgatattagataaagtaaatgaaagagacagaaataggttttccagacacaaaatgagtgtcttaatcatttgttcagccaatttcaaccactcttgctacctaagtaataggtgtgacagatcactctgctgt

SEQ ID NO: 106616 - DNA, 1265 bp, Homo sapiens
tatgaaaatgcttgttaatacaatattataagtgatagaatactgcaatagcttttactgagaaaaactgtacatagagtgaaagtattgaatggaattggcatttttgttaccaaatctagtaatttttaattcttaaaattcttatctttttgtgttaatgttatttcctttggaacaagaatgtattcataccaaatgcagttagtttataattatctctttaatattagaattcatatattctgtttctagtagaaattctatgtatatctgtgtgcctgtacacacaaacagtataaatatataatcagattatggtaagtatcagtttgcattttctgttgccagttaacgcaaagctgccttgttattatttataacacaaagcagaaaaacatattggttgcaaatattgtccctgtatttctttctgttctctgtaggtcatacatatgaggtgtaacagtatagcatcatacttaattattataaagatttaatatgttctatttcctatctcagaaaatcgagaaactggtttgagattttgatgttagtgaatgactccttctgtcactgctgtgtccagttcagttagaagccctcagtgttgcctttgaactccagaccaatattgtaatccatgtgattgataatgtcaacgattgtctcaaagatacttcgacttagtcgtattaaaaccattaaaactgatgatctttccccccaaattacgtaatatacaaagtgtttcctgtctccattcatggtaaatttatgcatactcaaaattcccccttgatatgtcacttttcttcacacctatttctaacccgtgaaccagctgaattcagttggcatcctaaatatctcttggatccattcactatttttttcaccgcatcttccattctcatctgggatcatgctcatctcccatacagactcttttcactctcctttttatgttgtactcggagaaatcttttaaaatgtaaatgtgatgatgttatcgctgacaacctccacagggtctgcttaggaaatgccaggtccatagcttgctactctgagccctgtgtggtcagcctctctaggttttctcacactatttctctgctctctgctcttcatccccactagtcctcattgagttcctgcctcatgtcagttaaatgtgcatttctctcttagaatacgcttacatttcactatactcttatatttcacaatagttattgaataatttctgtatgtcacgt

SEQ ID NO: 106617 - DNA, 1023 bp, Homo sapiens
tttcacctctcctttcctctgtgtggacttaattctctggcaggtcatgtcaagctttgtcaagatggctccagcacctgcagcatgagaacctattagcaaacaggctccagcctcaagcgaccacctctggcttcatggttccagtaaatcttccatgtctgacattcaaatttgtttgccttagatcatgtacctattcctgacctaataacaaagacaaaaatgatagaatactcctgattggcaaggagtatgatgtagagccaggagtaggtcccgtcctggaccatgtggacctggagtggggaggggcaccacaaggatacctgagtggtgctagcaggagaagagcaaatagatgcagggctgggaatacctacaggcagcctcctcaagggtggtagattattggtggtggtggtgttagtttagtaggcttggcatgtcttccatccagctttcagattacctttactctcatgtgtgtcattgggagcttctcatcagagaaagctttgaaaacagccttttatcattcttcactctgtttttgctaaatcagaaatgtctacagaattactgtgggagatagaaattcactacataccctgattattcagttttaaagccctgtggagattgacatttaatatcatcggcctctataaaaattcaaccagaatgtcaataatgccattcggggatactttgatgacatcacccctgatgtttctagttaataagaaggcaaggagactcaagtatttcgagccttcttttaagactcaagtcatatcagtccacccacatgatactgttctgggggtaactcttggttttcacaggaacataactttttcaaaagaggttccaatctgactcactggtatagctctctccatattctaaacttttgtatacgtttcagcttaattaaccattctttgatctttgccagtgtctaccaaaaatatttatacaaatataaaaataacttataaaatcgtttatacaagagtg

SEQ ID NO: 106618 - DNA, 1046 bp, Homo sapiens
taaagaagacaagaataagcacatctttccaacttggcccaacttcctaattgtggcactgagcttatttatttgatatggtgcttaaaataaatcagctgaaccatttcccttttcccttgcttttctttttttttctgttgacatttttgctctgcaagacaggtcactgcctcagccagcccttgggacttctctaggagagagtttacaagggatgaactattcagtggagggtggggatccagacatggctgttttacaaatgcctctgggtagaagaggctgattatacactttgagcattgcaaaggttttccttcagcatagaagtgcagtgccagggtgacatttcaaattggagttatgggttgcatatttctgcatgttaattaggaagaggatgtcagcattcaataatgttattgttttgcttcctagaaggtctgcaaaaaggcagctgccaatggtataatttttggggacacagagataaaataggggtgaagagagttcttgtttctggttaaagaaagcgagactgtctagagtcctgttctttggcaggccttagaagcagtctgttgtgatgagctctgttggcaaactctgtcgtagaatgttctctgttgataatgaaagtgaccaaatgaaatctgtgctataattggctgttcttctgcttatgaagatggggggagctggcgaagttttctttaattccctgcttagagatccccaaatattcctggagttaaaagtgtagatgtcagagacagactaatctgtatttaaatgccagtcatcatctttgacttgtgtaaatatcagtttctttatgtgaaaatgggaatattgatgcctttttttctctaagattgtttataaagattagagtaagtgaatatatgcgtagtgacacttaatatgtgcacgataaaggtaactttaaaaaatgttgttctttgaatatgtgttgtgataatacactcttttacacattaaccctattatctatctacaacatcaggcctgattggagactg

SEQ ID NO: 106619 - DNA, 1019 bp, Homo sapiens
gtgagactcagtgctcttatggtagcatcccaagttcggcaagctgtggaaatgccagtgttaagggctgggtctttgcttcctaaaaggagccactggtgtgacaaaggagctgttgctcatcctctgcaatctcagcctaaaagcagtgatttaggttggctgtttgagaagtcaagacaatcaccaatggaagaagagaagatacgtgaatcttagccttcctaaaatatcataaccattctagagttttttaaagcctgctttctttgctttatatgtatctttcaggcctggaattaaggacttaatattcttttttcctttctcactcctgcctgctggtggcctttgaaggtcccaggagttactgttaatgattgatggcaaaactgggcgctaacagctgtgggttggatgaccgtttaattttttaactattagaggattgtaggaatgtttaatcaccaagttacccacaatgtcagttgagggaatgctcccatcatagcactgaaagagtcaggcctgtaaaaggtagcctagaaatccccctcttggttgttcttgtatttaaagtgatgagaaggtgggttaaatacagtggtctgggcatgtgaggagagaattgggcttttcactttataagcaattgcaggtatgtccaatgtgttattaaggtaattgaactgcatttccataaagaggatagtttcattaccaaattctttctttaatactgtcataatggcagctgtagcacatataaactaatttgcatgcagataaagaattctgggcagcttggtagcataattgctgcataacatacgttgcaagtaagagctggagcttttactagaggtatgcttgtgggacccatctctctgactttgttaaatttcaaatgaaatacaatcaaggaatagccatttcagtgacgccccatttgttttacaggcagtaacttcccaagttaccttaatttgagcagtcattttggcaaaaaatggcaaaga

SEQ ID NO: 106620 - DNA, 1933 bp, Homo sapiens
gaaggtgggagagggtcaagatcagctaatgatggagaaagagagggaaaggccttaaccaggcaagtatagcaaaggcttactactgcagaaatgagctactgtgtgtatattatatttatgtatatatgtgtatatattatatgtgtatatacatttttatgtgtgttatgtctgtatccatatattatctatgtgtgtgtatacataggtaaaatctatttcactcctaggtatgtactcataagaattgaaaagatttttaaatagaaactcatacatgaatgttcataactgcacataattcacagtagccaaaagttggaaacaacttaaatgtccatcaactgatgaatagataaacaaagcgtggtatatccatgtgagagaatacaactgctcagccatgaaaaggaattaagtaccgatacatgccacattacatgccttgaaaacgtttcactataagaaacatcacactgcaggaagacaggcacaaatgggtacatattgtatcattccatttgtatgaaatatccagaataagcaaattcatagtagttgccaggaacttgggggagaggagaacagggaattaatgcttaatgggtatggagtttctgtttgtggtgatgaaatgttccagaactagatagtgatgatggttggacaacattatgaatgtactgtcactgaattatacaatttaaaattgctcaaatgatgacttttatgctaagtgtattttaccaaaatgtgaaaagtatctactcaaaatctctttcttttaacctgggagcagaaagtccaagcctttttttttttattttaaaaaaagaatatttaccaattaggcattacttaatgacaatattttgtttttgttttttgttggttggttggttggttttgaaacagggtctccatctgttgcccaggctggagtgcagtggtgcagtctcagctcactgtaacctctgctttcagggttccagtgattctctcacctcagcttctgagtagctgagactagagatgtgtgccacaatgcttggctaatttttaaatttttttgtagggacaagttctcactctattgtccaggctggtctcaaacttctgggctcaagcaatcctcctgtcttggcctcccaaagtgttaggattccaggtgtgagccactacgcctgactccatagtattttgaatggtaaaataatgttttggtacaggggccagtttttaccttgagaagaggggaaatattgggagttgacatttgctgagcatttgttctctgctacacatcctgcaaagtgcttaactcttatagattatcaaattgaaatgatcacaacagccctttgtgataggtgatattttcttcacattacaggttcagaaattgagatgcagatggttctgtgacccgccttttatcttactaaagagaggtataagttcattggagtttccactccatggggacagacactacatctccttatatatccatggtgactttaggccctagtccctgtcctgccatggtgtatctattgaatctcttccatgaatgaatgaaggacttcggctatgtaaagtagcaccatgtttgacagcaatttcgctgtgttgaaaatcttagttttgagaaacgcttagataaattttgcaatattggatgaattttgcaatgttatatcaatttgtgacagttgacgtggagtgaaagaaaagcgaggtaaaaataaagtgcttctgttagttttcagtctaaatttcagaacacctttttcaaggtgtttcagtttttttcttgatgtaaatgatagcagtggagcaaggagaaattaaaaagccattttttgttaacttatgatactcttaaaatctttgtagtctttcacccaactgaaaaaaagcagtctgt

SEQ ID NO: 106621 - DNA, 1051 bp, Homo sapiens
ccaaaataaatataaaatgccaggaagtgatatatgctgttatgtaaaataatgaatcagggtgagggggatagagaataaaggggtttgatgtaattttagatagagtagtccaggaaggcatgtataaactgagaagtctctctcctattggttgtgattactgatctcgaatatttcttttagcttagaagttactgaacataacatatagcataagttgttatagcataagttgctgttgtatgtggtttgtgactttccctttgagcccatcttgatgttaagcactttccatatgttgtttaatattcccattgatcttatgagaaagctcttaagcctttgctgtggaagtgagtgtaggggaagtgagagaggttaccttacttgcctgagttcaggtagtaagtggcagagctgatcctgaaatccaaactttgtttaaagcccctggaaacctatcattagcaaggactgagaagcctagggttagtgctctcccaggttcctgaggctaagaaggaaaatgcacttgtggtgaaaactactgtggtgaaaggttaattagaaagcattggtatgtaaactgtatttatattgacgacagactgcttttgtttccagaaagtgggtaaaggcacaggcctctcttcatatgctaaatagttgccacagtctgctagagtgcccaggaaaccagctccctttgtgtctaggaatagtgtggaaagcctggccaggcttttgatccaagtatatttccttgcaccctcctcattgagcacttctgctttggccatgatcacaaatgaggatacaggttaaaaggacacaggcatcttttttgtttgttcttggtcccagagaacacggtatccatttcagatggttgcttggcaatattgtgcagaagaggttttctctttgacagtagctgatatgtgtttctggttgacagtagttggtgtgtctttttgatggtagttggtatgtgtctgtttgacagtagttggtatgtgtgtttgtttgatgtagttggtacatgttt

SEQ ID NO: 106622 - DNA, 1052 bp, Homo sapiens
tgtttaattttctcgccatggctaagtgcctgcaagcttttgatgggatcatcacatttttttgaggggaagggtgtctactagatggaattcctataaaataaatggtgcatcatcctgcctgtagagattgctcatgagggaggcctctcgagaagtcttcatggacctctgacaccttagatcaagcttggtccttcttaggaactctgtagatgcttaagaatgaatagatggctagaatatgagtcatctaagaatttataatttcatcacaataaaggcctgtctgaaagtaaggaagttttacttcactatgggtacttcctggcctttgacacacatcttatgtacaattccactattctgacctcttgtaattaggtcttttaaggaagtagtctccaaagtgagaaatgacccatgagaatacaggaagaagtcctcaggagttccatgtatatacatttttaaaatgttacctttttaatatcatatatacaccacatgttactggtatgccatctctctctctctctctttggctgaaccatcaaaagtaagtggctgacattatgccacttcacctttgcccccattttccatttctcaagtttcttttaagttactctattttgggataggtgttaaattttttgctttctcatgggtttgtcagaagtgacgcattatgaggggatgcgtattttaagagttgtgtctgaagttttcatatgtgtccatttctaagatttaggtcttaatttccgtcatctctaaccattttggtaaactgaaactaatgtacaagtttccgttgcagcccgcccctttccaaagatatagatcctcctgcactagatgagattgatataaatgacagtgatggtgaagatattagcaaatggtaacatgcatgtggctgtttatatttataaatcacactcacatgtattacttaatctacaaaataaccccatcaggtttgcattatgtttgttttcagaaataaccctaatcatactacctgcctctgaatatttctgacagct

SEQ ID NO: 106623 - DNA, 1362 bp, Homo sapiens
tggtggtccccagtgcagggagaggggatggtagggtgcctaggccttcttgcgagctgtgtgccaactgcccctcttgtccctcattgggatgcttcatctgtgggcggaaggctcctctgaggtggtgagagcctcatttcacctgggatgcccccaataccccatggctctagtttctgtggcttccctgctcactcacaggaaatgtaacttctggcaatcaggcctgtctgccatgagcagagcttcttcctccagagcaaagcgtattcacatcagactgaatgggttccagtctgcagagctggttattgctggttattgccgcagggttgcaggaggttattggagacctttgcttgaggagctctgggatggtagttttggagttcctcaattacttcatttactcctcatttgaacattgttcttaacttttcttcattgttctaagctcccaatgaacttcatagttgaccttttttctcaacatgtggtatgtttgaactccaggctctgccctgagtctgggatagaacatacctgattgtaattctgttatggagtgaatatgggcaaataaccatagttgcaagctgtatggagtacctaaacatagggcaaacactgctatcagctcttcatatatatattcctcttcaatacactcagccaccaagaatatcattcccactaaacagataaacagaagtgggatttgtccagtgcacacagctaccatgtgactgtgctcggatttgaatctaggcagtagccctccagagctcctgcttttaaccctgcttctttgcagaaagtgggcagtacaacttctccatggtttcattctggggtaccttgaggtgacaaaaaagaatacccagatgtggagtaggtagatgtgggttgaataatggatcccacatttataaaaatcataaggtaacctgtataaatcctacgtgatatgttatactctggtaatagatataaaatgccatctcataatttataagcagatattatcagatgtatttagaagttaacaatagtgtcataccctttatagagattttaaagcagaggctgtctacgctgacattcagctctatcgcttaggggttgaattaacgtggcaaagtatctaagccactgtaagagtcagctttcctatccttacattgagttattttgcataagagatgcgcttaaaacagcacagagcctggcacacattttaggtgctcaagaaatcttggggttattgttttataagtcagcatggactcttgtattggttatgtatttattttgtaagatggattgatgtaacagtggttcagcattactccttcagct

SEQ ID NO: 106624 - DNA, 1046 bp, Homo sapiens
gcagagaccaacagctgatcattcttacattctaggcaagaaacatgttaagtgaatgcctagtttccatcaggctctgtatcaagcgtgtttggttttttgtttgtttgttttgttttgagacagggtcttgctctctcaggctggtgtgcagtggcatgaacatggctcactgtagcctcaacctctgggctcaagcgattctcctgcctcagcctcacaagtagctgggaccacaggcacgcatcactatgcctggcaattttcttttatttttttgtagagacggggtctcaccttgttgcccagcctggtcttgaccttggctcaagtgttcctccagccttggccttgcaaattgctgagattacaggcatgagccaccataccaggctgggtgttcatatttttttaaatggcaccacctctcacctatcaaagatctactgtgttcaagcagtgttctaggcatgtgctacgtaccaggcattggacataggagctcacctccccatccactcccatgagcaaaaggcagagaacaggagccatatcctgtccctaatgtgaggagatatgacaagagcagatgaatttgacatggcagtagtggacaggataagacttataaagcatggcctcatagctattctgaggcagaaaggaatccggaaaatactatgttaaccatgatattagggattattgtcttgttttgttcatagctgattccccagcctctggaagggcctagcatgggtgggcctttaaaatacttttgttgaaaaaattgaatgagtaaatcaccatttaaaaaaaccttttaatttcgaaataatttagacttagagaaaagttacaaaaattgtatggcgtgttcccatttattctcctctcagctttccctaatgttgacatcttacataaccatggtatcatgatcaaaatcaggaaattaacattggctattaactaatccatgtactattaacatgtacagtactattacctaaaccatgactatttggagttcaccattttcccct

SEQ ID NO: 106625 - DNA, 1040 bp, Homo sapiens
attatttctaaaactccttttcagcttgtgcatctcaagattctgagtcttttctagaagaaaccagaacttcatacttaatctgtctcatgtctcttgtattttcagggtgttcatagaccccctaagcttgttcctgaacacttcaggatcctttgagttcaagttaagcacctccttgaattttgcttcttgtgtttagatttttctgagtggtgggtttcgttccttaaggctcaagcctttgcaaataatcccctccttagtcctgttagagttcttagtaccatttgccccagccatagattgggtgtcctgttgttaagggtgagggagaaaatacaacaatacgggggaaacaaaagctctcaaaatactttaataaaatgagctttctgctatgaataactcatagctctgccaaatagggaagatttattgatagaaaaagaagatagctgtcacatttccaagttttcctagcagtgtttgaagatctataaaagctttttctacctggaggtacaaagtcttgacaaaaacctcaggtacagagtccattagagaaacagggaaagtaccaggtctaacgctgtctaagtgccttggacagcttgtttttatttattccctgtatatctgccatactgatagttttgtatccctaagaattactgaaggaaagatctactggcgtaaccatttttaaaaagtgggcttcgtttgtgctgatgcaaaaatttatgaatcactttctctgatgctcatattagcgaatgtagtagttcccatctggactaatcactgagcagtcttcctcccagacttccctagtgtttggagattttgccacatgtcttttgttgtttttagtgggcaccatagtagaaaacccacccacattggcctgcctcatcattgtgactttgtaccagatgggtttcacttggtggcttttctttgtcctttgcagagctgtttctttcctatgtccctcttttcctatctggagggggagaggagtgggagtagcaggaaac

SEQ ID NO: 106626 - DNA, 1654 bp, Homo sapiens
atgataataatgaatatgaatataaaggcttggcatactggtctcatacaagtaagcagtcagtaactatcaattgccagcaatatttgtcttgaatttgtaacaactcctagtaactacctaatgaatcagcaccatcatcaaccaattttactgaagagaacattgaatcttagagagcagagtaaccttacccagggttactctgctactaagtggctaagtctgggttcaaatccaggttggtctgatttgactgtttggtccactctcaaggtgtctcactcacatgtcaggtcagttcacactgggttttggcaggaagctatgtggacttctccctagggttgtttgagggatctcatggcatggcaggcagcatccctagaacaaaagaccaaagacagagcaagttggaagttttaatgtcttttatgacctcacttcaggaatcacattccatcatttctgcaacatcaggccagctctcttcatgtgggagggagactaactacactggagcttgaacacctgggggcaagaatcattgagtgtcaccttgaaagctggtgttcagttgcatactgatgttcccactgtgagttgcaagctgtccaatagtctgttgtttgttttcaaacttgcttatatcattgttactctaacaatataatttaattaaatattatataaaccaatgaaatgtaagtggggagggaaagctgatatttccctgaaaatttattggaatccattaggacaacttaataaagttctcttgcttaaaaattgtgttaaattaggtgtacgtaaagactgtaaaatataaagggaagtcataaaaaatctaaagcactcaaattggtttgcaagtgtgtttacattatcactgtgtttcaaataagcccaaattagaaatcatagacactgaattataagtatggtttatatcatgaaagatactacagatcccaaacagggaacctaggttcaaaaaaagttaatctactttaaaagatggatgcaagaatgaacactgtgtgtgttaaaataaaatgctttaaatacatatgaataattttatatgatttcttgctttgtgcaagaattaactcatcgtttactggtctcatttttgtgttggaacaagggcttttaatttatgagatgtcccacaagttctttcttacctgttaattattacaaaaggaagtttaccatattgtgttctttcaagagtcataaatcagtttggcaaattggcttgcacttgtaatcccacctccccagaaggctgagatgggaggattgctttagccgaaaagttcaaggctgcagtgagctatgatcttgccactgtactatagcctgggaaacagagatagagcttgtctctaaaaaacaaaaacaaaaaacacaacaaagaacaaagcataacaaaacaagccaagagtcctataagtcattacttttttacaatactatatttatcaattctaagatgcatagtgttctacattttaatatttcagaattcaaaatgcattctacaatgagtggcattctgtaacttaattggcagtatttcttctgccttgttgcttcataagctataattgttgcctcagatttgataaaacgtggtaagttttat

SEQ ID NO: 106627 - DNA, 1024 bp, Homo sapiens
tgcgatcgtggctcactgcagcctctgcctcctgggttcaagcaattctcctgcctcagcctccagagtagctgggattataggtgtgcaccaccacacccggctaatttttgtatttttagtagagacagggtttcaccatgttgaccaggctggtcttgaactcctaacctcaagtgatctgcctgcctcagcctcccaaagtgctgggattacagtcatgagtcaccgtgcccgaccataagcaatgtttcttaatgagagtagtgttgtccaaactgagccacactgtcatactggagaagttgaggatctgagaagtgaagtcactcaaaacactgactttaacaaccgtgaacacaaatgaccactgagttttgttttttgttttgcttttgattttcttaactactactgtcttgaaatattttctggccatgaatggtcctatgtatttctaattagtattgacatactaggtttggctatatattgtggattaacattaaggaatatgatagactattgataaaaataattattttctattggagttagcctgcacctgacataagctacagcatcagatactgaagaaaagggaatggaaaaagatgtcttaaatcatgcaccttttttctcttgctcagctgtcactagagatgtgtttcacctttaatgaattgtttgtgcccgtatatatgtgtgtgcacccgtgtgtatgctgatgtgcttgcaggcttgttttggagcctattcgtgttatctaggtttggaaagaatgaaataatcgtcacagtatctcagcagttcagctggccttgactgaaggtcgattgtttttaggtcctctgggtaagagtattcaggagatggagcccccactggctcatctctaagttgtcacctcacttggtctacaggctttggaagcatattgtgtttctgccattgatgagctggttggcagtatggggccagtaaacttattctcacacaggcatttaatgatgagaaaaaaatt

SEQ ID NO: 106628 - DNA, 1052 bp, Homo sapiens
tggagagaaacaatctgttctttggccagagtttgacccttctggaaacaaatcaaatgttcctatgatctagttgctgctttggggaaaaaaggtagtgtagtgggcatgggtttttgtaactagacaggtctgaccttgaatcctggacctgctatgggcctttgatttctctgcgtttaagatgaacataataatacttatgggacaatattgttataaggataataaggataataaaggaaaacagcatatcataaatggtaatttctactaccactactatggctgcttctacttataggatcagagaaactcaaggtctctagttcaactttgcactcaatgcctgagtcctgtctccgtgtttgacaggcagcctcttgcctctgcttaactactttgaaggatagatgtctgtgaccctgtgatgcagtctttcttcccctggagtggacagtagtaactccccagctggttattcagtttcccctcattttgtgcaatgcaatagaatgcactctggaaacattggctggctttctttccctttaacaccatttgcttgttcctagttcctggtgtttacatttactgccctcttagccttggcaaattcagctctcctcatttaaggtcatttgaccttagatcatcctctgatctcttagagtattaatttaattgtttataaaaatgagataattatagttcctttctatagggtgatattgataagatattattcttaaagtattgaggatggtacctggcacataataaatgctcagtattgtaaactagtctactctgcctcatttttgttagtcagaattaaataggatgattaccttcctcgtttttcacattattgtcctgttaaaggataatctttttctgtccctttctcctgtatacttttttctaatttgtgcatatatgcttattttttatctccacccaaagagtagaactttagttttttaatctgttatgaggttgggtatatttgccaaaactgaaaaaatgagttaaagccctcatttggtgcc

SEQ ID NO: 106629 - DNA, 1098 bp, Homo sapiens
ctcatggtatggatgtatcatcttttgtttgtttattcacccattgataggtatttggtttgtttccagtttgtctattacagattaagctgctatgaacatttgtgtgtaagtctttatatggatgtatgctttcatttctcttgagtaaatatctgtgggtggaattactgggtcacatggtcatctctctttttaagaaatctcttaaccttcccagagtgattgcatcactttatattcctgcccagcagtgtaggagagtttcacttcttccacattttcatcaatacttgctttggtcagtctttttaactttaacctttctaatagtatatcttggtacctcattatggttttaatttttatttctataatgactaatttttcatgtgctcatttgccatccatatgtcttttttgttaaagtgtttaattcaaatattttactctctttttagttggtgttttgtttggaactctatagattctgaatataagacctttttcagatatgtgatttgtacatactttttcccaatatgtgccttacgttttcatcctcttaacagtgtcttttggggaacagagatttttaactatgaagcaatacaaattaccaattgtttccttaatagattgtggttttggtgtgatatctgtttttacttaacctaaagtcacaaaagttttcttctataagttttatggttttcggttttagttttatgtctatgatccattccgagttgaagttaatttttttaaatgtgaaagtccaattgttttagtgtcacttgttgaaaagatttcctttctccacttaattgtctttgcatctttgttggtaattagttgtccatatatgtgagggcttatttcttgattctctattctgtttcactcatatactcacctttctttacaccagtacaacactgtcttgattactggagatttataatgtcttgaagttaggtactattagttttccaactttattcttcattttcaaatttgtttttgctattctaggtccttcaatattccatgtaaattttagaatcactttgtccattttgacaaaacgtatggtag

SEQ ID NO: 106630 - DNA, 1058 bp, Homo sapiens
atcaatttacaggtaagaaaagtgaagctcagagaataatcctggtggcagatacctaaatgtggtattgtgtagcaaggaatctagtagtgaaaggattcagaaaaagtcaagtttattatgacctgagcttagtcaataggaggcttcctggaatgtatgagttctgaattggctcttaaaggaaaccgttacttaaatgcaagacaaaatgcagatagcagtacaacgcccatttttcttgatttaagcaaagcaacaagatagcacagagacagcctggcaaaaagatgaagataaaaacgtatttgcctacttcagtcaggcatcatcagcatcatcaacaagacccctggatggcagagcgggttcaccatttgtattagctccagcctgttagagctggaatcttttattcaggctcagagaggaagagtgcggggattgattagcattgtctacgtaggattgacaaggatcaccactaatttcatgctaatgtgtcacacatgtcatgatattggtgtcactatattgattgttctagcaccctgagctgaattttcagagggccactgttagaattattatcaaacaggttattaatacgtgttacttgattaattagatatttagaaacaagaagcaaacagaaaaccgctaaaaatgctaagtatgcatgctctacattttataaaatctgtgtgtatatatacataaagtaattagaaaacaaaattagacaaatatctaatgactctaaaaacatctttactgaggtagaattaatatacaatatcctgtccatgcttagaatgtatgatttgataagtcttgacttgtgcatatacccataaaaccagcaccacaattaagaaaacgaacatacattagctcccccaaaaatgtccttgtgcccctttataatcactctcctctaccctgtatctcccgatttcaagacaaccagtaacatgttatctggtgctaagtttgttttatctagaattatatgtgaatgtaatcatgtggtatgtattttttttgtggcatcagga

SEQ ID NO: 106631 - DNA, 1175 bp, Homo sapiens
gaaggccaaggggcggacagcattgcatttccagtagaatcacattatttattcattcaagttacacaagtcgtgtgtgagagtgtgtgagagagagaaagagagacagagacagaccacaaacaggagcgaataaaggcaaataaaagaatgtggttgattctgcctgccttagagtctgtgcctgagccagggtgagatgagagacatggttcgactattctcagttcccagaagcctcccatggcatcagcaccttgatgagccaagtgtgagtctgctgtgtaaagacacacattttgtatacagcctggctccttaagtgtaagccatcttcttcatccagggctcacctggagaaacgtagcactgttctaacactaaaggcaaactggtggtgttgaatttagtgagagtagaatattatattttgtggatagtttaagggattcttcaaggactgttttgacagctgtgcagggccaggattggggtgacacgaggaggcactcaccaccggcacagaattgaagggagtgctagaaacctcagtaatgaggataaataatattttaatgtaatattttttaatcaaaattattttaagtgaagataggagccgtgtttgatttttcattttgcctcaggctttgatatggctcagtcctgcactgctctgattttgcctttgtttaaaactgatgttttattcataatggattctttgcattatttttattttaaaaaatattgcatgaaatattatttctttcatatgtggagggtttttttggcgtatcctttaaatttacattccaggattatgattcatttgtttcactctagtccagctctgcctgtgatatttgccttgacttctaactatagaaaccctgagtaaaatgtaactccaagggacaaaaagagcacctagggtgactgtcttcaagtagctgagttattatagagtattaagtgtgtatgtggatcgaacttaatgtgccatggtatgtgaaagactacttacatatttacttacagctatttgttgaacacttactctgtgtctggcactgttctaggcactagggttatataaactagacaaaatgtctgaatttgtggagtctacatcccaggggtaaccatacatcatctctagtcctgaagacaac

SEQ ID NO: 106632 - DNA, 2206 bp, Homo sapiens
acactcacttggaatgcatttatgagctagagaggactgggggattatgtaggccaacccatttatttaacaaaataacagtcattttacatgttgaatctaccacaggggctagtgcaatgcctgacatacactaggttccagttgtgtacactttttttcaaaagatatttatcaaacatctactatgttcctggcacttttctaagtgtcaggaatatattcaggattggaaggaaaattgttgttctcagggagtttaagattctagctggaggtcagtaagggagagttagataaggaccgcaaagtattagtaagtgagttatatggtatatctgaaaatgataatgcctgtgaatggaaaaggaaaaatagagcaaggtaaggggtattgggtatgctgatgggagatgaatggcaggtttcagtagggcttaattaggaatgtgatgtttgtgcaagagatagagtggagagtattaacttcacaaatggcaggggaagagggattccaggtaaagggaacagccagtgccaggtcactaagggaggaccatgcctaaattgtatgaatagcagcaagggggcagggacagtgtggctgggacaaagtgagcagaggaagtgaaagtactagaagatgaagttaaagcagtaatagagaatcgggtcatgtggcaacttcagcatgtacaatataggtttttgggtttttgagcagagaacttccgtggcctcatttgcctttttttttcttgtacagtaattttcctttttactggacagtaaaattctcttattcatgtacatttctgtgatctttagtaaaggttcatatacaagtcatatcgtcactacatcattccagaaaagtcctttgtgctgccccctttttgactcaacatttcaaagaatgattctggatgctctttggatatagagtgtgcctctcagactgtagggagtcaaacttggatgcagaagaccagttatgaggcttgcacagctatcaaggtgagtggtgatgggagctggcacagggtgtgtagatatttttgatgggtggtatgagaataagacaggagaaaaggatgatattaatatcctgacttttgccctaagctcagagaagggctggagtcatccgttactgagatgggacaggcttgcaggtggagcccatttgaaggggaagataattgtttaactctgggtattttgaatctaaatatctattagatatgcaagcagaggtatcaccagggaaggctgctgaattgaaatgtacacattaatgtgtggaaaccggtgtgcacactgtaagagaaacaactgacaaaaaaatctgtgattcttatagaagcgacttgtcagtcttaagcattcagaggtgcttgagtaatctgatagcccaagattggtatctgccacatatttttttttattgtccttcacttctttattcatgctttggtagaaagatatatttactttatgtgcagaaaataccacaaagttcagtacagctctaattgtcctggtgtttgcgtgacttgttaattgaaaaaaataacctgtgttaggagtaaggaagaactggttcagaggattctttttattctgcaaaagttgtttgactccaggaagaacttttggtgtttgactttgggtcactgtgtatcgatttgctcacttctgatgtctgtagctgtcattgcacttgaattgaagaagagagaactgaagagaaggttaaaattaaaagcaagatgcgagattacttggccaagaaaaaaaaaaggagaaaaaagaaaagacaaaccaaatgggatacaaaattatttatatagtctcatctcaaattagattgaaaacttgtatgtacatgtacagaatacattctggaaagtgctaacagttgttatctctgtgttgctaattgatgggagagtttgcttcattttaaatttttttcctatgttttcaggactttctcaatgaacagatacatttttctttttaaaacttgttcaggaaatgtttatttaatatggagttaagtcctggacttgggatagaccagtgaacgaggcagaaaaagtctttgccctcagagagctaatagtttcataagatcatgtgaaattgttataattttttaatcagaaaaaagatacagtaattaatgaaaaaagagtgccag

SEQ ID NO: 106633 - DNA, 1734 bp, Homo sapiens
cttgttcctaggtttctcgtccacttgaatgtgaaatctttgagtaattgctaagtaaatcaatggcttcccagctttgtgtcaaacactgcttatcgctcaggtctactgaggttgctgccagttgtgtcttggctgtttttaggatagtgggtatgttgtagtctggtttttttctttctccaagaaaccaggccaatagatatagcatctgggttcctataagctgaccctattttaaagaaattgctgactttggcagggtactgtcagagcctcaccaattccagcattggcctcctgaaaaccattgttccaactggtctctgctgagtcagctgtcagaattaggccaaagtagctcattctgtaggctgggcaatgcttgataacaaccttccatggaaaggaaaaaaattcactttaagccagtttgccttttttttttttttttttttcaagagtagatttttgaggccctgactaatggaaataggggtagagaatgtcagagtctggatgtgctgtgatgtgttaattattattttattgctatgaacttcacaccactgtcactgtggaaagttctccagattgaactgcctttcatattcttgtgatctgtttcacctttgaaagactagtagaggtcacagtctcatcttcagggagaaaatgacagagcttttcttagtatagattttcaaaacaactttcacctggtgaattagcacctaacctgaatgtgttctttagttcttcttcatttaaaacttggttagatcattcctttgagtccttaaagagccctattcttcttcagcctcattttgtacctgttcaaacactaagagctggtccatgggagtgcagtttatagtgagaaggtgattgtacttgaactttctcctgctttcaacctcctttctgttgctgttcagtttatcttttggtagtggtgttggcagagctgtttaaaaaaaaaaccttgtagttagttcccatttccctgctgtcagtaagaaatatcattcttagaatcttaggaatgtcactggaattcaacaaaatggggttctagttagagattagagaaacaaatatattatttgtgactctgagagacagggtaactctatcctggttagcagccctctcccactgtaacatagcttcattcagctgtcttgcaagacgcatgttttggtgctgagagtaatgaaagtagtgtcatcataggttagaagactttcaaaatcagttctaagatccttaaatagtgtaaatctaagagcagcaataacaacttgggagagaaggtgcttgacatctggactcacactgtccaggtcagtggtcactagccacatgtgactgttggggccattgagatacgtggtcagtgtaaagtggaccccaattttgaagacttagtatgagagataaaaggcaaaatatctcattaataattttttattgatttcatgttgaaattacagtagtttggatatattgggttagagaaaatacactattaagtgcatttcacttgtttggtttgacttatttttaacattacgtaacttaaaatcatatatgtggtttacattatgtctgtgttgcacagtgctgatggactggtgtgacaatgatacctgtaattctagaagttgtagaaggagaagtcatgtctcatgtcagcgttcatttgctgatgtggcgtatgtatctttg

SEQ ID NO: 106634 - DNA, 2750 bp, Homo sapiens
ttttttactttcagtacagtattcaataaattacatgtgatattcaacactttgttataaaataggctttgtgttagatgattttgcccagctctaggctaatgtaaatgttttgagcacgtttaagataggccagcctaagctatgatgttcagtaggttaggtgtgttcccagtaaaccagtggtttattgggacataactccaaagtgagtcgaggagcatctgtatcccaatggcattaagaaaaaagtagcaaagtcttgggcccagcaatatcttattggggaatgtcaaagatttcaaatgagcttcaaccccaacctcaaaagcaaagccctcacacagcaatagttagggatctcggggtaattcaccaggttgttcttacagtgcctcttccataatgggaaagcagcaagcctttgggaaattttagcttctcctgtgaagaaaaactgtgcatcagcttttgtgacctgttacaggctaaggagaaaccttcattcgcccataccagaagcttccctgtgccctgtttgcattttccagaatgcagaatgaagatattggagcgaactgttctgcttgccaactagtgagaaggtgttaaaaaaaaaaaatctgttacttgccaatttgaaattgttcatgttccaacattttgtcattaagaatacgtcttgtagtttgggatggctttaggcaaaattttagtatttttgtgtatctttgtatatttttgtgtatttagtattttgtgtatttagtatttttgtgtatctttgtgtttaatttctgtcattcaaatcacatttgttgaagcaaattgtattcattttgaaaattaacttgcaacaaaagttactctttttggtatgcagtgctctgagtttcagcagttgcatacaatcatgtaactaccacttcattcaaactatagaataataatactatcacccctaaaaatcagcattcctaaaattattttctactgaccatttgtagtcaatcctttccacctcctccaagcaattatatccattttctattcctaataattttgcctttttttctgaatatcatgtaagtgggataatctagtgtataaaggtattagatttagcttttctcacttaataaaatggacttaagcttcatccctgttgttgctttttttttttagacagggtctctttctgttgctcaggctagagtacagtggcatgaccatggctcactccaacctaaacctcctgggctcaagcgataccctcaccacagtcatccaagtagctgagggtacaggcatgcgccaccaacgccctgataattttttaaattttttgtacagacagggtctcactatagtgccagggctggtctcgaactcctgggctccgctgatcctcctgcttcagcctcccaaagtactgggattacaggtgtgagccactgcacccggcctgtgtttttgcttgtgtcattattttgttcctttgtattgttgcatattattccattgtatgaatatactatagtatgtgtagccattcaccagttaaagggcagtagaattgttctcatttttgggaattaagaataaagttgctaaaggagacttcaaagacagcaagagaataggttcagagggccagagagataactaaatatgtattagataggtatttgtgtcaacagtggttttcattttgctaggtagatacctagaattgagatctctgtgtagtatggcacatatatgtccaactttataagaaactgtcaagctttttccaaagtggctgtaccatttttcattttcatcagcaacatctaagagttacagaagctctgcatcttcacctgcccttggtattaaaattaaaaacattttttctttgcctttctagcagtgtggtgacatttcactgtgattttaacttgcattttcgaaatgattaaggatgttgaacatgttttcatctgcttatttgccatctgtatattttcttttgtgaagtgtctgttcaaatcctttatccacatttaaaattgggttgtttataatcatacattttaatgcattgcacaagctgtcagtcagtcctgctcaccattgatttgcctgattcttttaataccaagatgatatcttattttcagacattaagcttatgataggagttggacagatctgggtttatatcttggctctgtccttgactgtctgaatgaccctggcaaatcatttgacctctgtaaggctcagttacctcatctataaatggtcttaatgactaattgctgatgttgttaggattaaatgagtccctcacatagaacctgaaacatgataggcattcagtgaatggtagttcttattacacatcaataagtcttactgacttaggtgaatcaatttggcccgtctgcctttctcacaatggatatgaaggtccctgaatgcgggtccttgttgggttcagtttcccattatagcaccagtgtctagcacagtacctggtacaagaaagatttaaatgaactggtcgaatggataaatgaatgagataaaaatgagtactgttatacttgacttggcaagaatatcacaaatatagttttgcgaggcactatcctgaatctagaaatgtttgttgaactatatctttattacattttccatttattttagtgctgtagtcattgataatctttgtaccacacacttcaaatttatttttaggt

SEQ ID NO: 106635 - DNA, 1883 bp, Homo sapiens
ctttacatctgggcaactttccatgtcagtagatgcatgcctactttattctttctaataataattggaacctacttttgttaggttgctatgtgctagggctggctgatttagtcctcacagaaacactaagatatatttatttattcaacaagtatttatttaacaatctttatgtgctaggaactgtgttctgcctgcctggtatatatgatcaaccaaaacagatgaagatcccttatagggtttatgttctagtcaggtgaaatcaaaacagtacatgtaatagttgagtgaatcatttcgtatattagaaggtgggacattatacgagggaaaaagcagagcagagtaagggggttgagtgtggagattgggcatgttgcagtttttaaatagagttttcaaggtgtcaagggtcgacctcactggaaaagtaacatataagcacaaacctgaatgcatgagggaaggagccatgtgcataactgggtaaaagccaatccattgcaaaggccctgtggcagaagtggtacctgcattttcagaggaacagcaaggaggccggagtggcagaaatagagtgaacaagggttagaactatgggaggagaggtcagagtataaggaagaatgacagattatgctagacattttagaccctaaccaaccacgccacccagaatgaaataggagccattgcagagtcttgatccaggcagtaacatgctcccaatgaacattcacaaagcctcactgaaggtagtaggatgaggttttccgaaggagcggaagcagagagcactgacaggaagttgttatgacaggaagttgttataatcctggtgtgagattatagtggccagaccagagtaatggtagtggaggtgtacaaagtggttatatatattttgagagtagactcatgcctgatggatgacctgaggggtgtgagaaaaagagaggaattgagaatgactccaagggttttggttttttgctttttaacatgaacaactggaaggacagaatagtcatttgctagatgggggacaccaggcgggggtgggtcatctcttagtttaagatcaggagtttcattttggacatagtgagcttgacagtcaggactctcaagaagtcagtggttgtagatggtggagttcatggaaaattttgctgtaccatgatttagcccaacattccccagtttttgaatgatggaaacggtgatgaaaggaacatccttgcacacgtagctttgtgtgtattgtgaattcttctgtaagttaaactcctgagagtggcatcactgagttaaagagaatgcacattttaggatttgaaaaactcccaaattgttccactaaaagaattatataatttacattctcatcagcatgtgtaagcgtgttcattctcttgtttcttaaagttttgctggtttgataggtgaaaaaacatggactttttatagtctttaccgcaagttcatgtttcctttggccttagaggctctgtctagattctggaagatgtaggaatttatcctgtcctgtgaaggtttgcctatcctgggcacagtagtgatgtaggtcacatttggtaggacagactaattgcttgaggacttagctctctgcaaggatgtaatatattcagcattgttcaagcagctaattaaagacgaatgggggggacagctaagtagcagttttaaagtacatctcctttaaaaggggaaattttgaattatatcatcctcagaaagaacagtttattctgacatttggacaagttttaatagcaagtgttgaattaaaatagttggcacaaccaagatagttaagagcaccgagtgaattcagatttctttacagttat

SEQ ID NO: 106636 - DNA, 1216 bp, Homo sapiens
atgagatatcaatatgtttcccgtatttctatatctagtcgtaagcacaatgcttagcaggtaatacacgttcaataaatacttgaatgaatggacacattaagaactttgaccttatgcagtcattatgaagttcaggctgtttcctagagtgctattgtaattatcaaagcaatgcaaaaaagtacaactccttgaaaaatcattttgaaaatagaaaatgaaacataagtttgtttgtatttaatgatacatattattttccaccaaccagatagtttatcctatattctattggaagtaaaaaatcatttagatttctactctgctcactgttgaattgttctgaaaagttcatactgctcgcctgattaaagaatctcctttcccccccatccttcacaatctactagtccttgcatctgaattattgcactgggtatatttctttgccacaataaagattagatcagtgggaatctacaaatttgacaaagactgtatgaaataacttggctataagacagtaagtgctataattttctcattaattgtggagtcatgccaaagagagttgctttaaaaatacatgattatagatagtgacctgaaagggaagccaaaaaagtctgtaaacatttaaactcctttttatgaggcttaacactccagtttatggatgcttttgctatatccctttctagcttgggactttttaatttactacttttaattttacctgaaggtgaccttatattgagaataacttataatatttgagtgcctactatgtggtaggcgcttgttaggcactggggaatcatagccccatcaacaaaatataaaaaccccctgccctcctgtagcttgtattagaacccatcttaatttacttctaataagatcagggaatagggaataaggtaaaaatgattagttaaaatgagatctttccactatgggaagtttttcccagaagttactgtggttggcaaaacaaaagttgggttcgttgcttgcagaaaagtcaagcacaatggaaaaatgcagcataaaattacacactagccctcattctttctgaagtccaactctccaaaagtaactgcatgtgcgtgtgttcctttgtttccctcctaacttttctgcactaatatatatatgcacatagcttttttcttttttctttcaaagaagatgctatcacactctacct

SEQ ID NO: 106637 - DNA, 2625 bp, Homo sapiens
tctcctctgtccgttttcctatttctaaaaggaagaatgtacatgcggaaggctttttaagtttgcttcctggaaattaacatttgtatgttagagcactgtgttatctaggtaagagatgtatgtctgtgggcatcagaaaacagaatccagagtctggcttgctgagtgcttgggagctaaaaggcttttctccctgtctggttctgtaagtgaatgggccaaacccggaaggctgggggatttttgaagattcaggaaggctatgcctcccttcctcttcctaagtcctaagtctaactgacctgggtaccagggggcaatggagtgtacaaggaagctgtcttgtccacagtgttggtatatagactttgtctcacacacaaagggagtggatttgtgcctgaactaaattatttgagggtatgtatggcttatttttaaggattaggtatgttgggcccttttctctttcccagagtttaccatgctcaacaccctgtcaactgagaatcaattaggagactacttatgagtgtgtgctagccaaataacccttgctggtttatagtgttgtttgttttactactcctcttgaatgagtattcagtgctttcaaaagattcggacacatttgttgggggtttcagtaaaacgggaagcttttgcatgagggcattgtgacttttatattgaaaacataaaaattccatatgcacatggtaacccacggaatgacatactgtctttggggttctgggaaaataaatgcatttcttagttgagaaaagcttgtcttttatcatctataaggctcatactttctgaaaaactgttgttttttgatcacttggaagcctgtattaattagatatgaagttggattcttttcgtgatttaacttgcactgaaactcgtcgacaaggcgcagctcatcacttgccaatgaattttagtgctgttgaaagctttagcagtttaatggtatcaacagagactcgattcctccatttctcaactgagcaaacagaagcagtctgcccctgtctctcaatgcctttcctcttttggctttgggaaaggggatggggcagagggaaaggattcttgatgaggatactcctaactccccacccccaccctacccaccctacccaccccagagagttaaaaacggaagcttacccatttgcttccccatgtagtttctttcttaggctgtatatttcaagttgtatttctgtgtttaaaaagatgcttgaggtttggtgtttggatttgttgtgtttgtgctagagagacgtggaatcggtccgttattctttttactcaattatggctcttaaatcggtctgttcctatgattagacttgaggctcctctcccgatccttgctgagcaaaagcatgggcatgtgtgtttgatatgaaaccacccccaggggagactagagcctcactgcctcttcagtttaactgtggccagaagaggcaatttgtgaggtggcccctggtgtgtccactggaactaccaaccctgagtctagattctctaaaagcttgtggcaaaacagtttcacatgggctttattaacagaaaggagctctttgaacctatacgtttgatacccaagactgtttttgtgataaacagttgtatggatctttgacattcttgtgtataagaacagaaactatgcccatgaattaatggtgccatagaagtaatgactatagctgattttactaagacacatctagcaaaggcttctgatgaggcagcctctcctttccccttgttttctattcattcttggcatatggatgggggtagaggagtggaaaaagaagacagagagaataagatctccatatttacaaaggagctaaacaccgtgcttaattgacaccagttattgaaaaatttaattgtaatttctctttgaccctgtgctgcgtaatataaagcaggtgatgtgataccgactgaaactgcctgtttaatgatttcaataaataaatacacagacccatgcattattctgatgttggcttattaggcttgcatggaatagaatttgggagacactgagcactgaaggtaaaagggtttctaaagctgaaagtaaatatagagttgatagtactagaaaaagctaaatcaaaagacacccccccatcagaatactgcagatatttctttttctttgcaactgtatttgcataacaaaattctgttcatttagtaatcaccattttctcagcatgtttgttttttcctttgaaaaaaaaatttcttatgttgataatcagaccccaaatatttgaatgtaagcacatccctcgcagtcatactgacaccctctggcaccagaaaaactgtcatagcattttttgagatgtctggtgggaagaaagcaacaatgccagccattaattcagtaactctgctgatctctgtgtctgatagtaggccagctgttgatgacttttaggcttttgaagtgttataaacactaaaaatgtaaagatgctgccttcctttgcttcctcggtcttgttgacaagtttctgctactgttggccttcagtaaatttacatgactaatttgggatgtcaacactc

SEQ ID NO: 106638 - DNA, 1054 bp, Homo sapiens
actttcaatgtgttcagtgagagaaactcttggcctttttctcacagttatttctcaaaaattgccagtaaagaagtgtctacatttcactgcctctctaaactgtgctctcaaggcactgcagccatagcttgcccttggctctataagccaggcgcccatgaagctggctagcccaggacctactggttttaattttgtgtgtgcgacaaaagagactttaaaagaaatgcaactaagcatctctcctggcttctgctggagaccacacaagctgggagagccttggtttttgagattgagtgtgtcaagatactacacctctgagaaaaaccaagtagattttcatggactctttttcctgtgcttctcttgcacatagagaaacctggtctttggagctctgattgaaaataatttgttattattagggatatttcctaaccaaaatgacggctatttttctttccctattgaagactggaaagctacatccttgaatacttattgaataaaagttcccttctttctctcataaaaagaatgccttttgtatttttgttcccttcagggaagtctctatgcagattccttgcaaaagagcaatttaatttgtactgtacaatcattttcttgtggaaaactaataaaatacaaattccatttttcagcattagcttgtggcaaaaggcttttgaaagttttatgtagtatctgcttttctttttccatttttaaaaataatgattgagaggaaaagtgatgtaaatgctcgtatgtattatgtacatggttgataaagtattcccttaagtttattgtttctctcaaacaaaataggtaagcaaatactttgcatgtaactcttaaggcctttcaccttcctgcaagtagatgtgaatcaagaatgaagccagcgaatctgtgtttcttccgagacatcttactcgcttttttctggcaggtccaggatgtctagggttctggtgtttgcatttcactaattgaagccctgggagctgttccattttgcaggtcccctcagtagtagaag

SEQ ID NO: 106639 - DNA, 1028 bp, Homo sapiens
tcttcttttactcagcgtgatgttttcaggtttatccatgtcgtatcagtatttcattcctttttattgcccaatagtatcctctcatatgggtgtgccacattttattcattcatcagttagtgaacatttgaattatttcactttttggctattatgagtaataatgctgctataacattcatgtatatgtttttatgtggatgtatgtttttatttctcttggctgtatactgagggaatcatttggtcatatcataaatttaactttttgagaaactgccagactgttttccaaagtggctaaaccattttatattagcatacaggacacttccaattatcaacatcgttacttacttgtccttttgattatagccattttagtgggtatgaatgggatgtcattgtggttttgatttgttgagcatcttcccatatgcttgttggccatctgtgtattgtctttggagaaatgcctattgaattcctttgcctatttttaattggattatttgtctttttattgtttagttgtagaagtttttcacatattctggatacaaggaccttatcagataaatgcttcaccagtattttttttctttccatgggtgtcttttcactaacttggtgatattgttttcagcacaaaagttttaaattttaatacactctaatctgtctaatttctgttttttttttatttgtgcttttggtgtcacccaggataaaaaagatttactgcttttttatcttactcttaaaagagttttataattttaggtccatggtgcattttgaattaatctttgtgtttggtgtggaggtgggggtccaacttcattcttttgcatgtggatatccagttgtcccaacactgttgaattttctacttttgttttttaatttatttcattttaacttttacagcatcatgcatagaaagcataattaatttctgtctctcttattctctaataaatgcatttaaggctataatttccttctgtgtgggcatatgggta

SEQ ID NO: 106640 - DNA, 1049 bp, Homo sapiens
agcagtatttgctatttcttaaataatcattatatattaatatcaatatataactaaacatcattatccaggcacaactttgctgtagaatccaacatagcttcaaatgttatcattggaagagtgtttttcatttttattagtgtcttctttgtcatataacaccaatatttcttgatcctcagatactttttttttttgcatttggatgtttttaaacataaatgtgcatatttaatgccgtagttttcttttcccctgaaaagccataaattgaaagttgaatcttataattaattacatcttagaactaaggaaattttgatattgtgaaaattacaaagtgctataatgtgaatgtatcacccaaaattcacgtgttgaaacataatggccaatatgtagtaagagatggggcctttccgaggtgattcagtcatgagggtggaaccttcatggatgggaataggatccttttaaacagacttgagagagtgggtttcctttcttccagtcttctgtcatgtgaggacccatcattacccttctgggggatgctgtaacagggcgccatcttggaaggagagaccaggccctcaaaagacaaacttgccagcacttggatcttggaattccctgcctccagaactatgatacatttctgttctttataaacgactgtctcaggtattttcttatagcaacacaaagaaagacaaggctattcctttttgttagttctgctttaactttatattcaggcttacaagaccagcatgtaggcttttcagtttcttagggattttacctacaattagaataactttctgttcgatggcagtaatgcctcccttttatctacgttctatggttcaatcaactagacagaaaatttaatgcatgtttccaaataataccttaattttttattccaaataattgtcaaatttttattatgtagattgtcatataaatttttttattcaaaatggaagcagcatcgtgaatttcattgtcccctttgaccatctcaacactgtgctatatat

SEQ ID NO: 106641 - DNA, 1246 bp, Homo sapiens
acacctgtcatcccagcactttgggaggctgaggcgggtggatcacttaaggtcaggagttcgagacctgcctagccaacatggtgaaaccccatctctactgaaaatacaaaaattagccaggcgtggttgtgggtgcctgtaattccagctactcaggaggcctaagcaggagagtcacttgagcctgggaggtggaggttgcagtgagcaaagatcatgccactatactccagtctgggtgacagagcaagattcgatctcaaaaataaacaaacaaataaataaataaacatccgggtgtggtggcatacacctgtaatcgcagctactctgggggctaaggtgggaggattgcttgagcctgggaggcacaggttgcagtgagccaagattgtgccactgtactcctgcctgggtgacagagcaagatcctgtctcaaaaaaataaataaataaacaaaataaaaaaataaagaaagtaaaagtaaaataaccttcagggcactgagaggcacggtgcagtggttgctgagtaaacataggttttggatgtggaaagatacgtgtttgactcatagcccttctgtcctctggctttgtgatcttggataagttcctacccgaggttttgcaatttataaaattgggacaatagtattatccccatagacttgtagggagagttaattaacataatacatgaaaagcaccaagagaggctctggcacatagtaggtgctcaaactgcaaaaatatgtccatgtatctgatgagtagaaatgcacattctgtgctaattgaaataatcatttagtaggcagagttgaatggatgcaaaggaggagggaagggatgttttacatgtaactaccctgcacaaagtaggactcgccggatctcctctctgggttgtgggtagaagtggactttcatttcagagtttgattctgtaattctttcgtcaaaatatttgatgtttcctagagcagttgcaattgagatatgtttcctatataagtaatctaccattgaacctgagttggacaatgtatactttactaatataaggcacactgatgggcacacttaaatagtaagtgtgatattgtagacttattttttctctctccttcattaactcttatctgctgaaagcccttcagcatgctttaaaagtaggtcagacactctagaagggtctggttggcctacaagggctggtttttcttttattgccaactgt

SEQ ID NO: 106642 - DNA, 1222 bp, Homo sapiens
aagcaaaggtcacctaaaagaggaaaggataagtcagttttgttctgcagcttaacactttgttcatcaaggctcttcccaatactgagaccattgtaaccagtctaagaggtattgatcattgacttaaaggactttacggagggattacatgtgtttgatctacaaggcaatttaaatttgatgtggtaaacataggtgatactggtctttataagatagccatattcaaaagggcattttagcatctgctatcattgcctattattttaaatgggaccataaattaccattagttctatttgaacttacagttttctcttaaacatagttgtttccaggatggcttgcctaaaatcaaccacttttcctgtgatctttgacaattagagctgataacatgaactagacctatttgtcagcaagtgtccaggataaagaactggatgttggaaaatagtttgtctcctggaatgtgcatacctgtgttcaggttgtgttggacactggtggaatgcttccggtcataactcatgaacttgagagttctgcaagcatcataggactgatcagataaagagataaaggtcactggaaactttctctctattgctgtttctctgcccttgtcctctatctaaactaagggctgtctaaaaggattgctttagcctttacaaagcctagcctgtggcaaaactatgactagtaacaatagcaatagctctccagcttttgggtacctactgtgtaccggatcctctgtcatgatatctctctctatccctttctctttctctatcatgtcatctctaactttggcttcatctaaagtacaactcttaaggatctgaacgcttcgactctatctcttttctatttaaccacagatgtttgttgcgtataatgtaaacaacatttatcttgatcagctttctactctttttctccccttctcttctacccatcatgactgtattttcccatgtgcccttggcttgtctgtgatacggggactcctcccacctactgacccaccccttgcctgcttacacctgtccttctccattgaaacgtatttgctatgcatcggtttgctagtgggcttcctttaagaagacaagcattagaacaaagaagtgaatgtttcttattgtggtatgaggttcccttgtccatcatatatttgtgactttaaatgtggttctgtccaaattatcct

SEQ ID NO: 106643 - DNA, 1132 bp, Homo sapiens
cattggaaatgaagaaataaagctccttcattctcaggttatttttagcattgccataatgtagtggagctgtatgtgcatcatagcacactttaccacttacggctcagtttatcttaattctctggcaaaggaaatgcaggtaatagcacccctgttttactggccaaaagatgaagcaacaaaattgaactttctcaaaattgtaccatttgaaatgccatattactcattcctcatctgctgctattttactttttaaaatttgtaacggcgttgttgaaatataattcacataccatacaacttacctgtttaaagtgttcatccagtgctatttttgttacagttattattattctccactccccttttatcttccctttattcaagaacttttattatttctacagtaagaagaaagggcatgttagttgaaatttaattatatttaccattcaaaataccactagaaaaaccccaacagaaaagagatgcagatgcagaatgagttcaggggcctgttgtgaagtctgagggctactctgctggctgtgtggcctggcacaagtcacataacctctctgaatctcgttgacccttcagtaaaatggaaatagtagtactgactcaaccactgtcttatcagatacacatagcaatcctataaggtgagtcttattaaaggaaacagaggctcaagagaggttaatagtttgcttaaggtcacacagcaagtagcattgtcagggttaaaccaattctttgtaactctcaagttgggtgttattagtaatagcctgattagagtaatatacaaacagactattgagagtaaaagaaaaaaaaaagtttctgatggctgaatttagagctctagttgcttaaaataatgacgttttatctggtgggtttggaagcaatggaaggcacaataccttaaaaataagtatattctctctgatgttcaagtaattcactggttgtacaatataattttaataatgattattcagattcaaaaaaatcattacatgattttcttagcatatctaagtttatcttattttccattagatcttttctttgtgtacctatggaaaacctttgcaatgcttgtaaacatgcctac

SEQ ID NO: 106644 - DNA, 1188 bp, Homo sapiens
attctggttttattacttagaatttattacttagaattttcctttctcctctctatcacccagtcctttattttcctagacataccattttttgaaccagcaaaagaaaggaagaataatttaatgttccaggtatcgtgtttatttctatgatttgtttgctataaatggttttcttttaaaaaaaaaacttgcaaatgatatgctagagtgctaatgttttctgataaacattagctaattctttctgtaaaagaataagcagaactaatctcaggcattctgtagattttaaaggacttagactatagttctagatgataacctccacagatcagattctagaatagcccctggctttccattttactcattaataaaacagaggctatgagaggagaagaggtttgctgcaagtaacttgggacagggccccaaggttgcctctgtccatggagtggctaagctgcatttgacggagaggaggttgtgatgatgtgttaatgtgaacttgtggtcctcagttcttttagtcttttagcattgaagttataaactgtagtcctagtaataacctcgtagtaatttcttatattttggcttaataataattaattcctaatgctaatcacataggtagggcagggattatcattctatttttacaaatcaagaaactgaggcaatgaggaagccaataaaattaaagccataggtgatcagggcttcgagtctcctgagttcaccattgccctgcttcttctgcactgtcaggcattcctcctatagtaaccctttgaagttgggggtctttaacacccattttacggatgaagaaacaaagtcacggggagggtcagtaagtggcagatctggtctttttcactcttatgtcatctagggctgttttcataggtgccctgtagctgcctctgaagttatagtacagcaggttgaatacaattttgcagaaatcagtaattgcagaatcatgattgttctctgtgtaatttttcccctacttagattccaatttaagaaatggggatgaagcaaatgagcacaccatttcttgatgcatctgtggtgttaccatggttacattttggcatgctctcccatttattttttccactgatttattggacctgactgtgagctaaatggcttgattttaagcttaccact

SEQ ID NO: 106645 - DNA, 1055 bp, Homo sapiens
ttctacatggttctgaagccctgtctttactaaaaatatataaattagctaggtgtagtggtgggtgcctgtaaccgcagctactcgggaagctgaggcaggagaatcgcttgaatctgtgaggcggaggttaccgtgagctgagatcgcgccatcgcactccagcctgggtgacagaataagactccgtttcaaaaaataaaaattaaaaaaataaaaaaagctgtagtaaattcatggaaatttgaagagattacaagtatacctgtagagtaaattcctaccattcgaatccctggtcaaagaacattttatgatttgacagttattgctggattgtcttctttaaggtttcagtaatttatgcttctagtaatagtgtctgcaagtgtctatggcacatatttaaatgtaatagcctacattaaacactttgatattttggccttctagtattatgtgagataggatctctaaattaatgcattgccagtgctgttttatctttatgacattctggcttgactttacccctgcagaggaaaacctaaagtacatcctcctaatgactaggggtggcaggctagaactgcatcctgtggctttcttgcaatcagttcttggctacttcttttctaggaggccctgtgttgatgtggtatgtctattttatgtatttcctgcaggaggaaggctgaacaaggacctgcgacattttctcaatcagcgattccagaaggggtctcctgatcatgagctccagcagaccataagggataacctttaccgccatgctgtgccttgtaagtagttggactttggcatctcactgctgtgtgtgtgtgtgtgtgtgtgtgaaaagtccaggggagaaaggagatctcaacaactggttctggaacacctggtggttggcctactgagtgactccttaactcaagcaaatcataattcaataacagtgtcgtggtgtgcctgggtttcagtcatggctctgcaatgtggggcaaattatctaccctttgtaaggcccacttttcacattagtggaaagg

SEQ ID NO: 106646 - DNA, 1052 bp, Homo sapiens
ggtaggcattgagagggccatttggacaactttatgatgtggcaggttagaaggaaagtcagtctttggtttttatattgagattcacatagatgttttacagtgtccttatgactgtaactgcttttaaaaataattattggctgagtatggtggctcacacctgtaatcccagcactttgggaggccgaggcaggaggatcatgaggtgaggagtttgagacctccctggctgacatggtgaaatcccatctctactaaaaatacaaaaattagctggatgtggtggcacacacctgtagttccagctactcgggaggctgaggtgggagaatcacctggacctgggaggtggaggttgcagagagccacgaccacaccattgtactccagcctgtctcagaaatatatatatatattttattttacttttttactttgaaagtttccaaacccacgctagtgttgaaaaaacaacaaaacatgtactcccatcaccaggattcaccagctgttaacatcttgctacacccatgccatctgtccatatttacacctatttccattttgctaggttatctgagtttagggtacagatatcatgataactcatccccaaataaccaaaaattaccacaaaatgatgacattttcctacaagccatgatgcagttgtcacttatcagcattcgttcagtaacatcatcgaactttgagttcatagtcaacattcccttagctgagccataaacgtctctgttgttcttatttttttaaattccagatctaatcaagcttacacactgcattgttatgagccttggtaaaagtaacaatttactgcacacttactatgtgttatactggatattgcgttagtgcatgatctcatgaagctgcacagcccttttgagcagatactattattatccccacctgatagattagggaactgaggctcagagaagttcagcaacatgcccaaggcaagctggtgaatttggggcctcgatctgaactaatcaagcctcgcttgaagttcagcactctta

SEQ ID NO: 106647 - DNA, 1092 bp, Homo sapiens
cggatagaaggtttgatggtcatagcatgtttgaccagtggcagaataatgtctcattaaagaaaattgattgttcttgtgagcactgaagggcttgatcaagatatgggagtggctgcaagcattcattggtgctggtgcttgaagaaaccttttgaggtagcacatggttcagtgttagctggagtgtagaatccatcaacgagataattacccagctcacagcagtcatgttgagttgtgtttaattttggggagccttctatttgttctttcatcttttccagtgctttctaaatgtgttggtgctttgtgcaccttcagaagtcagcctgtgcaacttttaagacatcattattatgatttcagtgtgggaaagccctgcatttgtgatcccagcaggccctttctcaccttgttccttgtcatcgatcacagcctggcagaaaccttgggcccctaacccatcctttgtatttgatgtctgttcttcaaactacatatcagttactgatgacttttctcaggaattggtgtgaaagagaaaagcgtggctgagccacagtgagagacatcaaagtacaggtcacttggagtctcctgattcttttagatgaaatttctacccagctaatttcagttttcttccttagtcagggcaggcagaaacacgatttaaattcccagggctgtgactctaagagggtgttagaatttttccacttccttatctcattgatgttcttcactcccgtaccactctctgcacctggttcagagtcttatatttcttctttgaagctaagggcacttcatcttaggagattatacaggatgctctatcaacagaagattctgtgtgtatattttgacaattagtgaatctaccgtgaattcacagtctgagaagtaggctaggcttagaaccctggctacactttggaattactagtggagattagaaaaaaaataccgatgcctagtccttccctatagattctgaattggtctgaagtgggggcctaggcgctggtgctattatagacatgccccaggtgatttcagtgttcattgaagtttacttccctgtct

SEQ ID NO: 106648 - DNA, 1034 bp, Homo sapiens
gttgtacttagtgggaggaatagggaaaggtatgtctgccctatctttacagaaggggaagtgtcaccctctttatttttcgtagatagcaaatgagacattgacttgactatataatccagaacacttactaacaagagctgttgagttggcatgaggtgtttgctagtaacatggttttaaagtagaataataagtactaagaaaactagttctatgtatttatccagttcttttatttccagctcttctaagggaccctgaactgagaagtcactaatggaagggaaaagtgggtgaggagctgagaaatgaataactcaccccaccatctggtctgctgcagttcagaaagtcacatggtgctaccaagttagatcttctcctctgtgtttactggaggtgccaaatgctatatttaagccaagaactgattttgaaaatatttttctacttctgttttgtcaaacgtgttctctggcatattatgttagggcttgttctgctaaagcttagcagagccttctgtttcttcaagctgatttggcttgcaccactcaaaacattagaccctcattttggaacagaagtcttctctagagaaagcactaagtatgatttaatttccaggcaggtaatacctatcaaatgagagatggagctttattccttaattgttattcttttatataaggcactttttaaaaaagctattttctgctcaagcctgtttgactacattttctctttccagaatctttctaattatggggagaaaagcaaatgttaagctagccttctttttatcaagaaaaaggatagaaaatgtaaccgatttactttcatgatttgattttgcttgaacttttgagatgccagtatgacttcagtatgtataaacagagcttacatatcaaggttatagatagggcggactgtctagctaagtcattataaaaacactttattcaaaattttggtatctggttgaagaagatggttttctgctagccttaagtatttttggtttgctg

SEQ ID NO: 106649 - DNA, 1010 bp, Homo sapiens
cacaaaacggcacacaggcactaatattcaactgcaacacttaacagattcactggacatttttacgccctcagttttgtatatctccgtgtgtacgttaaaaaccttagagatgattgattttggggatgacgtgtgaaagcatcaaatgacaacagtttccattctggggctgttatctgggcataaagatctgcaaactgagaagaatcagggcaggtgataaatcttttcattctaaaacaatttaatgttacctttgccatgtattctatatctaggtccatatattaatataaagacttaaagtaaccatttagagtttaaaaaaattccattattgatagtggaacatacatgaaagtattgagaatcaaattaatcatctctaatctcaccatccagagatattcctgttcacatatggctgtatttctttctagttcatttgccttgcatatttcactgtgtgtagcaatcccctcctcctcaccatggaaatataacgcctatgtgtatgcatattttgaacatagttggagttgtgttttatatactggagtcacatggtaagtgcagtgagactccaccagtgtaacaaaaactctttataaaaagaaagagagagtgaaattttgttaattatgcctcttcttccccaactcacaaccctgctagatttaaaataaccttggcctaactccctttcactgccttaggaagggtacaatagaaatgcaaagagaaacttagaggggttgattcttggcttttgagctcccaaaagtccagattctggaagtttagggaattgttaaatgcaatttgtgctatcaatgattcgggttttataaactcctgtagtacaaaatcctgcataagtgtgatttcattgcacatgacattgtgttctgtgccccacatccatgacaccttatattaagtcatggtcctgataacacggaagcttgcaggtgtctgtaatttattctaagcacatcggaaagccc

SEQ ID NO: 106650 - DNA, 1060 bp, Homo sapiens
tgagatggatgcaagttttctaacttctgactaaggagaacaaaattttctcaatatatggtccagaatttccttggtgatatcgagggaatttttttttttcaaatttaacacttctgaaacttaatttttctgtccccattgcagacttgatgacattaggagattatatttttattaggaaactgaaatccagaatggttagtgaggaggcccacaccttcatgcatacatagacagcactaatgtctgacacaagagctttctgggttatcagtgaattcaagatgtagccaagatttgaagagagacagaaataaaacctgaaaagattatttctgttaaataacatgacttctcacacaaagtgtggaagagcttcgacttgggaactgaactggagttggaatttacctgggcattggaattggaattcaactggacattggaattcaacattggaattcaactggaattcagttgcattcaagttcaaatccaatttctacctcttactaagctgtgtgaacttgggcaactttctcagctcgtctgtgcttccatttctattctgtctgactgaggtaatgatagttcccatatcaaagagtggtgaggactgaattaaataatgtatgcgagcacttagcactgtccggcaataaattgtacttatcatggtgatggatgatgacaactcaaaaattctcctctgcatgtcaagttgaggaaaatgggaaaactctttgaattaatagatctgtatgcattccattgtaccatcagtggaaggaggaacagaagagctctttattttgtcatctgtgttttgctggagtttgactcagttatatttcagaagtcacagttgactgtgtatgtaataatctgtaccataactatgtatggttggatgtagatttttttccttttaattagtgcattgctttatgtgttttttgagcctttatgggtttacagtaaagtatcttccaatgccatctgggactacaggtggtgagacactgttttttctccgctctacgtctctgtctgtcct

SEQ ID NO: 106651 - DNA, 1053 bp, Homo sapiens
tatcaaacacaatgaaaatgaagcgtatgtgtgacagttgagtatgagacttttattttattttgtttttttttgagctaaggaagtaggcaggtaaacagaaaaccttcactgcagaattgacacactgtaggggaaaattgctttgtctgtccaaagatatgcttagctgacgagaaattaaacaacatgattgaggaggaaaacctgaataagtggaacacggaagtaaaaaaggattctgtcactatttacgcccattattcaagttggaagatgggatgattcttaattatttatttgggtgtcaatgcggatagaaaatcaccatcatagaaggatacattaaaatgagtaagagattttcaaaattcacagaataagtatgtctggaattttgcaggttttcaggagcctgttgagttccagggtaggagagagatgtcacgccaaatgacagttttcttgttcaaggagcgtgaacacaacaggctgacaaaatttgaaaagagcagtgctgatgagcaaaaggaaagagaagaaaggacggctctgggcttcctgctctcagtgaggcaagctgtgggttagtgtcagttaaccagatatgagtatgcttccaggagtgtggcatggacttgaggaagtgccagttacctattccctgacatgatctgttccctccactcagggccagtggacatctgtatgtacgtttcccttaatcccattatgtttttacttgataccaagtagctcttttgttttgttagcaacaaagcttgatttaatttcttggtttgcagagtagatacttaagaaaaatgcaaaactactctcactttgctgtataagcagctaattttttttttacctttttattttattttttaaaggttttctttttttatcattatactttaagttatgggatccatgtgcagaacatacaggtttgttacataggtatacatatgccatggtggtttgctgtacccatcaacccgtcatctacattaggtatttctcctaatgctatccctcccctagctc

SEQ ID NO: 106652 - DNA, 1960 bp, Homo sapiens
tcttcacatgggctttcacagagtgaaagttttaaattttgattagattcaattttccttgagtggatcaagcttttggtgtcatgcctagtaactttttctctggccctatatcctaaagatttttttcttaagtttcttcttaaaagttgtatagttttacattttacatttaggtgcatgagccatgccaagtaaatttggtgtaagagataaaggtcacaactgacttagtgtaaagtgtgagaggcaggtcaatgctcctttcttggcctgtgaatggccacttgctgtagctccatttgtttaaagattatatccttactttgctgaatgctttttgaacttttatcaagaatcaggcatactttaggtctacatttctgggttctacattcttcttcccttgatctaggtctctttccctttgccagtaccacagtcttgattactatggttaaatgatgagccttaaaattgggcagagtgattcctcccacttccttctttgtagggagtatttttgctagtcaagggctgggctgcttgttgtcactgggtctccttttctggctttgcatgcccacccttgatgctacttttgaatcttggattcattttctaggtttctctccagaggggtttttgttttactaaaggaaataaattccccttttccagggaattttttcttttttcctctgagtacgctaaaagctaaccctagaagttaaaattgtggatgtgaatgatgttatttttgcccccttaaacctgccaaactcagctggacaaagtagcatgtgtgtgtaatcctagctatgcaggaggctgaggtgggaggatagcttgaagtcacaagttcaagaccagcctgggcaacctatcgagacctcatcttttaattaataaaaaaacaacaaaaaaacaaaaaaagccaaaactcttattaaacatcttgctgtgaacttgttctgctttggtatcatctactcacttgggcatctaattcttaagttcttttcattttgttcaaatttagctgtatgattgagaatggggatgaagatatggaaagtacttgttatctatgagtgctttgtttaaaagcaagatagctttgcactgagtctcagtaaacttgaacataaatagaagtgcagagggtctgctagtatttatttatacagaaagttttcaggggttatcttctatggaaaatgtttctaaacagtgtgacagcaaaatgatagtgtaaattgtaatgtctgtcccggttggatatataaacatatgaagtgcttttttcttaaaaatgtttgggtggttcatttagagtaaaaaaatgatataactcacgttctaaaataatgataggataaaataaggattttatctttcagtgtcatttaggtgctttgttactttccagggactctcgtgagaaatggaattatgggcgtagcttatttggggcagatgtttgtagattgtggtctataaatgagacccaggtctttggaagagagagggaataaattcagggagaaaggatttagaattattcttggtgttataaataatgaagtggttgcgcttaagtaaatataatggcattttagccaatagacaaaatagtacctaagccctgttttcaaagtccctgagacactaatgcacagatgataaatcaaaatacaagaatgtaggtgctttgtccctaagccccactatagatattgattaaataggtctggatctgtggacctatggagaactcctttgccagaatggcttaaaatctaaagtaggccaaaatcaattcttcatcttcccaactccgaaactaaaatactgaatctttccgtcccattacaagaaaaactcacactatattttctcgacttgcctgggaggataattctagtatgtgtgcctggttgtcccataattgctatca

SEQ ID NO: 106653 - DNA, 1056 bp, Homo sapiens
gtgcaaatttgaaggtgaagtgtatttgagctgctggtgggacactttggtagaattgagcagttaggaacatggaactcaggtctgttttattgtatcctgggaaaatccaatcttgtctttattttggttcaaaacagaacttactttgataaaagctaaggcatatttccttgtgagaagcagtaaggtggaatgctttatcaagtaaaaagattgttcaagggaagtgctcctagagcttttgttttcccttgaagagactgatgtctgggtttcagagggactatgtgtttccagatgtttccatttgtgagtgtcaagttgcattagatgccacattttagtgacttaacatctcattgcctcagtgaggacaatttggggcacaaaaatcatagtcgaggaaaatttacatttgcttctcttgcagtctgtttttccagagtagggatagtgtagaaaaataaaggtacaaacagagctgccagcgtcaatagtttcttactcagtagttctcaagtcagtgcctctctgatttggaataaatattttcaatgtgttccctttattatcctaatataagatgaatagataattcatcctgctaagtattagttaagagaggggttttcaggaggtggggattctagaatattaggaaaatatgttggtatcctccttcattgtagatgaatgtcataggtcataatgccattcatctataatgaagaaggataccaacatttgatattggctgctaagccaatgtcaaaacccagtggaatgacacttctgtagagtttatttcccttcctgctatcttccctaccccacggaaatgtctgtcaccatataaagcacagtagcacctaccagtagcacctaccttaagcctcagtcttcccccttgggtaggaaagggagtgaagggaaggtcacttttgagtttccatgctttcttcttcctctccttgaggtggttcttctgtcttctcttcttcctccctttcctttttctctaatgactactgtaagccttttctgaaggtgtta

SEQ ID NO: 106654 - DNA, 1081 bp, Homo sapiens
gtgttctgggctgggcacggtggctcatgcctgtaatcccagcacttcgggaggtcgaggtgggtggatcacctgaggtcaggagtttgagatcagcctggccgacatggtgaaaccccctctctactaaaatcaaaaattagccaggcatgatggtccacgcctgtaatcccagctgctcgggggctgaggcaggagagtcgtttgaatccgggatgtagaagttgcagtgagtcaagatcgtgccactgcactccagcctgggtgacagaacaagactccatctccaaaacaaaacaacaacaacaaaaaacaaaaacaaaaaaaaactgttctgaatatggataccctgtcagaattcaacatctgctggtcttcttggatcaggccgcctttggtctctccaaagaggctaacctggattcctctttggtgagaggacagtagacatttcaaataaggcattaaagctcctccaggaaattatgattgtgggcatttccctcactttttcaagtttccagtgtctttagaatctcacttggccttcttagaaacgtgggcaattcttgtgctatattttatggtccaggtgccttggaacccggttgtatgggggcactgtggacaagggtccaagtccttgctctgcatttaaaggttacatgatcttaggaaagttttcaaccttttcaagttttagcctctgtcttagtctgttttctgttgctgtaactgaatccctgagactgggtaatttataaagaaaagacatttattatgtggccaggcgcagtgattcacacccataatcccagcactttgggaggctgaggcgggaggattggttgaacatgggagttccagacaagcctgggcaacacagggagaccccatctgtataaaaatttttttaaaaaataaaaatagccaggcatagtatctcatgcctatggtaggtcctagctactcaagtggctgaggtgggaggatcacttgagcccaggaagtcaaggctgcagtgagccatgattgtgccattgtaatccagtctgggcaacagagcaagaccctgtctgct

SEQ ID NO: 106655 - DNA, 1225 bp, Homo sapiens
gtatgctgtggtgtgatacattaatttttgttgagaatccaaatgtatattttattttattttattgtattgccacaaatgttaggaaattctgtttttggtatctagcaggagggaaaaaaaacatgaagctcatggacatgtattttcatgggcagttaagctattctttagatgaaaatggccttaatcattttaattattttaattataagtggggaatacatttatttattcattcaacaaatatttaatggggactccttatgtatcaactactgttctaagtgttagagatgccccatgaatgtaaaggataaaattcctttatatttatattggataaaatccaatataaaggtattggatggggaggctacaaagggtgaatgaagaaaacagataattaaaaaaatgtatctcaagtggtaggtgttataaagaagactaaagctgaatgaaatggcagaaagtgatggagacagagggtttctttacatagggtgagcagggaaggcctccttgataaggtgagttgaataggtacctgcagaaagttagggaagggggatgtttctgatggaggaaaatgcttctaagatagggaggcaggagtgagctcactgtatttgtagaatagtaaagacgccagtgaagctggaacccatttggtgggaagggagatggacggtgactggccattggattttatcttgagtgagaagaggagctgttggagggtttgagaagtgttgtgatagcatctgccttacctttgggagggtcattctggctgcttgtggagggtagcaacaaggaaagtatcttaggtgatgtaggatgagtaaagagtgagtaaagcacaaatattggtggctacactcatggcagacatcacaaatcaaccacagaggcctttcccagtgtcctggatgttgactgggacaacttcccgacatggcctgcagctggaactgagagcccttggaatctgcacagcaaatgaagtctttttatttcttttccaacaattcaaatatcaaatggctttccagtgccttatctctccttaaaagaggtctaggcgtctactgtagattcattcatcccccagcaatacctactgagcataaaaaaagcaagtctataaatggatgaacttcataatttcagatcatatgtcctgggaagaaaaaggatgtgactgagacctggaacataagga

SEQ ID NO: 106656 - DNA, 1974 bp, Homo sapiens
tggggatttgaggaaaccgcggaggagtctgtgcagtagtagaaagccgtgtcttgggtctagaaggaaaatagggattattgggaagggtaggtaaatatgagaagtgcacatctactgcagactgtgatgagacggggtctagaggataactgaaaagaaggagagagatttagctcaccatagaggcgcatttctacaaagtgttagctacttgtgccttttttttttaaatgaatttttatgtcgtcatgcacttgaatgcacacaaattttcagaaactgattaaaatgattgttgaaaaagaaaattgaagtgactaccatagcattcctaaattttaaaaaccacataagccccattgactcttttgtcaaatgtgcaagttcttggtgccaagtcagatgaggaagaaaagtttcaattcaaaataatctctctggacagagataataaggaacagagaagatcgagggcaggagaaacctggcaagtggtaatgtctagaaaccccgtaggaagcctggggaaaggaggcaatctaggacagccagcctgatttgagcttcccactggaaagggtagatgctccctcctcacatggcagttgagttgacacttggggctggtgctcatttggtaacaactgtgtctaagaacattggaatgagttgaagcttggaaacaaactgcaaatgaggtgtctcctaaggaggacagagctctgttcagggctggggaaaactaagcctgttcgtgttggtggaataaaacatagaagaaatgaggcagaacagatagccagctggacttggaggatgttgtaggatggtcttttcctgtgaggattagtaaaagggaatagtggattggtgatgccctgccttctttcccctcttctcatcccctgtgctaggagatacttcattaactgagacccttaaaacgcaaagtaagcaataaaaagggttgttcagattgtaccagcttcccaaaaaaactcactgaattctaagcaagtgaatttcttgaaacaactttaagcccatgcatgtctaagaaatccctagctaacactgaagttaacagttcccagggttaatgggaggtcaggtagaattttattgacatcctcattgctattactaatctagaactcattttcctgaggttcatttacccaagcaagttggtacaatggcactctccctccttctctcccgcaggcatccccgtcaatgaggtggaggcatctgggcacactgggaagcctgtgtatattctttggtgtcatctaaactataaattagcctgccactttctattagtgtgaccttaggtgagttttgcacattttgagtctgagatgactgcaagatatccaagtagcagtgtccaagaggcagctggatttctgggaggagctcaggaagaaaggtcctggctggaagatccatcagcagagaaagagcaattgaagccttgggcttgggtagaattgcctaagggcagttcatctaatgaaatgagaaagggcacctggagtatatttaaatattcttagacaatttttttttattgggtctttattctaatcagggagaaaacttgtccagggcaatcttgctagcatttgaatagacaattgactggccagtcatgggtcctcacttacaccctactcctgcgtccagcagatgcccttgtggtgttcattactctagttaaactcactgggcattggagcagttgtcagatttgctcatcttctggttcagtagtcaggaagcacgtatagcagcaaagactgaaagccagccaccccctgccaaaacagtagagagatgcgcatcatgccttgaaggccaaatgaggcagattgtcaggtgcagcatggtgctcctgaacgtggagggtgggctgcctctccaagcccgtcctctcagtgtctctgctccagattctgcttgcaa

SEQ ID NO: 106657 - DNA, 1114 bp, Homo sapiens
tagcatcaaccctgaaacatatcagtcattaaatatttaatttggaagtgtgaaatggcaggttcactttttagattacacattagagccctgccaatcagcactgaaggaaagttgcctacatctaaggtttggtcagactttgggaatagaagtttatacaacatctacagtaactacggcaaacacattcgtgtttgatcaatgagctgtcattccctgaaatcttttgccaagtctttagtttatccgactgccatgccgagacggtggttcacttgaaatgataaatgaaatccacaggtggttttggtatggacattttttgtttatgtcttgtgagatggaattataggactaggatttaaagcaaattgagcatcctgaataaagtctttcagtgtcttcctgttgcaattaaaataacatgctggaacttattaccatggctgagagagtcctgtggtctctggctcctgcttgcgttttcatttccatcccatactgttccccccacccacccatccattacgctgtagtcaacatgaagtcagtaatgctgtcagatttgctttgtctctggacctttgcatttccatttcccctccacatctctttcccttctcatcccctgtctggatcctccttatctttcactcctctccaggatattctggactcctaaccacctcaagccttcttctgtccttatttggcacagtctgttgtgatgctgtttgccagctcattgagagagaggactttggctcattttcgacagtttcccattcagaccactgtgcttggcacccaggaggtgctgggcgcacatttgttaagtcagtgaatggaggctgggtaatttcagggaaggcagaggctatggtatggcgccttagtctttctggaatagttgctaaatatcccagtgaggcttttaagagttccgctcagatttagctcattcatgtcaacagttgccatggtttgctatttcagagcattttttaaaacataaattttggtcctttcagacagaagcatcaatttggtaaagattattttgttttaaatcccatttgcaaagcaaaatgaaatttaaactagcccgtgt

SEQ ID NO: 106658 - DNA, 1035 bp, Homo sapiens
atacttatcccaatgaaagctaaccttcctcttcttttggcgtttactaccatctctttattcttttaacaattcatttccatatttaaatgccattgatttctttaaaaggggggaaaagccaggttgggtcctatctgtaaatcattgtcctgtcttgaacctcaggtaagagaggcattggctttgtcaggttgattctaaagattatttttcaactccaggaagtgggttacatttataggggtgattattttggtaaataggacatatgtagaactatgtccaattccatactttttgatggtgagatgcttttaaagtgtgtagacattgataccttatccaatattacctcattctttctatgtgccagttttatattcttcacacagttacagccgcaggttggattggcatggccatgactttggatttttagcgacctcctaattttattggcttgctttcctctctggttcagctatcaatatagtttaaaggttttactgagaaagaagcttgagagggtgtgtaaaatccatagttggtgaaatatctttttatctttgtggcttaataattatcttttctccagggattcttttgccaactttttttttttttttttttttgagatagggtatcactctgtcacccagtttgccgtgcagtgaccccatcatggttcactgtagcttcaacctctcaggtttaagcagtcctcccacctcagcctcccaagtagctgggcctacaggcacgcacaaccatgcctgactatttaaaaaattttttttgttagagagacagtgtctcactgtgttgcccaggatggtctcaaactcctgggctcaaacaatcacctggctcggcctcccaaagtgctgggatagggagccgctgtggctcaggccggttgccctggcactcggggaggcgaggctgcacgtccaaagtgctgggattacaggtgtgagccactgtgctcttttgccatctcaattgcatggtttgattcttgacaaagtgctt

SEQ ID NO: 106659 - DNA, 1049 bp, Homo sapiens
gttaggcagagctttgggagagagaatactgagaaaggaagtaaacattccctgcaaagataagcaattaagtgattttaaagagctgggaatttcagagtcaggtagcaagaaaggaattgctgttccccactgttcctaccactctgtgaaataagatagtctgcctttgtgtcggcctaattgctgctcttcccttcccctcatttttgtgcactgcacatcgaggtaagtgactgataaatctatcctagatggagaagaatttattatttttattttccttctcagagcagtttctcaggatgaaatatatttatgttcacagcctcatgtattctgaggtctgtgtgttttctaacagattacacaaatccctttgggattacaatcagctggcctgtagcatacacaacagtccctgtatcattctctgtgtgaaactatcccagatccttaggctagtcctgaatctgatacagtgtctcagtcctaagaagatggtgtctaatacatcagttcctaagttgaggacaagaggatgcctttaaaacaatttgagggggctcgaatggtttaattttgtaaacgatttttttggaatataattgtttgttttcacaggccttagaatacagaactgagtctcggatacctttgattgtaacacaaactttttgaaagctctacttcaacaaaccacttccaacacctctgttgctccaaggaacatctcaactgagatgtgcagctgtcttggctttggtttactaaatttacaaatttacaaatccaaaacggaaggaattctacaacctaaactcttcctgcttttttacttaagcagcacaaatttttggttataaaatgaagtgttttcctataatgagtgcacataaatatttcattgatgcaattatctttcacatgaaataattccacagcatggcgagtgcctgagagaagtgataaatctgcttcctttccccaagtgatttcttttttaaacaaacaaaatgtgtgtctgaaacggtggtgcttgtgtgtac

SEQ ID NO: 106660 - DNA, 1077 bp, Homo sapiens
tggggcacgaggtcatttctgttctcaaatgtatattgatatggctgttcaaagattggttcatctccatctcgtgctggaaacacgttctgtgaaaggaattgcaaaaagttctcaccgttatcctttttttcatcatcttaggaagctatctcttaggtccagccaaaatgtttctggcaatactgggtaacttgcttctgctgttagaatgcccggtcatggctttctctaaaaaaaaaagtttgtgttgaccagtatgatgtcacattaaccacagacgacatagcctatcagttgtatgtcactgtgaccttgtagaacaccttatcaggagttagagtcacagaccaatcaattcaaggtcccgagtgtaggtacagggatttctgcatggaagatgttatagaatgttcataaaaaccttccacagtaactctgcccacttggttagacagaatctaccatggtagtagaagcttgggggaaaaaaatctttcttatgttgtttgctcttggtgaccacactctgctattacagtaggtttatgtggagctggagctgattcagcacttttggccctaggggagggcagatgaccaagcttgggcacttagggtagtgctccatcctcatggccactgtgattagttcaggattcagagggtggtctaagctggaccaatcagaatcaactcaagggcttttgccagacctatctaagaagtgattcctggaatggaaagttttgagcttgaagctataggggaatgtctagatattgcaagatgttttcatctccgtttttatgttgtcctcagtgttatatcagtttctaggcacatatatttgtacgtgaatcctgtaataatttgatctgagaacgtgctctgaaatctttgtcatctttcatcacaggctacttcgactgtttataccagagtcatgaaaatgtgaaataacttaaaggcaagatgcattactagtatgtaactaaagtgtatattgatatgcctgttcaaagattgcttcatctccatctcgtgctggaaacatgttctgtgaaaggaattgcc

SEQ ID NO: 106661 - DNA, 1095 bp, Homo sapiens
tcagaaaccgtttctttccctttctcgcacagctaatcctgggagctcttggaaagtgtggcaggaaggatgaggttgtactcttcactagttactgcttatcagtatccccaaggatcagtctaatgagaagtgggtttgtgtacaaagtctttgcaagttttcatgtcttgtaaatgagagtagccaaatctggcttgtctgtgtgttttacctaagtgcagagcacctggactgcaatcctagcacacagacattgaaaagaggcaggaacttttcttctctagattctgttatctctctgaggttggtgccctcttctttatgcagagactgaattcgttttatttctgaacagttcagcaggggctaatttgctaaattgatacgtgaatgttttctaccaagaagctatataatttaaaggggaaaaatattcataatacttaaaatagaattgtttaattgcgacatttcagtatcccagtattatatcagaaccacaagtaatcaactctgacaatattgtacacaacagtttctaaaatttagaccctcattctttcctgtgcttgtaaacttagcaagaatggagattacaccttatattccaattctggctactatccacatttaacattcttcttagtatcagtcttcgaatcctggggataaataagcacagcttgcttttaggctgaattttcagagcgccatttattatttaaagcactaaaaatgcctgatttatgcatgataatgtaaatttctttctttctttttttttttttttttaaattttttgagacagagtctcactctgtcacccaggctggagtgcagtggtacaatcacagctcactgcagcctcgacttcccaggctcaagtgaatctcccacctcagccgccccagtagctgggactacaggcatgcaccaccatgctcagctaatttttttttttttttttaagagatagggcttcactgtgttgcccaggctggtcttgaacttctggactcaagtaatccacccacctcagcctcccaaagtgctggaattataggtgtgagccatcatgcctggtcatagatt

SEQ ID NO: 106662 - DNA, 1096 bp, Homo sapiens
aaccctgtcagccatgggaaaaatcgactgagacgatgttcttctttttgagaaagataaatggacctcagaaagggacattatagtgataggaggagtagattggattttaaatcagacccaagatggagaaaagtaacactcagaattagagcaggaatttcggtgttaaacagcaaacctgcattgcccttccctgggagtggattaacaacagctgtagtgacatggcctcctacaaacatgtgaaggtggtttcattgcttccattcccttcttggaagtgtccatctgactatcttctgtgcttctggactgagcaggcaaggaagaaatatcctagatggttgcagtgatttatttatgccttaatatgccatataatatagccactttgtttcaagattaagatcaaacatccaaggaagggactggctgaagatttaaacggtcttcaaattaccacatctgctacatctgtccctataaaccagatggttttttgataggatgactctcattgtgtgagagatggatgaggtttccttctctggtttttctcttggattgcagttgccactgacagataatcttagagcagaaatgtctgctctgatgggctaaatcttcaagatatttcattatttgtttttcttattacagtgttttgaggtcaaacattctaaaatatagagatttttacatacaattaattttctggcttttcatttaaaaacacaaaacacagctgggcacggtggctcacgcctgtaatcccagcactttgggaggctgaggtgggcggatcacctgaggtcaggagttcgagactagcctggctaacatggtgaaatcccatttctactaaaaatacaaaaaattagcggggcgtggtggcaggtgcctgtgatcccagctactcgggaggctgaggcaggagaattgcttgaacccaggaggcggaggttgcagtgagccaagatcgcgccattgcactcattgcactccagcttgggagcaaaactccatctcaaaaaaaacaaacaaaaacaaaaaacccacaacaatgacagaaaaaacaagtgatcttggaacc

SEQ ID NO: 106663 - DNA, 1167 bp, Homo sapiens
accttagtggctgaaagcagtggttttatagagatagaggtttcctgaagttttcagaatgtctattgataacagttgagagtagattatttcttaaccgatgcaaaataatgaacagtaattaagttttccatcgtttctccccactatcactgggattttcctgagaccttaacagtaaatgtgaaaataatgtgtggccctacagccagacacccttatcactgccctgttcaccttccctggaagaggcaagtaggcatggctgttagaaacaaagggttcagatttgggctttccaggttcagatcccaatatctcagtttactgggtgtatgacctttgcaagctcattaacaattccaagcactggtttttgcagtggtacaatggggatagtaattatactaacctcctaggatttgtgggagcattaaattaagataatgtagtaatgtccctcacacgatgaccagtgcccagaaaatattattagcatcattatcagtccagtaaattgttttaaaaaccaaaaagacactagtggaaattgatttgtggtgtttcctggcagaaaaatgaatatgggttgttatgtttctgtgtgtttgagggtgtgtgggagtacgcatgcatactgaatgcacattcctatcagaggcttcagataaactagtgcttgaaagccattccaggcacatccttttgattgtgtccctctattgcactttgcagatactgcatttttttttttacaacttgaaggtttgtggcaactttgcattgcccaagtctattggtgccatttttccaacagcatgtggtcaccttgtgtctttgagtcacgttttggtaattctcacaatatttaaactttttccttgttctgtctgtcttggtgatctgtgatcatttatctctgatgttactgttgtaatttcagggtgccacaaactatacccatataagatggcaaacttaataagtgttgtgtgtgttctgactgctccacggatccccctttcccatgtctctctccctctcctggggcctccctattccgtgagccacaacagtattgaaattaagtcaattaataccctgcaatggactctttaagtgtttgagagaaaggaagagtcacacatctctcactttaaatcaaaa

SEQ ID NO: 106664 - DNA, 2095 bp, Homo sapiens
aacatttcctgacagtctttcttatcattgaaattaggatcctagagtataatatagtctatatcttctataaaatcagtctatatcttctttaattcagtcttctttcttaagcatgtttccatacgattggaacctttgcatcagcctggtcagctacttaagatttcattctaaccagactcattcatttaaaacagtgccactataatctttctcagcctattcttgttatgctgacttccccatttcatttattcagcaaacatttactgagcatttgctatgtgccagttatactttgggccctcggagggaggtagaagccagtaatggggttcaaaatctggagtcacatcgtctaacctatgcaaaccagttctctgtgatatattttgagagacattgggtgatctatagattctatactattcatctggtcctaaaattctctgatatggggcatttagttctgaaacctgaaaactagctagaagaaacctggccatgaacaaactgttagaagcacattttaaaagttagctttcactgtttttctctattagggagatacccatgaagcttttggcctttcctaaaaactgatttgaaatgtaatgaacaatttgaaattttcattcccaagaacaaaacaaaacacccaaatacatccccttattaggagtctaatgaaggaatgttaagtctcactttttttttttattttaaagttttagaataacaaagcccacacataatcatggtgtcttggtgagtatatattatctttatgtgtaaattaattttccccagactttattttattatattaaaatgtgttccactcaagacttgagaaccaacacaaaaaatgaatatgtgttaaatataccctagagacagaaaaaataaataattactttaacaaaacccttagtgacacgaatagacttttcttttagactttttttttttttgagatggagtcttgctctgtcacccaggctggagtgcagtggcacaatctcagctcactgcagcctctgcctcccaggttcaagcaattctcctgcctcagcctcccgagtaagctgggattacaggcctatgccaccacgcccggctaattttttgtatttttattagagatgagatttcaccatgttggccaggctggtctcgaactactgacctcaggtgatctgcccaccttggcctcccagagttctgggattacagacatgagccaccacgcccggcctagatattttaaatactggcagagatgaggactgcttcagagatatttttcttgggtgatttagaaggaagatggtggaatataaagaacttggtggacaaacacttaggaatcttctagactatatcctgattttatagtatcaggcacatagtaaaagcttggtataaagttgagcaaatgaatggattttgaaaggactgaacttttaacattagaatatgaatattatcaccatgggaaaaaagatacattatttattttaacaagtgatctcaagagtgataatgagatgatgtggtatgaatcatctttgtatgcctagacgtatctagcatccaggaaaatatgcagatgtctttgtagagagaagtcatgtagggtctctttctttttttttaagcaattgatagaatgaagtttatttaaccctgtctcccatttactcctttcttcaaaagctaattttcatatctgttttcagacttttatgtggacagatgtttcagggtttgtttgcaaacatttcccagacatattgttgatcagcaggtttctgcaattaacagcatcttcttaagcctgtttcctacattctgattgactgtatgacaaatgctgtaggttttcacagatgcagggaaagagaaggttaccagctcagcagaatcctgtggaaatcagatatgagtcttaggacagttcattggaaatggaattcagtaaaaggttgagagcgcatgaagtagtgtggttgtaggtggcgtcttgaataaagtcagctgttgtgcatgcaccccagcagacactggggaatgcacagacacattcact

SEQ ID NO: 106665 - DNA, 1065 bp, Homo sapiens
cacacatacatccttacatacacactgcccacatttgactcagtgatacttgcaaagaccattcttcagtgacatttggaaactgcctttgtcatctctctctttcctaaggcctctattaaatgacaagattattgtcttgtcctcttggtaagaagtccatactgctagcatccaggaagtgttttttagaaagcggcttatcagaaccgtgtagaacagtgcccttttctccgaaggtcaatgcaacatcataatgttagattgaaaagagacatcaaaagtagacaaagggagagacactgtgtgctctttgaagctgaccctgccacacaatgggaatgctccagcctggctgtgatgccgggaacatttctcaggctctttctgtcagtgcaccattgcccagcagggggcaggacaatttctttcttcatgagaagcctccagctgaaggatctttacatttatttcaggtctctgagctagagtaagggcagaaatgggatcgatacctttctcatcttttgaatgcaggactagttttagggttttaatcagatgtttcccccaaataattatagcttatactcaccaagctgtttcccagtgccaggcacgtgtgcacacaataaacacattagctgggtcaaccctcatcacaaatttctgaaactgtttttaatccccattttaaagatgaggaaacaggttcagagaagttgaatcacttgcctggtgcatcttatataaagaaaggtttcaagccactttggtaacttactttaatgtctcatgacacctagcactgtaatattctttcttttcctgcaaaaatttcaagtagtactatgtttcgtatgttgattgagaagagttaatatgtaagagcccttcctacaaggtctacttgctctcccttggtggctttcaactttcagcgtatgtaaaataccttgcggggaacttgtaaaaaatacacattcatgaaacccgagattctaatgttatagatttgggattggactccaaagtaagcattttacctcaggtgagggaaatgta

SEQ ID NO: 106666 - DNA, 1048 bp, Homo sapiens
taattgatttctcacagtttctcaaccttgccatatttgaggccgaatacttcttgttgtaggggctgtcctgtgcattgtagggtatttagcagtatccctggtctctacccactagatgccagtagcatcctccatttgtgacaaccaataatgtctccagacgttgccagatgtctcctggggcatgatattcccccccagttgagaaccgctgctttgggaatatatattggaaattaatttacttaacatattatgaatatgctgcagactgggtaaaatgtgataacgggaatgtatgggcagtttgcaaaatctggctcactgaggaccagagtgctattttcagaaatgagctccaagtgattaaaagaaaagagcagtcagactggatgtctgatatttgggtagttttgaatataataaaatcaacagtgtaagtaagcatctttgaaaaggacgaatgacctttctctttctcctttccccgagttttgtttgtaagctttatttctctccccagatgctccgctttatgtcttgctgtggaaaggtgattggctcaacagctccattctagggggtcttttctgcacctctctgaaaagaaccaactaggactgggagatttatctcctcgagtcaacagacctttgaagtcagcgagtgttgttgttgttttggttagaacccagttaatttgaccctaggatttgaggtgccttagagctctgtgtgtgtaagatgctgtgacatcacagaaatgggtctctcaagccagtttttcctgaaggaagtttctggaaagagaagaaatgctctaaagtatctctctagagaagattatgtgtctctattgtttaagggaaattgggtgatacatttagttaaaattgaagtttgtcttgctttctaaaccaatgaatgtcttaactttataaaccagagaaagcagaaatgagtacttaatttctcaaataatttattttaggatttctttctttaaatcatgtggctgacaaacctaaaagttgaagcagttaat

SEQ ID NO: 106667 - DNA, 1031 bp, Homo sapiens
ttactagctgtgtgaccttttgagatactcaatttctgaggacctcagtttcctcatctgtagaacaggaaaaacagtaatacctatgtcagtgggtggtgtaagaattcaatgagaaaatcatgtagaggacttagcagagtgcctaacctataataacacacccatgttatataactaaagaaacaaatagaaacaaagtaattattgttactgatagcatttttgtttccctgggccctgcttatgattctccagtgaatgaacaaatgaacaatgagtagttcacccttttcttgggatcattataatgtaaaataatgatggcatcctttggagatctgtgtgttttttcttcctgttttttttttccgccttcccattctttgtacttcacttgtccacctgctgtgcagtaatgagattcgtaggagaggctggtgttcggagaatgaattaatgccttgcaagtcgcctctgctacatgtatctcctttatcatcactaaccaactatttagactttcaaaatctgagaaggaagaaatgggtgttcaaggagctgaactgttagtgggacccacttcaggaggcatttgtgattctcgttggagggggaaaggaaccacttgagctgtgattgttcatagactgccctcctggcaggcgctgggtgctggaagtggcttatacctagtgaaatgcagccattctggggtattgtgagccctggatagtgagttaccataaagaaaaaatgaggcagttcccacccccaccctgctgacctcctgaaaactttttaggctcttactccagtctgctctattgaggtgtggatatggaagggttaagcagtccccattttgtgtctatttaagcccatttaagaacaagatggaaaatgcagcttttcatcttgtcaggaccatttttcatttctcacagtaccatccccacacctgacgtgttttcacaagcacttgggagctcagcaatccttgaagggagggtggagatgaaacagatcac

SEQ ID NO: 106668 - DNA, 1051 bp, Homo sapiens
ttaggaacaataactcagtagttacttcctgtattagtttcttatttgctgctgtaacactttttcacaaagtgagtgccttaacacacatgtacttattatcttacagttctgactggtgatgctgggctaaaaccaagttgtcacagggctgtgttcccttcctaaggctttatgggagaatctgtttccttgacttttccaacctaaggacattcctttcctccatcttcaaagcctgctagcaacgttgtatccttctgtgccattcatctacagtcttatcttttacagatgcttatgattatattgggcccacccagataatcctatttaaaggtcaccataattagtgaccttaattcccctttgtcatgtaacatagtcacaggttctgggaagcaggatggggatatctttggggtgattattctgcctattatgcttactaatgataatttctacaatctgtgattgacaagtgtttccctttgatagttagggtctctagacttgggacatgtgataaatggacatgaaatgcatgccatcccccagaatatatgggaaagtgaaatctaccaatctgctcaggagacccctctgtttaccagcgagtctgtttttacagaacaatcttaggtttatagtgagggggggttccccagtcagatggttcagacttccactgactgacttcaggaaagctgcctgtactctctgtgtttgcgtagttgcagagtcagggtgatggagattaatgagagaatcagtagaaacctttagcaaatctcttccgtggtagctgttattattatagatgttgccattattggccagaagctatttaggatcttgtaatggcctctcagccatgagatgaaaactgaattatctataatacgagtttaatgtcaagtcaatttcattatatctttggtctttgaaaagcggcagttgctatataatttgtataataattttttaaatgaatctatttctgtgaaacaaaccactactgtatttagttttaaaaaacctattccatgca

SEQ ID NO: 106669 - DNA, 1009 bp, Homo sapiens
tttctttttgttgttgttgttgttgttgttgagacggagtctcgctctgtcgcccaggctggagtgcagtggcgcgatctcggctcactgcaagctccgccttcttggttcacgccattctcctgcctcagcctcccgagtagctgggactacaggcgcccgtcaccgcgcccagctaattttttgtatttttagtagagacagggtttcaccgtgatcttcatctcctgacctcgtgattcgcctgcctcggcctcccaaagtgctgggattacaggcgtgagccaacgctcctggccctaccacatgttttttatccagtcatcagttgataggcatctgggttgtttccactttttgacctcttatgagtaatactgctatgaatatccacgtactagtttctgtgtggacatatgttttcatttctcttgtatgcatacctagagtgggattgctcctaggaatgtggtaactccatgtttagctttttgaagaactcccagactgttttccaaagtggctgtactattttgcattcctaccagcaatgatgagggttccaatttctctgtgtgctcattactccttgttattgcaccttttttttttgagatggagtctcactctgttgcccaggctggagtgcaatggcacaatctcaggtcactgcaacctccacctcccaggttcaagggattctcctgcctcagcctcctgagtagctgggattacaggtgcctgccacgatgctcagctaatttttgtatttttagtagagatggggtttcactgtgttggtcaggctggtctcgaactcctgacctcaggtggtccatctgcctcggcctcccaaagtgctgggattacaggcaagggccaccacacctggcctgcactttttttaaaattaatttttttttttttttttggtacaggctgggtgtggtggctcacacctgtaatctcagcactttgagaggctgaggtgggcagattgcttgagccg

SEQ ID NO: 106670 - DNA, 1048 bp, Homo sapiens
agacttctggtttgacctcaaggaaacctagaaaggtctagtaaaagtgggggaagaggaaaaatgcaacctgtaactttgcaggccattgcagggatgactccctaaggatcaagactaaataaacttttttcttgattggctcatgcttactttcttaaccccgtcactttccatgcttggtttcaaccatcctgagctctctcttacttcttgaacttgctgagctatcatgtcttcagtccttggcacaggctattattttctgagaaatatgcctttctccccatattttaacggctcctaacattcagcggtgttatcatatccatttatagttatttttaaccacccaaggctaattagatgttcaacccctgtgttcccataacaccatgaacttgtccctgacagtctactctgttttattattgctcatttatttgtccatctggcctaccaggcggtgcagtcccagagggcagggaatgtgccctgcttgctgttatatttccagcatctagtatagccctcagttacacggagtaattttgaggaatatgagtgaatgatgtgtgagagttagttcccttgtcactcaaacacaatgtgttttggcattctatttaaagtttctgggctgcctagaaccgactaaacataacatctttgttttgacagtagactgttcactaaaaaaacggcagaggaagacttttcaagttgagtttatcatttggtgatccggtttcttttatactatgttgctatgaaaatgctccagtggcttataaactcgaggtgtcttaaagatgaccgggccctgtgtctgtaaaagctcatccttcacccattcatcacatcccaaatgaaaaacctttcagagattgcctttccatgcctaacttttgttgtgactgagcttagagtaaaagtttttgtaactgaatgtggcttctggggaggaaataggggcagttttattgttgttccataaattagtctgatgtcagaccccttgaaacatgagataggagaagaatctggt

SEQ ID NO: 106671 - DNA, 1022 bp, Homo sapiens
cagtggtgcgatcatagctcactatagcctccacctcctaggccccagcaatcctcccgccttagcctcctcagtaactgggactacgggtgggtgtcgccaagcctggctaatgttttacattttttttgtagagatggggtctcactatgttgctcaggctggtcttgaactcctggccgcaacggattctcctggattggcctcccaaaacactgggattataggcaaaagtcaccatacctggcctcattatttatttttaattttttgtttgttgtgtgagcttggggctttgggaataaataaacttctctaaattttccttgtgttttcactgagcaactcccacacataatggttgatttatggctagtattgagctaatattattttcctttgaggctgcctcatttctctgaacactgatttatttaatgctttctgagacacttcagtttggtgtgggtcacaataaacagaatgcaaactggaagtaatttagagtgagctaccgtagagatgattttattgccacagagggtcttgagtgcaagccaaactttgaactgtgagcagacctctgcaacgcagctggtgatggggtgtgttaggattgaacttgggcatagaactgcaagagcagttccctagaatagcttgaaatgaataatctaaaatgcataggggaaagtggtcataatgtaggtacatactagccactggcttccagaaggaagcagctgttatggtggcaagtaaatgatgtttggaattagaccagagttctgttcctgagttcaagaccttggctagtccattctcctttaaataaaaattattatttgtaagattgggatgagaaagcgtgtgggatcattgtgtgattcccaggacaaactgcatttgaaaaacattcgaaaaaccttcaagcacttgtaacatatgtgtgacttgctagtcctgccctcatgggcttttggagattttttcatcattgttttatgtgagtttacttgggc

SEQ ID NO: 106672 - DNA, 1160 bp, Homo sapiens
attttcacctttttcactaacagaagcacattacagcttcccttttggctgtttgacttgctagcctcactagtcttgcactctcgggtcatcattaggtaaaataaaggtttcttgaacacaagcactgtgatactttgacagtcgacctgctcactgaggtggccgatatgtgattaatgggtggtgagggtatacggggtagaaatgctgtcctaaaggccggttcccctttgagctggacacagtggaatggtgagagatttcatcacatcactcaggacggtgcatgatttaaaacttatgaattgtttatttctgaaatttttcatttaatatttttggactgtggttgaccgtaggtaactgaaactgcagaaagcgaagccgtggataatggggggactactgtagctgtagtatttctagaaattcttttcatgaaaggaaatttcagttcacaaagctcctgggaatatttattttgactgcaatcagcatgaatctgcgaagtttaaggaaacccagagcatccttcctaagccatggtaaagaggcaagagccatggtaaagggcagcacccctacacctatcttggcccgaggcctacagttggcggcttcctttggaacttcagagtgtctttgatgtgcctttcagaatgatgtctgctccatgggtcctgatgacttatgtttcccgggaggaagaaaggcatggaatgggcgaggggttgtcattttcagtgcttctgaggctgtgtttgtttgtttgtttgtttgtttgtttgttttgagatggagtctcgctttgttgcccaggctggagtgcagtggtgtgatctcggctcacggcaagctccgtctcccgggttcaagtgattctcttttctaagcctcccaagtagctgggattacaggcacaccccaccatgcccagctaatttttgtatttttagtagagacagggtttcaccatgttggccaggatggtctccatctcttgacctcgtgatctgcctgccttggcctcccaaagtgctgggatgacaggtgtgagccactgcaccaggccaaggctatgtttttaaggtgaagaattgaagatgcattttagaaatgagacaaactatattcctttcaagggctgttgctccata

SEQ ID NO: 106673 - DNA, 2055 bp, Homo sapiens
ttagttttcagaacctaacattcaatacttgattgagaaggcaagtgtgctttcgtttgtccatgtgtgaccattcattcaattgtttatcaatcttttgtttagaaatcagcagattaattatcccaacaaacatgtattaagtacctactatatgccatgtacttgcaaggtaatgaaggtactgcctggagccctcctgaaatatgtaatctcatggaagagaaagaggaaagagctaaatgtgtccacaaataacaaaacaaagtcaattacgaggtgtgtgtgcaccatgaagggacctaaataggttgctggagttgaaagtcagtagacctggggagggattctactccttgcattttgtggagtgcgggctttccctcgctggctgattgcagaaatgcaagagctccaagggagagctgccatcatcttccccggcgatagactcccaccattcctgacagagatgaaacctttattagatccttggaaataagagaaggaaaacacccatcagttcattcgattctctccagggagccacgctggagttcgttttccatttgttgttgtggttacgagtttcttgtctggagcagtttctgacttgtgttcctaatcaacactgtaatggaattactcatgtttcatttaacagtctgtcttaaaataaccttttggaagtactgaattacttttctgggtagaggcattactgccacattcatgagccgtttgggtgtatgggatagagactggataaaagagagaggccttctgctagttagacttcataggcagcctctctctgtggcatgaattgaatgtctttgggagaagggtcctcttgggcttgcccaatgtgccaaagtatctaaaattccaccattagcatgcatttctttgagttaaaatggctttacctaatatgtgaaattataggtaaagattttgatagcactttttgatggataaattcatgtactggctcatagttctgtcatacttgaaaccatgatactttggtaaataagtcctgaaataaaagaaaatgatagagaagtgtgtgtctgtgtgtgtgtgtgagagagagggagagagagagagagaggatatatgtgaggttgtgtgtgtaggagcagcagtgggagaagagttggggtggggaattcagaatgggggtgtatagcagggcactagagaggaaaggagcctaggtgaattttgaagacagattgtgagctcctgtagaaagaggaactggacaggagtcattaatttctgtgcaagacaaaacggaatggaatgtccagtgtatctgttttgcctgcataatatccatttcccttcctttggtaactgggcgccactttttatctgggcaactgaccttctccctggcctcagggctccagggctggccatgtcactaggccagtaaatgagagcgtcccatctttagtttgagttgagttttccatcacagctgaaagttttttgattgttcaggatttctgcaggatggtgggactgggtagaaggtatttctggaagacctgtaatttaaattgttctttcccaccccattcatttctcttctctgtcacctttcttggctccagtcctctgacttgggtaagcagtattatttctataggaacttgaaatggatgacgttggagaactgaatttctgtcatcttgataaagttttacataaagttttctcaccttctttttcagcttccccttggaaatggtgacaactgttaccatgtcctagtggtcttaaatttttcttctacacttgacctgctgaagtgtccggaaacaagtttagggtcccaccgtgggcagttatcccagttattagagcacatcgtcactgtctgtgctgggaatgctgtgtgaaacctttttacgctgctctgctgtctgtgtgtagcatagtatttcagtgtaaatgcatttcttaataacctacccatgggccctgtggaccataatcattggctgagttctcctttggaattcccaatatccaaatatt

SEQ ID NO: 106674 - DNA, 1081 bp, Homo sapiens
gtagtgcttcgttctttaaagcaatcaacaaccgtgtgttggccccaggctggattaggacagatatttcattcccagatcatgggccccagaattgtcagactttttgacgaaaggaacttctattcagtcccttgaatcattgagatttccactagctcagcagcacaggttgcagggagagagcagatacgaatgctgccgcctccctctagagaaggggctctcatggcagcaactggtggggaactgtacgaggcaggacttagaaatacagctgctgtgtttcccaagtggatgatcttgcagctttcccaaatcaaaactaaaatgcagttaaattttatgagcttcattcatccttttcctctctgtagatattagtattttctttcaaaaagtatgttttcataagctgcctattaaaatgccaacactcttagcaactggttatataaatgaaccattttatgtctttgttttaaaatgatcaaatcaaatcactatagaattgaaatctgaattattgtcatttcttagagacataaaaagatgacagccatatttttctttataaaagagttctgtaagattctgtgatgctctgagcattctatgagcagtcctgtgattttgagggaaagatagtctgctggggttgttagtgctgaggtgcggttgcttaagaaatgaagtgcttgctttcttagctgaaaaacaaaacaaaacagaacaaaaaatccaaattatgtagttcaaagactggaatcctctgggcgaaagaaatcatttttgactttttaaaagacttgatttcatggatgccttccatgaaagtcaggaggtctgagctgatgatgatttcaaatgctgtgtgaatgagaggtgaggaataaatactggtaaatgtgaaattctaagccttagattgatatacattaaaagaacttctatgatggagtattgtgtaccagtcattgaggtaaacaccattacatgcatcatctcaactaatttttactaccaccttagagaatgaattttatcatgactgttttatgtagatgaatatgaaagaagg

SEQ ID NO: 106675 - DNA, 1031 bp, Homo sapiens
catttcatcaataaagcagaggcacattgacagatctctgcagctgtgctgtccagtacagttcccactaccccatgtggctatttaaatataaattcattgaaatgaaatgaaatgtaaaattcatctccttagtcacagtagccattgttgccattggcgaccacattggacagtgcagattatggaaatttttcatcactgaaagtgttttttttttggatagtcctgttctagagatttctaaaaccttgtttgttcactaagcgtcctctatgaacgtttaagttctactccaaatccttctagatggtgatttccaaccatgactctacattaaaatcacctggggagtgtttgaaaatgccaattagaatcagaattgggagggggagggggctcggacccaggcaccactatttgaaaaaatgccctcagtgattccaatcagctgccaactttcacaactaccattgtagacaataatactttattttttaatatacaaatcagtgtctcctgaacttagtacctttcttttcctttgtcctcctttgaattctgcttagagagaggcagtggagtatgttagatctctgcgttggggagtcagttctgcctcttactagctgagtagcttttggttagttatttagccagtccaggcttttgttacttcatgtgtaaaatgtggacactggtacctgccttgaaacaagtgaggattaattaagataaggtatatgaatcactggtgacagtctctggcacataagcccttaataaaaatatattttatgatataattttaatatttcaaatgtatatgacaagtaataaaatatattttaaaatattacatgtttaatagtatagaatatgctattttaaaataacattcttgctaagataatactatatgatttgacttcatggattttgctctgcctgttagggaacttttaaatattttctttaatatatccaatgacgaattaaggtgggaatttaggcactcctttcaagtgagc

SEQ ID NO: 106676 - DNA, 1045 bp, Homo sapiens
agaataaaagttgaaactcctcagtaagatgtatgagttcttcagtgactacttcctgcttattctctggcctcatcttgaactccctgccttccccttgagttattaaacgttgggttcctccttcatgcagtgttttgtccattgctgcgctgttgtacaaggcatttcttgggccagcagtgctctcaactccttaccctctgcccctctgcatcttctgtggctaacgtggattcactgtttgggctgcatcttctgggaagtctttcctttctcccacgtctgggttggacccccctatttgttctgactgcacgctgtgcttactctctttaacactcagccctttattcagctgtaaatctagatgctgttccatcagaccaggaaacttaccatgtttattatcaggtctccagcacctggtatggtgcttggcaaatggagcctcagtaagtatttgttgaattaaattgagacagacatagaaactaaccaaaatagcacagtgaatgcttggtagaaaaatgtatgtgataactcatggaggactaattaatcagtgttttctggactgggacagtgtttgagtaacatagaatattgtgtgtgtatgtgttttaaggactgcagatttaaaaataattctctttaacaaaggaaagtcaaagagagagacacacacacacacacacacacacactcataattttacttagttgttttctaactgcagttaatgcattatgtcttttggctttccctgtgtaactagaatggaacaattagttaccatggtctcttgctttggaattgactgttttaagccattatcgtagtccaaatttcttttacgattagcttttcttttttattagaccattgtgtcttgttctattacatttgcaatgtcattagcttaaaaacacaggcaaagcctccttttttgttactgtgataaaagtggtgtttactgaggccacagcagtagttgttactttgatgacatagagcagaataggaatggtccaaaagagttgtg

SEQ ID NO: 106677 - DNA, 1081 bp, Homo sapiens
tgtaatggtatatgttcattgaagacatgttgctttggacttgtgaatcactcttggccacctaggaattggaaagcaggccagatgtgatgtgaaagcaagccctactatttgcacatctgcagctctggccattatttacatccgtcctccaagatcccacatgggcttagggaaaaggcagagcagggattcctgaaattatgtcaagttccaaattcacagggacgtaggctaggcatgggtgacgtggcaaaataacttttattccttttttaatgaaaacaattcttaaaattttcctaaggaaaaaaattgtgtggtaaaaataatcagtaacctgattgattgttttgtacttggcattgtggtaggaactctaggaaatagattttaaaagattcttcattttatcagtgaggacacagaggcacagtttaaataattcacccaatgtcctaccatctggtaagtggcagaaccaagattcatacccagtttcttaaattctggagtccagtgtgcactatgacctctcatatggtgaaactggggaaggaggtgtgtgtccatcgttaaaaatggaaggttcacgaagcatcctcagtgcttatacgaagcatcctcagtgcttataggtcagctctggcacattgtacaggctcaataaatattttttattttttaaaagtagattgctttgggtaggatttttctcagttttattgccttctcataaaaatagagattaggtataaaagctgtcagtactgcaggagaagccacctggaggtgtaacagtaatgacagtgagaaagagaataaagataggttgttgacaacagtgtatgcaatgtgtgtgtcaggagaagcaggctgtggaaggctttatatagctttatatggcataccacattgctcccatgagccttggactagtggaatgaataagaaatgttctctctttcatttaacaaatatttattgagctcctactatgtattaggaactgtgctgggcactggaaatagaacagaacaagatagctaacatccctgcttttgaggaagtttttttcctt

SEQ ID NO: 106678 - DNA, 1251 bp, Homo sapiens
ctctctctctgtgtttttttttttctctctctccttttataagattttccccaggtgtggttttagcattacacaaaaagcctcaggaagatttgattccaaaatcagacttatccttaaggtggaaattagaacaactgcgatgcctcaaacagatgtttcctctgacacagtatgtgccaagaccttaatggtagttttcaatccacgacactggctttcatattaaagatctgggcagtgctggtggtcagaactcagaaagatctttgcctctgtatgtgtaccaggcttcatctgcataaataatgatctcacgtgtgtctggaatgtcatttttcacgtgtatgtagataccgttgtgactaataaaacagtttatttgtaagcattgctgaatccaaagtagaattggagggagagtcagtcaacacctactgaaagcacaactgtttatgtagggatccatgccatagttttgccattatacaaacatattacactggaaaaaaacttgagattcctgatcaagcttaattatctttggctttcagaatagtctggaatgatttaatatctttgagagtaatggctcagagactttccccaacacctacagctgtctttggcattgcagatgttgcaaatggggttttgtacaactctcatgcttattaaaaaacatttgtaagcaatataccatgtgtcttagtgtattagggctgctataacaaaataccttagactgggtaatttacaagcatgagaaatttattgctcacacttctgggagctgggaagtccaagatcaaggcaccagcagatatgatgtctggggaggtcttcttcgtcatagattgtgccttcctgacatgccagaaggggtagaagaaagcaaccttgagcctctttagaagagcactaatcatattcgtgagagcggagccctgatgacctcatctcttcccagaggccccacttcttgatactatcacactgggtattaggttccaacataggaattttgggaggacactgacattcagaccatagcactatgcagttggttccttttgattttaaagaccaagaggctaagaaggtgttcagaaatgctcttcattttgcctgagcctatatattaattttctgttgctgctatagtgaattaccacaaacagaatggctaaaacaacacaatttattattttatatttgtgaaggtcagaaggctgacgtggatgtcactgg

SEQ ID NO: 106679 - DNA, 1088 bp, Homo sapiens
ttgtgccttgacattgggtcctcagttgagcaggtaacccccagcttgcttgcctgcagtgatgtggacttcagttctgctctcatctcttatctaccataccaatttttataattaaaacaggaataaacaaggtgcttaatgtaatctgcaagggagaaacagggcgattgaacagaagggctgcattctggtttcaagcacagggcgggagagtctatatatggtgcagagggtgctaaaattgtaaatataaattcttaaatctgccaaataatggtctgtaaatagtgtaaaataagaatgttctcatttacatttaaatagtttagatttcttgtttttcactacaaaaatataatattagtgcaaatattatctggcaatgaaagtaaatacaccagacagagtcgttgatttcttgtatatagtcatctgttttcaaacactggcttatcacgaatggcctttatcatactcatgagttctatttgttaaagtggcaagaatcagaaactcaggaaatgcaaatgcatgggattaggaaattcattggctttgggttgaaagtgaatattttctctacttgcttgatacaagttaacttgctggtacatttgtcattgctattaagtggcccctttaacactattttctcttcctgccagacaagtctgaaataatgaattttttaacgtccttatcatataactgtagtttcttgtttccttgatgtgaataaggtagttacatagtacttagtccctgacagtaaaataaatattataccagaggggcacttaaaaatattgtagaaaaaccaaaatagagcttttaaaaaagtttaggcaacccagaacaacgtagaaaaagtaaattggagaaaagagaaacagagaagaaacagaaaacaaaaaatagaataaaaaccttaagacctaacacattaacaattttattaaaagcaaatgctctaagaacatcagtcgaaagacaagagattggcagcgtggactaaaacatgacccagctatatgctgtcttcaagaaactcacttcaaatgaaacaatataggcaggttcaaagt

SEQ ID NO: 106680 - DNA, 1047 bp, Homo sapiens
cagcttagaaagaaaataaaaaaaaaaaaaagaatacaacttatgttgggtaacttaagagagcagttgttttctttgtgcaaactgtgcctcaagttattttcagtgtattttaattaaagattgcctgtcagctctttggaagtgtcccattattgcaagttgaacaataataggtccatggggccaggagtaagtgtacttcagtgctgaagtagattctcaggccatcagatatcgatgtcagcttcttattaagcctgctcagaaccagcgtaggatacgaaacattctaagttgcttcgctttgcttcacttagctcgccactttaattcttccatatgtttctcatttggttttcttttatatgaagtttcatttaggataacatgcagttccccatgttcaccattcttccagtaaaccaaacagagacacgtggtctgacaaagtggaatgcttctgacttcttctttttaattctggcaataaattggggaaatgaatttcctgtcctttgggtaactcttattctctggttgtctcctttgttcttctatcggggaagggtattgatcacttctgagctatccaagatcaaccaaaatgttgaagtctcactgtgttgcccaaactggactcaaactcctggactcaaggtataccccaaccccagtctctcaagttgccgggactacaggtgtgagccaccatgcttggttccaaaactacatttaaatcccagctctgctatttctgtgacgtgagacaaattccttagttaggctgagcttcagtgtcctcacttgtaaaatagtgaagagcgtagtacccagtggaatttcatcatcaaaagcacatttaacttatacaaaatcatctctgcatccttagcataaaagaataaataaacgattgagaggatgaatgaatgatagttgaatgatgtgttggttgttccccatgatgtgtaagctcaagagtactctcgggattttaaattcatgtattttgatatttatcatacacattgataaatatattta

SEQ ID NO: 106681 - DNA, 1064 bp, Homo sapiens
tgcaatggcatgatcttggctcactgcaacctccacctccctggttcaagtgattctcctgcttcagcctgctgagtagctggggctacaggtgtgcaccacaacacccggctaattttttttgtatttttagtggggatgaagtttcaccatgttggccaggctagtctccaactcccaacctcaggtgatccaccagccttggcctcccaaagtgctgggattatagatgtgagccaccacacctggcctgtcggggcacttcttgattgagataaccactttctccctggaaggcttccatattgagtatcagcagcaaaatgcatcaaacagagagaagcattttgaaatcatttaataaaatatggtcttgtgaggatagagactgcttttgtttccttgcattcagctgcccttttttggatacgtctcaggttttacttactgatccagaaattcattgcttgtctccctaatattaagttaatggggaggttagtgtgggcagaactgagaaatgaatacgttttgatacattccaacttcccagcagctggtaaaagcatggtatgcattttagacttttgatattgaaacatttgagggatggaactcgtgttaaaaatttcgtcagcacaaagtatgcataggtgaatgaattaagatcttatctttgccctactaggaatttacctatcaatgcattaaacatgtacttatagaactatttatatcacacaagcaaggtgatgtttatggtttcagttgagctgtttaccacatcatgttgggttgggctatcattaatctgaagacttatttttaaatcttgagttatgaattaacaaagatgctgctgatgtgtcccagagtagaaaccacaattaatttttttttttttcttgagacggagtctcgctctgtcgccctggctggagtgcagtggcacaaatctcggctcaatgcacttggttcccggagggaacctccacctcctgggttcaagcgatttccctgcctcagcctcccgagtagttgggactacaggcacgtgccaccat

SEQ ID NO: 106682 - DNA, 1050 bp, Homo sapiens
atggagtttcagttttttctgatttgtaggggtctaatgcaggtgcttagctaaaacaatggcctcccataaagtttagctcttttttttttgtagacggagtctcactttgtcacccaggtacctcctgggttcaagtgattcttccacctcagccacctgagtagctgggattacaggcatgcgccaccatgcccagctagtttttgtatttttagtagagacaggatttcaccatgttggccaagcgggtctcgaactcctgaccgcaagtgatctgcacacctcagcctcccacagtgctgggattacaagcgtaagccaccatgcctagccagttttagcatttttaaagcacatagcacaatatctggcacacagcaggccaacgtgtacatgattccttcttctcatccctccctttcttgctctttaagtttgacagctccaattatacttatggtggatacagagaaacgtggtgttagctcattcagaaaggaagaggaattaactgaaataataatacaagccaatcagaaaataggatttgatttattactattttaatttatatgcagttggagcagatatatttgcataaaatgtttcttgaaaattgcactgtggtttcaccccatgtcatcacagatgagttttttgcagagataattagaccaggtcattggtggttttaaaaagcaaagatttctggtcacaaggctatcttcctcctcctttcctcttctccaaagatagatattcataattagatcctgtgatgagataaagagtacaacagatttaaaaggaaaagaatcttcatttccttctgggaagaagcaattatttagttattctttatttgaactttgaaaatcttggttcttatcttttaccaatttattaatagcattacccagccaatcagagtcacagatctataagatgaaaaaattagttgaatgcagcagagacccattgatgtgttgtctccacaactggcttgtgtcatagatggtaggctgagctccttttcctaatcattat

SEQ ID NO: 106683 - DNA, 1041 bp, Homo sapiens
agcaggtggtagtattacatggggtgatcagggtggactttgtcgagaagtcaagaattcagaaaaatatgcaaagtattgaaaaaagctagtttgtcttagaatctagctacaattgtttaagaactcatttaacaagtctttgctgagctgggtcatgtaggaatggttcttgtcacccttgccctgtaatggcctgtggttttttgagggagattagttagctcccaacatataattaggtgctcaagggaataatgccgacagatttccattggcattaagagcaggaaagactggatgtgggtaagcattctcccaaagatatatgctgagtgcatttgtgataccccataactgatacaatgagacactaaggcatttttccagggtgcagggagtctgtctagaaggttatgtggtgaattcatgacaggccctctgttcagagtcaaacagcattttgaatctgcgctctacccgtcaacatttggtgtgttgtgtcacgtctttgagatttgttttcctcctctgtgaaatgggaatattcatacttagcccaaaggttgatgtaaggattgctgagagcatttagtttggggtctcacacatgttgagtatttactgtgcagtggtgatcactgtcatccatcctcagtttgcaggatcatttgaggttttgcctcaaggtaaacctcactggcaaggtggctgtgataacagttagtttcttaaaggtaactggaacctaggccagaggagaggctgtggtaggaaagcactggagcgtctttctttctctacctgaaacagggccaactttccagaacagcatatggaccctaagaattcatggggatttttctcagcaggcagacttgtaagcaaatgacagggcagggaggagcagcttatggattcctgatagatcagtggttacaaggaggcacttttgggactgccatctgttcccatcctcctcagacctgacgcctcctcagactcctggaccctgagtctccagtgcagagtggaattcag

SEQ ID NO: 106684 - DNA, 1012 bp, Homo sapiens
agaatggagaaggggacaggctaatatgtattaaagaaagggaagacagtggagaggaagagttggagacaaaataattattagttgggtacataaatttttaatatggattcaaattctagctctgccatttactagctacttaatgttagaaaacttaagtcaactctaacaagcacctatattatagggactgtgagcagtatatgaagcattgcctaaaagtaacagctcacatttaccaagggctttccattgctagtcattgtgctaatgtaattatttaatttgatctttacaacaaccccatgagctatgttctgttaattttcccagttttcccagttaggaatttggaagtctgagagggtcagtccccaggttacacaactggttagtagagcgagaactctgataagttgacaccagtgtattgactgcagaagactgggaggcagacaaagagaatgtctttgcttatagacaggaacaggtggagaactgttaccgacccaggcagaatagaatagcagccagtgattcatccagggctttctgggctgctccaataagggacaatgactgcgtggggttagggagaaaggaaagttggaaattttctttttgtaatatttagccttatctgaagggcaaggttttgagtttctgtcccagcattcagtagaaaactttgcacagaggtaaacctaagtagttatgattcctgctcaccttactttaagtcccccagcctgatttttcctaagccggatccctgagcctgcgtgttccttccctccacctcactccacctgctgtgtttccagctgtactggcctcatgccagctcttgactgctgactgctttggcctctaagctgtaatactggcctcctgggaagcacccagaattccacagttattttcctctctttccccttcagcaattcccaaatttgcttttctcagtgttgtgctttcagctggctggctgtgctgcagtcacgctgtc

SEQ ID NO: 106685 - DNA, 1343 bp, Homo sapiens
tggggtcttgctgtgttgcccaggctaatatcgaatgcttgggctcaagctatctgtctgccttgggttcccaaagtactgggactacaggcgtgagctgctacacctagcctgcatcttcactttcttgatggtatcatttgcagcacaaaacttttatctattttttttcttttgtttgtggttttggtttatatttaaataggcttcacctgacccagggttttgaagatttacttttatatcttctaagagtttcatagttttaggttttacatttaggtatatggtccattttttttgtgtattgcataggaaagggtcccaacttcattcttttgcatgtggatgtgaagttttcccagcaccatttgttgaaaaggcgattctttttctgttaaattttcttggcacctgtgttgaaatcaaatatgcagaggtcttgacacactgttactgtccagtctctacacatgctgtccttctctcccacaaagtgtaataatgtaataatgcaataacgtgcctgataaccaaatgagtggatttcagcagtccccctttgtctgaaacctttgtgatcagagggaataaacatcttagaggcatgaagcccttgctcagataaggagaagatagagaaccaaagtgccataatgtaccaagtaaaaagcatcagatgtgccagaaaataagcagtaggaattaactttgagggttatcacaggaacactatgtagagtaagcacaagcagctcagctgtggacgagctttgctgtagattttgctgcaaacctctgcaggcctgagagcttgccgtgggtccagagagcagcagatgtacttggctgtgacgtcactggatgtgtcctgatctactccttctccttctcatacatgaggttatctgaggtctcagccaagagacaaatcagcactttacccacggacagcaccaaagctcgccatcttggccgctgccccagaaccttggaaacttctgcagtgaaatggattctgattatttttattacctttgttctttttttagaattgaagtctggaatacataaagtgtgttaatattaagtgcaacttcgtgaccttttaattgaggtattactgtgtaaccatcaccagattaatatatggaacatcataagtaccctgggagactccttgtgctatttcccactcagtgctctcctcttaaagaggtcagcactgttccggttcttctattaccatatatttgttttgcctgctcatgaacttcaaataaataaaaactatggtatgtactcttttatgtctggcttaatttgtccagtatgtttgggag

SEQ ID NO: 106686 - DNA, 1003 bp, Homo sapiens
tgaagtgctttcataaacaatgatgtgatgaacaatttttgtgcatacagccttatatatctctctgaatatttccttgagacaaatattacatgtggaattacttggttttagatctttaggttttggtacatatcatgctaatacaaattttcttatactctctccaatccttaaatctctgttcctctaacagaaaaccaaattccatgtgctctcatttataagtgggaactaacgttgaacagcagacactgggcctcccaaagtggggatggagagatggaggaaggggttgaaaaatgcctggtgggattgtgttcattacctgggtgacaggatcattggaagcccaaaccccagcatcatgcaatatacccatgtaactaacctgcacatgtaccccctgaatcttaaaaaaaaagaaaaaagaaaagaaaatctttgttcatttgatagcaaaattagttgtttaatagctcagtattttagtagttagaaaatggattcaagttgtcttaaatgtattcttccttaattttatctcacattttgatgccatgctttttgtatttaagggaagtactttttggccattgttcacctatcttgtgtgtttctagatgggagcttggtcaagttctcccttcgttcttccaccccatgtggtacaatttttccttgtgtatcagtaatgagtctgcacttggatacctcatgcacagtatcgctatgtgctatatgcacagtgtcactagttccttgttgtatctaagaaaaggcagcacatggcagggtggagagagttggtaggctttattcggacgtgtttttctttctgttacattgtgaattcaggaatctaattagttgaccatcaccttgaaatccctttaataaaacctgtggttggtttcttctactctctgtttatcttgctcttttcattcttgttcttttccctttaagataagtgtattctgtcttgcttttctgctagagt

SEQ ID NO: 106687 - DNA, 1515 bp, Homo sapiens
aaattgaaaacactgtgccttagataatagtggtgtcctatgattgtgagcttattaacgtcctaaccagacatagaatttttatttttctgtctctttagtttttcatgagttttatgtttactgtctctgtctaagagaaattgtggtatttggtaaaggtaaggaagttaaagaaatagatacaggttttatggtatgttatagttttttttaatgcacagtagaagttacaggtttatgaatttacatcccagaattcagaaggctgtggttttatttgtagatagaaatcttatttccccctcttgcccctgcccttttttttttttttttctggtatcagtctgctgtacagagttctaatatgtgctttatttttgtagtttttgtgtattactaaagtaatacatgtttgtggcaaaaattcaaataaaacacaggaatataaagtagaaaactaaatttttcctgttatctccttctgttctcaacctaaaattctaatcctccagaggcaaccagtttgggatatattttttcaatttttctatacagataaaaatatgcatatgatctttggaatctttttttgagatggcatacatacttattttactcatgtctgagaatcttggtttcaacttagactattcttaatcagtattttatatttattttaagtgcaccttgtattttatgagtttgcacagaagcctttgacattaactaggtactttattttcttaaattattaagaaatgacagtggtgtatacccattctgaaatgttttttggagaagagatgtgtaggatcaggtaggagaaattaatagtttactggttcaatactggttattttgttcaagctttctgtgtatcagccaacatataggtttggctgcattagcagttacctcaaatcacagtggcttcaatatagtagaagttcatttctaccttatgtaacggtctagccatgtaacagtcctacgctactgtgattctgcaaggttggggactgagattctgtctcatatattgctctgtcattatagagatattgtcctcctgtgcattctggctagtgagacggagacaagaggagagcaggtctcttctcttcacagacacggcttggaaatgacacactgtgcttctgctcacatctcataagccagaccttgctcgtgtggccataactagctgcaacaaaagcctttaatgagggcagccatatgctcaactgagagtttggaggaaggggagaatgtatttttggaggtaactcagtctttgctgaagatcatgcctttattatttttttaaaaagagaatcttgagacacgcttatttgagattaaatgaaaaatccctttgatgtaccaaatgaaaaaaaattgctatttagaatattttcttgtcctcatccatttatgcagtttgactgtcaaaaaatacaacatataatcttgctaataataggacatttacatatgaactttctgtgcaga

SEQ ID NO: 106688 - DNA, 1032 bp, Homo sapiens
aaggggttcttgcctttttaaagtgatggatctttcccatctccttgcccacattctctcctacatatcagatgattactttctttgcttatttaattcagccatctcactctgacccatggacattatatcagccaggtcaactgaaggatcactctggattagtgtggtggtttcagtcttttagaggctatgcttcagaaagtttcacagatgcttacttaatattagttgtacttttagcgtctcttggttttggaaaactgctatgaatctgataatgaatagtactagcctatagaggtcattatacattatatctttgtaatattatatttgttacatatgtatacatacacacatatataaatatatacataaacatacacacatatatggcatctgtatattatagaaaatacttttactcacatttttttagcgcacagataatttctggtgtacctgtagaatcccaaaccccttggaataaccattttccatctgtcagattttgtggttcatagtttttgggagcattgaattggaaggtcttgggcatcctggccagtcttctggcttttttcttttttttagaaaggagaaattaaagcttttagttctttaaactcagtatttcatttttgagtgtttaaaaaaaatcttaaagattcttaaatgtgtatgtacttgtgtatatgtgtgtgtttaagacttgtgaatccagttgctagttttaattctaaatctcctttcatttctaatgtcattaaaaattttatcccatttactacttgtataattttattttcttaacatctgccagtggtaacttgcaatgtattccaacatgtttttcttcttaacgtagcctcataggaattcttttggacataaaggtttataatgggcctcttgaatactttggttgccaatgctagacatatactaattccctgctcagtacttcccttggctctgactctgaagatgaaagacatagtcttcctttctcaacctctccttgactat

SEQ ID NO: 106689 - DNA, 1666 bp, Homo sapiens
tatatatatatatatatatatatattatactttaagttctagggtacatttgcacaatgtgcaggtttgttacgtatgtatacatgtgccatgttggtgtgctgcacccattaactcatcatttacattaggtatatctcctaaagctatccctccccctccccccaccccacaacaggccccagacaacaggggtttgtatcccagtcttccaacaccttagggctattgtcatgcatgttgcttgtcaagtattttgctgaatactttggagtatggttgcttttgtcacccttggttatattgtgtatcacgttgactcctgcaaaatagtggggaaaagtaaccttggtaatgtataattaacttatgaagtagaaaatacttctgtcccttaatctaacattttagtttgttggggcttattgtgctagcagcccaggcttctcttcccgttgtgctttaagggttttattgatggtgcttacctaagtcctagttcagtgattggtcagtgatgggtggtagcgcctggcatattaccagatttgtaataggtgctcagtaaatgacttcttaccattacagttatctgtctcattctttaaagagcaagtagttgtccatgttacaaacccattagaatagtttttttcttcttgttattggtttctttctttcctttttttttttttgtgtgtgtttttctgtgacaggggctcactcagtcgcccaggctgaagtgtaatggcgcactgcatcctctgcctcctgagctcaagctatcctcccacctcagcctcccaagtagctaggactacaggtgcatgccaccgtgcctggctaatttttgtaatttttgtagagatggggttttgccgtgttgcccagactggtcttgaactcctggcctcaagcaatcctcctgcctgtcagccttcacaaagtgctaggattagaggtgtgaaccactgcccaggctggaataggttttgttgtctaaacaaacgaggcgatacattttatttttgtttttctttccaagttaatgttttgtgctgttccagctgtctattgacaagtacaataggaggagttcaatcaatgtagcttattgggatagttctaaaattggaatctgggttgccattccagctgtatgactggccttgggcaagatccttcaaccatagtggttctcaacttgtacctcttataaatggatgggctgatattttgtgacttgttcaactcctgagtttttggctatgtgaatctgctcgttcttttaaagaagtgtttgcgttggatgtggtgttaaagttggaatgttcttgcaagtcctttgggaaattttggtccttggatctgtgctgggccttgttcagacatgaaatgagaaaaatattgttgaattttataaagcttaatgttttgaagttggatgcacaagaacatgtttctgacctcctcggtgtgtgtgtgtgcctgtgtgtgagttgggaaggcatatgatgagtttttttgtttgtttgttttttgttttgagacggagtctcgctctgtcgcccaggctgaagtgcagtggcgctatctctgctcactgcaagctccgcctcctgggttgacgccattctcctgcctcagcctcccgagtagctgggac

SEQ ID NO: 106690 - DNA, 1368 bp, Homo sapiens
gcagtagataattgtaataaagaaatcatgaattcaaatagtagttcttcttctaattttgcatactgtctttaccacttagtaactgtgtaacctggggcaaaatttgtaatttctttgtgtctgttttcttaattgtaaatgggactcgcgtaattccctctggacttctgatgagaattagtgatttaatacttgatacgctcaataaatgttgcttgtcattattttctattaaactatattgttggatttttgagaatgcatgaagaaacttaacgttaattgtgttttgatttttaaaggcgttatgtaaattttgttttgtgcttttctccaggcaagaaaccggtttgaatgtaattttcatgaaatgaaaaaaaaaaagaaaaatgaatagtaaatctgatgttagtatctgccatttatttcacatttttttttctgaggttgtatatgtctgggaacctttggctttgcttggtagaaagaggactaatgactccaattagaggacatcagtagagaagaagggatgaaggatgggagataggaaagaaatcttattttcagtaacttatgtgccagaaactgcactgtagccttttaccagtgtagccttcttagatactctgagagagataataagagaagaatggattgttacttaatttttatcgtccctgaaattgaggttgttagtgtccttctctggtgtgttacctggggaaaggaacaatgattgcagttttactttcaggctaaaagctacaaatctgagctcacatttctgtttgtttctgcctctgaccctgggtggctttgtgacctctctaagcctcagtttcttcagttgtcaaatgggtctaatagtgtttcctatttcctgtcattgttaaagaagagcccatgagaatctgtttcctaacctagcttggtcataagaatgattgtaatgcattttttaaaataatgggacccatcccagagctacagaattagaatttccagggattctgtgattaagtgccccaggtaagtcttactgttaggctgatttgggagacattaaaacaatgtgtaaagttgaacagttaacacctaatacataaatgttagctgctgttataattatacttaacattaatttaatgttttaggtaagttcttttatatacgttctttagatttgctttggtaggttttgataatttctaaaaaataaacacaagaatgccttgtatgccacttaataaaatgttggtatgccacttaataaaatctgattctgctattattatcttaaacaaaatctgattctgctattattttatgtccatcaaaaagttatgcaaagttttctctttt

SEQ ID NO: 106691 - DNA, 1076 bp, Homo sapiens
ctggagaagaggtgctgaagttttgaatgggggactctgtgtgttgtactagctgtgaacccgtctagggaacaagtgctgacactgcccacttagaagaagacacatttgttaaagaagtacagttgcctttatgtctggcattttagttaaccagtagcaaaataaaggactgatggatttattatcagattatgcccaaccatgcacatattgccaagtcctccatgaacatcacagatatctaaaataaaagagacgtttttatttgttttaataaataacattagctagcacctccgtttccaaccattcagtcctgtttggaaatgccacagtgatgggtgtgtgttattttgaactcatgtgaaggttccatgacaacggtaaacattcatattgcacattttcataaggcagtgaatctggatgaggcaagtggcctcagccggcaataaagatgtgttatgaaatttcccatgccagaagagacactcatagctgggattggccttttcaaaagcagttgatggtgatgagtgataactccccttttagttttggcatcagatggagtttgtagctcattggcttcattgtgttgcctgggtatctcctatttagacttaattggatggtttgcaccactgtcctaggtggttgctagtcttttcaaggactatccttactgaatactcttggtattgtatttctcttttcttacacgaatcctcaattacaacaacaaagaaaatgctaacatttgacatcactggtaaactaagaatgctttagattaggatttccatttgctgcctttccaaatttgataatttatatttggatatccttttagcatatttttggtggaatggttcactttattattatttttaaaagatggatgtgtcctagctttcaccaaggaacaactcagtttagatggaatgttttataaatatgatgtaatggaaattgaacaggatttggagtcacaagggcctgtgttggcatcttagtgccattatttattgtgtgaccttgggcaatcacatagcctttctgaacttccattt

SEQ ID NO: 106692 - DNA, 1186 bp, Homo sapiens
tacttaaattgacaaataataattgtacatattcatggggtacatatgatattttgaaaacatataatgtatagtgatcagatcagggtaattagcatatccatcttctcaaacatttatcatttctttatgttgggaatgttcaatattttccttctagctagttgaaactatacaatatattattattaactattactttgcctttggttgctgtcattttcatttgcttttctatgtcagtatattttgaaggactttgtatactaagtgtttcaaaataataggaacttttgtgaaatgagacatagcaaatgaaggagccatgaacttactcctattttctatacctgtcaacaatttgaatttcagggttcttttgttttgttttgttgtttttctttatttgtgtatataatttttttacacgtacatatgtacacatacaaatgaacaagcctgtgtgcatttaatttttacaagtaaatgcctactttttatgatgccacactaaactcttccatattactgcctttccctagggttttgtaaaatagtgctttatctccaagctactacccagccgccttttatttaaagtgttcagtggaccattatttgggatgaataaaaattcgatgttatgccacagaaaggtaggattttggggagaaacaaatacaggaaacaggtggaaatagatacattgagaagaatccttttgagcagggatttttgtagaaaacattaaaccaaatcgtatatcaaactctctggctggtggtcagtctaatcacaagcatttattcttaagtgtcctacagagagaaaaagctgtttatggctgtatcttgagttaaatatttggatttggactgcaagttaattttagggagaaaacatctgtctttctgaaaacagtatgcctttaaaagtgatccctgtggtagaatgttgttgaaatgcttaaatgctttccattaagttttttttttccccccttttcctttctttctttttttattttttttggacaggattttactctgttgctcaggctggagtgcggtggtgctatcatagctcacttcggcctcaacctcctgggcttaagtgatcctcccacttcagcctccctagtagctgggactgcaggggtacaccaccatgcctggctgaattttaa

SEQ ID NO: 106693 - DNA, 2552 bp, Homo sapiens
gaccctttcattctattccttttgatccttaatttctgattttgttaaagctccttaaggcaattttcattttctctctgctttcctggtaatgttggcagggtgatgctgctgatctggtctgattcccaagctggaggtaatggcgtgtgtcctgccctagtgctgctccctgatggggagcatgctcagtttcctgcattcaggtacgagcagagacttggcaggatccgccccgttcagagttgcaggaagagccctggatgcctgtcgcaaattggaataagtgggagggagccacaggctggtacaggtaagagagctcaagctctgtcttttcacagctaaaacttagcccttctgctgtgattcttaggagggccaggggtgcttcctgcaggaatgaatgacttgtaggagcttactttacatacgcaaggggctgggctgtggctgccttctcaagttctcaagtccgtgtctaggggctgctatcttcctgaattgctgcgaattttactgctaaggaaccatcttggctgagtttgttttcattctactatatgaggttgggcttgcattcagactgggagcagtctgtggcttccctccttgtcagatactttggaggtgggagcagtgttcaggaacctgattctctaggcagacacaattgcgatgtgagagttttctctctcctacagctttgcttgtttgtctccctcgtatttgtaaagcagtaaaataccaacctgtaagattattgtttagtaaacataagcaaatccagacatttattccctactattgctatatttagaaatgatcattaatccatatcagagaactctcacaaatatatgttatttttgcattccttagcgtttaataaatatcatggggaaacattaagaagtatgttatccttttgaggagaccagtcttggtagttctttttgtgtagtgaaaatgatgtattaaaaaaaataatgaattttaaaacctcgtaagtattttctgcagcaaaataaggatgtacttgtaaaagtgctaattattggaaccctgtgggatagcaggcatttgtgagtttttaggcattctgggatgtatacatgcaaaattgtggagggtgctgaggaaatgagaacagtagaattagtctatacaaaatttgcctttttcgcagaatctggggattggaccagagccccgatataacttgaacagaagttatttgtgtatgtagataaatgattttcaccgttctgaagcttaacagaaatattttcaatagggaaaaaaccttgccgttgcagttctttattttccacagcgatagcaagccacaagtgagagaatgtttttaattgaaatcacataacttcatctcagccaacttccaattgcttcccctttgcagcgttttgccagagtttcaaacaagactgtacaagaaaggaaaagaatgtggtattcacagatactaaaacattgtaaaaacaacgctcatatctccagccaatttcgtcaccacgtgactctcacccttccaccgaggatgaacagaaatgtcatccatacactttctctgagctcccagtctctggtctgggcctgcatggtggattcctcatcattggaaagaccaccctgggctattttgctcttccttttgtgtggcgtcatcttttattttttccttgtctctggattgttttggttagagaggaatagtctttatgttgggctctgcgttgcaagtagtataaatgctcttgagcaaaaataaaaagaggatgtttactgtaagggtatctgaagcatacccaaggtaagggttatccagtgtaggccagttttggaaacaccccgggactaagactttgaaccttatcaggtttttctgtaggtatttttcatttcctgctgaatgcgctcttacttcattcttctgttctctcaaaatagactgatctgcttcccagagcctggctgtccacactcctagcatatacttcttcctctcaagggttcatccagactgaagctggaatctcttagttctgattgtaaataccagggagaaggattctcaatggttcataataggtcagatgtctgcacctgtggccagcgtaatggcgttctatgcgaaaatgatggctgaaagtatgtcttttgtaacctataggggtaagaaaatggctagaagactggggagacagggtattcatctggtaacctggtggtgttcaccacagttgcctttttgtgtttctttgtggggcctcttactaactccctcttcacgccaatttcaagttcatcaaaacctagtcaaatggtgagtatttatatgtgtggtgttggacagacagatatggctaagtaattctgtactagtatattatgattaagtgaacatttattgagtgcttaccatatactaagccctttttcaagtctaacactaggcaaataatacatgactcttttaatttttgctcacacctttatcacctcttcccaattataacactgtgttttct

SEQ ID NO: 106694 - DNA, 1006 bp, Homo sapiens
tgctctgtcacccaggctggaatgcagtggcacgatctcggctcactgcaacctccaccttctgggttcaagcgattctcctgcatcagcctcccaagaaactgggactacaggtgtgcaccaccacacctggctaatttttgtatttttagtagagacagggtttcaccacattggccaggctggttttgacctccagacctcaggtgatcctcccacctcggcctcccaaaatgctgggattacaggtgtgagccactgcgcctggcctagaattattttctgtgcctgattttaggcaaatcgaaataagcacttaggaagtttgagtaaatcaagctgactggcaaggataaaaacaaaacctttcagaaagtaccttcttttccctctgtcttagggaaactgatctctggagaaggtgtgtgtacgtgcaggcatgcgtgtatgtgcgtatgtgtgtgttgcattacatttgataagaacatttcatgagtgctctttgtgtgtcagaaatttcattcttatgctgccctaggaagtaggcattgctgttatcctggttttttaaatgaggaaactgaactctagagagaagttacttgcccacagtcacacctgagttagaaacggcatccaggatacatacccaggactcctagtccaagcttccacttgccactcctgtactaatattaagacttcaagctgtggtggcttatgcctgtaatcccaccactttgggaggccaaggtgggaggatcgtttgagcccaggagttcagaaccagcctgggcaccatagagaccctgtctatacaaaaaataaacaacattggctgggagtgttggtgtgtgccagtagtcctagtcccagctgcttgggaggctgaggtggggggattgctttagcctgcgaggttgaggctgcagtgagccgagattgcgccagtgtactctaacttgggtgacagagttatacctctccccaccactccccccaaaaa

SEQ ID NO: 106695 - DNA, 1070 bp, Homo sapiens
taaatcagaatcttggggatatagcataggcatcagtattagtgttattcttatttttagtataatttttaagctcccctgtgtattgtaatgtggggttctggttaagatcccctatacggagtacctaattttgttgaatcatattgatttccattgcagagaaagttccaggatgaggcgttttcttgtcctgttacctgcttaagctttgtctccaaatgctgtccaaagaggggatgggcagcctcaagaggcagtcaccaccttatgtgcctggtcaccctccccatgtggcaggtgctgcatccacataatgaccagcatatggccctgacctcctggagcttccagtctagtgaggagagggaggcaggctgtaaacaattaaactcttcactattttgtcaatgatacttgtgaactgaatggtgggtaggtgatctgtcttagccagggtggtctaagacctggagaatgagaaagccagagataggattgatggagaaagggcattctgggctgagggatggtggaagctacatcctagaagtgggcagagcttggagtgttggatgagggtaggtctggggtagaacagtgggagctgggttgggaagggcagcagaggccgggccgcagggccctgaaggccgtggtcagggttttggattttgttctaagggcagtggccattcactggaggggttttagcaggaaccaagtttcctgtcacccagtttgatatatcagagggtggatgtctctttgaagatgtggtaggtgagaaggggcctgagattgtgtgaccttatcacccttctaatcctgagagtcaagcaggcaaaacagaaactgacatagggttggtcattccaggccattcttgccctcatgggctctccttgctgcatattttgtgaaatatcagccatcagggtagtggtgtctcattactgtctggaattagttggaaagttgagaactgaatcaaaaagttatggcacaatcttgacagcttcctcaaagattaagtagtctgtgctcctttctaatttgctagatttaca

SEQ ID NO: 106696 - DNA, 1021 bp, Homo sapiens
ttctttttattattagatgctaccattttcaagatgtgccttcatagtaacagtatattttcagggagaagaatgacacacttctgcattattagctaatggaaaacacatgctcaaatatagtgatgttaaagaaaccaagtgagcaaaagcaaggttatgtttttaataagagaatgccttaattgtggataaaccatcccagaaactcttttatttcggtattttaaaaacacttggagaactctttcttatatccggaaagcaccacaaaaatctgtcagatgaaaagtctgttctgatctgtgtggtgcattcctgcctagatatgtagtcatttactactgtgtagtataatttgagtagagtgcagtcctcaactaagttgttagactacattttgtcctttttctgtaacttctgagtagtgtactctaaatttgctctgtagacctgagctgaggtgcaaagtctgtttttgttaacctgtgcacaatggtataaatatagaaattgagacttagaatttagaaatgtaatagtaattggctgagtgtgtaatcctagctccttgggagactgaggtgggaggatcatttgagcccaggagttcaagactgatgtgggcgacagagtgagaccctgtctctaaaaaaataagaaaaagaatttttttttttttttaaggcaaggtcttactctgtcacccagggtgtgtacaccacaatgcccagctaattagaaaaaaaaaatatttcatagagatgaggtctcactaggttgcccaggctaagaaaaagaaatgtaattgcacaagacagttgtctatctgttgagtttaataattaaaagttgggtcttgtattttgtagggtgtgcttgtgttttttctggtcattaatttttattatcttttgatactttgggaaataagaaacagctggtcctttctcacaactagtttgagaagcagtgctctaaaacagtagttctcaaccctagctgaatatcatatcattta

SEQ ID NO: 106697 - DNA, 1001 bp, Homo sapiens
tattaggcatttgtcgaacattaggctcaaatcctcttaaggatggtggccttcccagagctctcaaactggtagcctgtgggctggatttggactgcacctgttttgttttgtctgaggggagctagagtcagcactgtgttttaattgaattgagcgtgaatgccttgaggcttggcttgaactctcaggtcccctcttagtctccataattctctactttttcagacattgtctgcttcactagttgaggttatctgcatggcccctgatggcatttgaatttgtgatgaaaccaggaagtaccccagtttgaatgtgttcatttgtgggttcagattaattagttaacagatcgatctttgttctgaaataaatgttgctggatttatgttgctcactatgcaacagagagttgacttttttttccaggcttttcacaggaggccctctgttggtagaagtccccgccgggtttatgctggctgagtatgtatgctgacctgtggatgtagtcatatggtgcatctcttgaaggctgatgtttggttgattgtagtatgccctgaggtgattttgatcatgaagctaaacctaatggagaaaacatgaaagccaattagttgttaataagcattaggggagaaagcagggtctaagatcctcttttcttccttctttgtctccctttgtcctttctaatggtctctctgggtttaaagcaattgctttctgggtccatgtgagtgttttctaaattgccaagaatattcaggagtgttagaaccccttgaattgaagataaagaccttgggatacacagtcagtggtagaattcctccatggtactctactcacattgccttcaaaaaatacgatatgttccgaaggaatttctcctccctgtatttcctctgttaactgtcttctgctgtgttttcagtttgttttctgtggaacacctgcctgaaggatgctctttgcaaataagtttgcaaaat

SEQ ID NO: 106698 - DNA, 1129 bp, Homo sapiens
agaaataaggaagcacaaatgaactgctttgtccatagagaggaaagccaggaagtataaaatgccattagttacctgatagtcatcattttaccaagcaaagagaaggcagttttcaggaaagcatatggaatatggctcttgatggaactacgtgccacttgaaggatacactggataacccagagggatgattcacaaccagtgcagctgtaaacttttcttttaattaggtaggaagcacctgtgtgttattcatcgtttttcctcttcccagtccagtctcttcagggattttaaaaaaagaaaaagacccaaacaatttggaatttaaattttctgtaggagaaagcagccagtgtctaaaaaggggcaagtgtgcagatcatctgctggaagacaaggtgagaagagtaacttgaacgggtgtgaattttagagggcaaatgactgtgcacattgcaaggtgtttggcatggagcgatgtgttagcatcccgttggtgtttggatttatgcttctgaattgagtatttaaaaatatttaacagaattaatgctaaatatgtacaagctgctgttcaaatgtgaacagtcctagcatttgtatctcctgtgggctctgagcattaccatgagatggcaccagcatcctttcatgacctctgtgtggcaagaggctaagtgagactggtcatatgattagcagtttcttgcaagggactgatcaacatcatttaccacacaatttgcctaagagattgactttgtccttgaatgagttgttctaaatgtgcattataatgctagcctaaatatgctttgtaaaaaaattatcaactatcatttattgagtgcctactacatgctgagagctttacaaatttattcctgtgtaactttcactactatcccaagggggtgctattatcttcattttatagatggggaagttgatgctcagaaaagtaacatatcttacccgaggtcatgcagcaggttactctaagcaattgaactctgttgtacagtgctgaaaccctttgtatatgtacatatatcctgtaaatatccatccaccataagcaaatttgtttggcacatttgggttgatactgttctcaactttg

SEQ ID NO: 106699 - DNA, 1031 bp, Homo sapiens
caagagtataatgcacaggtgaatatatgttcccaaccccagatttttaaccaagagaagcaaaagtagagtgcagaaaattgacctgagagagttatgtaagtttcttcttaaactacagatgcccttctaggtatttaataaaaatgcttaatgataggaattcatgtttactgattctgaccctacctcagtgtgtagatattctctttgtaactgtaaaattagtttcattcttttatttttctgagtagctgtttaaaaacaatagacttcgttagagcatttttagattcacaataaaattgagaggaaggtacaaagatttcctatgtaccctctgcttccagcctgtgcacagcctcccccattatcaacgtcccccaccaaggtggtacatttgttacaattgatgaacctacattgacacatcattatcacccaaagaccttagtttacattagggttcattcttggtgttgtacattttatagggttgaacaaatatgtaatgacacgtgtccaccattataatatacagactagtttcaccgcctaaaaattcttggtgctctacttatttatctccccactcccctaacttttgatctttttactgtctccatcgttttgccttttccagaatgtcagataattggaatcatatagtatgtagccgtttcacattggcttctttcacttagcactatgcatttgtaagtttcctccatgtgttttcatggcttgatggtgtgtttctttttagtgttgaatcatattgccttgtctagatgtaccatagttcttttatccattcatttactgaaggatgacttggtaattgcacataaagcttttataaactttcatgtgcaggtttttgtgtggacataagttttcaactcctttgctgaataccaaggaacatgattgctagctagattgtgtggtaagattatgtttagttttataagaaactgccaaactgtcttccaaagtggcaatataattttgcattcccaccagcagtg

SEQ ID NO: 106700 - DNA, 1095 bp, Homo sapiens
cccagaagagagtgaagcttataaatatggaatgccttgaggtgattgaatctaggagaagagagattaggttttcacctgacacatgtattataccttaaaaagagatggttcaggattagaaattcatacggtgtttgtgtgtgactgtcagaatttgatggaagatccaatatgttctgttccccactgcttaaaactaaaaagaagataattttagagcccttgttttttaatatcactgtttttaatgactatcacaggggtctttgagaaattgagggcacaggtcgaggtgtttagctggaaggaaaaaatacagcaggatgcaggtggaaaccagctctttaaatagatggctaatatgtgtaaatgaagttggccagattctgtgtgggccctaaaggatgtgaacaggactgttgtgggtaatttgtgatgtgcaaaactccctaaaataagtgtggctgccaagaaatgtggtttgttcactgattcagagctttccaagtctagtctgggtcattgcgagaagtttgtgtgaatttaaacatcggacctgaagttagaccaagtgaccacttagatttatttcattcctgagtttccaggaatcttaagttggtgaccaatgggataagattgaaaaaagttaaaaggggttaagatgatggaaggtctgtgatgtctggctaaaactgagagttctagtgttcaaagcagtagttagatatcaggaagcaggctgacagactgtatgagagaaattattccagccgtgtataatggtcactgttaacaaagcctcgaatgggggaacgttgcctttttctaacttgaaaaatgtgagagagagagagagagagagagagagagaaggagagagaatgagagaatgaaaatatatccaagttacctcctgataccttctcttgtgtaagcattttttgtttgtttcttttttgtttgtttgttttttctttttgtttttttttgagacagggtcttgctctgtcacctgggctagagtacagtggcacaactgtagctcactacagcctcaaactcctgggctcaagagatcctcccccttag

SEQ ID NO: 106701 - DNA, 1478 bp, Homo sapiens
taaattcccacaacagtcttatgaggtaggcatggctgtttattctcatttgatatataagaaaactgaagcatggagcagcgaggggcagtgtgggatgtggggtttcctaaccgaatctgaccagagacaggtttagtggtggaccttcggtaattaagagcccaccaaagcaatctgggaaacctgctctagtactctaagcaagctgtgacttacaggtagataatttggggatgcgggatggcctcattcttgcctcatattgtttgagcattctgattcctgccacggaaatgatggcttctcctagaatccttgtgttatataaattcacctcccaatgatattcttgcttggtttgatgctagaaattcttgaaatgggactcatgtatcttaaagtgacaggcttaattttctaattttacagtgttctggggagggagatgcaatcccactgctgtagaccgacctttcttaattcgggcattttagtagcttctctggaaggcaagaatttgatatgtggaaaggaaagacaggtttgaatagggcttgtgatcctactttagtccagtgaaacagcacttgattaataaatcatttaaatcttcctaaagttaaaatgatggaaaatgctactttttaaatcaaggttttaaatgagtgtcaattggtaaagagccataatggcattttttacagatggtcttagcttcaattattcatacatctccttgaattattttagtattacccaagagatgaaataatgttggataaattactgcttctgcttctgtggacagctgagtctaatacttaaaaaacactttaattattttctgttaatattactcttaatataaaattcaggtgcattgatgctgcaagattaggtgcttatcctctacagtttcagagctgatgctagttggaattgcttctttgtggtaatgaggaaacaacgctcttttttgcatatggagagagctgtaccttaggcccaacatgttacttggccaaatgtgcttgtgcagtgtaccccctgtacagctgtatgtgattggccaaccttatctcttatctcccatagcagccttaatgtctccttgttaactctcatctcacttaaagttacttgttgaatgtctctcattcttgctagagggtagactccctcagatatggcatatacttgtcatatttattccaaggacataacagtgccaggtacctagtgggctttttatgatgtttattatttaagatgtttattgaggccaggcgtggtggctcatgcctgtaatcccagcactttgggaggccgaggtgggcggatcatgaggtcaagagatcgagaccatcctgaccaacatggtgaaaccccatctctactaaaaatacaaaaagttagctgggcgtggtggtgcgcgcctgtagtcctagctactcgggagactgaggcaggagaat

SEQ ID NO: 106702 - DNA, 1098 bp, Homo sapiens
acctgggaggtggaggttgcagtaagctgagatcgcgccactgcactccagcatggtgacagagcgagactcggtctcaaaaaaaaaaaaatcatccttgatatctgcatgtgtgatgactgagtttttgtcaattttagaaagcctacatatgaaatgaatttgagttagattgaggagaaaggatgaaaggatgaatgaggtatatagataggttgtcccaaacaggggtgctctacaaacaggttcattgtcacaggtttttttcttttttctttttttttgcggcattgtctccctttgtcactcaggctggggtgcaccggcaggatcatggctcactgcagcctcgacctgctgggcttaagtgatccctcccgcttcggcttcccaaactggtggattataggtgtgagtctctgtggttctgggcctgcttttttcattaaataagctgaaagcatcaatgatagcctcttatgtcctgcccacccattatcattgtatctcagaaaactcatgctaattgcatttttaattaaaactgtttcagtcatcttcggggtccttttgaagtacagagaaggtttcattattttgcttagaggctgaaataatgggcaccctgcaaggtgtggttttccttatgtaacagctctcattgtggttgcatttttatttgaaaacgtaggttttaaaagggaaactacacatttcatatttaaaagaaggcattgacccattttctctagtgattagaaccgtggaaattagacttaatgtagtttgacatgtactatagaattttagtctttcggctgaaaggaaacaatggaatacagcaactaactcaaagttacttgcttgccaccgtgacaatgttgagagatgtagttgagattcctgccctcatagagcagttgaggccagcggaaaagcaatacattgatttcatctcatgtgctcctgacaaatgaggtcatccagtttctgttgaaacaatggtaccagttcaatatctgaaaaactttctttaagttcattcttatattcttgttgcctcaagttctcagagcaagtgcaatcagtgctagttaa

SEQ ID NO: 106703 - DNA, 1318 bp, Homo sapiens
actatatttagtgtaactttggagtttcaaggagtatctatcctaatctagccaattgtagctagcctccaagacccctcctctcctcccaataattttcacctccatatattcatggccttgtatggactcctcctaagctgagtaggactgacattcaagccaacagtatgtggtagaaatggcacagtattgttcccaaggctaggtcgtaacagaattgtggcttctgccttgctttcttggatctgtcactctggggaaggctagctgctatagtatgaggacagacaagcaaccaatgagaaaggtccacgtagcatggaaccagggtctctcatcagcagccatattagtgaaccattttagaagcagaagcagatccctcagccccagtcaagccttcagatgagtgcagccctgaccaatattttgattgcaaccacatgagatcctgagccacgaactaaactgttccttacttgtagaaactctgtgagataataaatgcttattgttttaggccactgcacttcagccattttgcattctctctggactccaaggctaagatatggcttttgtcttcaagtggattaatattgagtttagtcctggaacaggttctttcagccatacacacttaaacaaaatacttattgaaacaagtataactgtaagcttccctgaatgcctgattttcaatggagcatttggtcttaggtgctgcctagaggcagatggtattctctttcatatcaagatttaaactttgaaaagataggactgttaagtaaatgtagtctggtatagagtaatgtagcatcatactttatttaaacataattatgaatcagctttggttgcaagtaatagcctaagcaggaaggataatttattatctagagacggcaaagtctcatggaacccaaggggaaggatggagagggcctcatgaaggatcttctttcctctgattatgtttctttctatagatgggctttctctgattttccatctacgaggtggaatttggaagcccctttggctctcttattatatgatggctttagtcacagagagtttctgtggtttagcttcctggaaagagagaatttcataggtagagcttcaattaggtgccgatgcctaaggcaatcagccattgctggggtgggtggaactctagggctgcccggagcttttttctgttgatggtatatatatgttcgggatggtgggaatgctgaaggggattgtgttccaaagaagaaacctagggggcagacacatacctcaaagttacctgctatgggag

SEQ ID NO: 106704 - DNA, 1168 bp, Homo sapiens
gaggtagtagactctacctcttttttctttgagacagaattgcgctctattgcccactctggagtgcagtagcagcctcatggctcactgcagcctcaacctcctgggctcaagcgatccttccatctcagcctcccgagtagctaggaccacaggcacataccaccacagtcagctaattaaaacattttttttggtagagatgggttctcacttttttgcccaggctgatcatgaactcctgcccacctcggccttccaaagtgaaccaccatgcctgacctctacctcttgatggagtttgctgcagagaattcaatctacaaaaccattcttcttattcattccacatgcccccttttgttcaacattgtaatcactaaacctctttcagttctttaaactcaccttgttctccagcttttggcctgaaaacatgtgtttctctccacctgaaatattctttcttgcctgttttttctagctgactgctatacatagtttaggttttagcttcaatgtcatttactaaggatattcttcctttccaaacaccctagatttggggaactgtaacctctcttctttgatcgaatagttccctatgctttccttgtcataatagcactaatcattcctttactggaatgtttactttttgtttttgttttgtctttcctgataaaggcaggactggtatctgtgttgttctttactgtgtttgtaccaaccacagtggcttactatagataggattaaataaatacttgtgcaatgcagattaaattggtgcagattacttattgatgtttgctcacaagaggatttcaatgttcccctttggaatgtcccaccacaacctccccttaaaaaaaaaaaaaaacaacaactttttcttctcagcccacaatctggcaccattaaatggcccaatataagagggactcggttttataattaggttgggagcctttttcttaaatgtactgcaccacaatctggcaccattaaatggcccaatataagagggactcggttttataattaggttgggagcctttttcttaaatgtactgcaccattagtcctgttaaatcacttgctaacatcaaatgaatgtttggaaaaagtcctacttgtagtctataaaatagatggttaaagatgc

SEQ ID NO: 106705 - DNA, 1023 bp, Homo sapiens
atttgggctggagtaatcatctaacagaacaatgtcccttaggcaaaatcttacttaattttggtgtagtttcattacttatctctttccctttttttggtgtcaaaccttactgtctgcagtggctcttctgcttgtcagaagttaattaagttgtaactaaaaaaaccccaaaaaacccacaaaataaaagaagtggcttaaaaattctatttagcaggttaggcatagccagttgtgcttgtgcttatccaaagcaagccacctagcaaacacacatgcaccctgatggcttcacaccgcagaggctgccggtgcctgtggtcagaccatcatccacaaattgcttcaccaggggagtgctctcagcccctgacacaacctctctctttctctgtgggcctgtgggccacctccaggaaaaacctgacttctaaacaatttcctggtgagccagctggggaaggagaggatttccgtagctgaacactgagcacggccattcaaaacagacaaagctagcaagcgttggaaatctgaggcaaaagggcaagggagaagtgtcagggtggggctggctgaggtctgcaaataggctgcaagagttttcaaggtgtttgtcaggctgccattcttttgacagctcttcaaaatctcaaacagtaataacttgctattggaattcagatttcagaacataggcctccttgtctattgctagtttatttccctgatgagattctcttcctgggacagtgggtgtggtgtagggtttgctcttggtaagctatacaaaattgttaatcatcaggaggagatactgtctgtggagaaaattaggtagagattaaaacaaccaccaccaccaccatcaccaccaccaccaccatcaccaccaccaccaccatcaccatcaccaccaccatcaccaccaccaccaccaacaacaacaacaacaactttgaacctgagctcagtggcgcacacctgtagccccagctactcaggaggctgaggtgggag

SEQ ID NO: 106706 - DNA, 1010 bp, Homo sapiens
ataagtgactcagtctatgatatttcgttatagcaacatgaacggactaaaacatcccctaatttcttgtgagagtgtggcatacagagtaaattctttgagcagccattcctagtattgctttccctaagcgctctctgctttgcttggaataagaggtaggagggtttggagaacactcccctgggtgttattctagtgcttcactgctttccctcttaaagggcggcctagcctagctcctggcacatgtttgccagtgatgtagaaattctgtttctaaggattaaagaggtagggatgaaaataattaggcaacttgcagcctctgccacactcatatttcaagattcttctttgatttttttcattttagtcacttaatgattcttccttcttgttttattcttccttgatctccagggactgtaaaacaatccagaaacttagtaatattatgaacaagcatttatcagctggccacaatgtgcttattaatgttcaaatactatgaggaatgtcagctttgctccccaaaccttgttagactcaaaccctcatgagacttgataccatgactactaatgtccttttattccccaaatcgatttccctttcctttcttactgggttttagatgcagatgacacagtccagggaagatcggagggcctgtctgagtatggagaagtacgagctggtattttatatagcctatgacactcctacttaatgacttagatgggctcataatttcacattcaccattgaaatattttttctgaagttagaaaatgaaccatcgttagggctatttgacaatatttctttgggatacttttcctcattcagtttgtttatgagtaatttaagatccactgtcatcatctacatttagctgttggtaatttgtgcggagttcacattgagttattgattttaccccctacagtgtaaacatgaaagactatgaaataatgatcttgctggtgaaatgtttgtatattttt

SEQ ID NO: 106707 - DNA, 1027 bp, Homo sapiens
cctcagcctctcgagcagctaggactacaggcacgtaccccacatccatctcatttttttatttttattttttgtagagatagagtctcgctatgttgcccaggctggtcttgaactcctgggctcaagctgtcctgcctctgccttccaaagggctgggattacaggcctgagccattgcacctagctgagcactttcaatttctgctatcttgcctgcttaacaagtaacattcccttttaagggaaaaataatccagggtcactttttattaaattttactaagaaatggcaaaactgcttaatggagttgaaccaggattcttaaacagctacttgagttaggcacagagttaggcacttttagattcagtcagaaagaatgtttttttcctggaactcaacttttttcatttgagaaatatgaaaattggcccacaagctatatgatgctgccctgtcacagtggaggaaaacaatgcccagttcacaaataagttttgagttctgtagaatgaatatatttcttaattgcaggatatctaatgacttgtactgttgttaaggtgtacaaagtaaggctttctcaaactttcttgaacatgaaactctttaatatgttgtgatactgcttctctacagaatattcttcttggaatactcatctaaagcagtgtttttcaaattgtaggacaagattagtgactgtagtgaaatctgtactgtggattacaaaccagaatctatatacacacatatatatatacacacacacacacacaatcacacacacaattagtgcatcacatatagtagggtattgtttcctgagaagttttttttttttttgagatggagtctcgcactgtcacctgggctggagtgcagtgatgatcttggctcactgcaagctccgcctcccgggttcaagcgattctcctgcctcagcctcccgactagccgggattacaggcgcctgccaccacgcccagctaattttttgtatttttagtagagacagggttt

SEQ ID NO: 106708 - DNA, 2921 bp, Homo sapiens
aaattagctgggcatgatggtgcatgcctgtggtaccagctactcaggaggctgatgtgggaggctcgcttgagcctaggagatccaagctgcagtgagctgtgattgcacttctgtactccagtctgggtaacagaccgagaccccgtctcagaaaaacaaaccaaaaaactgatattgctgattaaagctttcacttgaaagcctcaacagttaatcagaaacgtacaatttataattagtgtaaattgagcataataattttattatagcttatctcagtgtattcatttgatgatttaaaaatataaatataggagttttcatcccttaaatttatgtcagaatttagagacatgttgtattattctttgtgttcctccattttaggttgattgtataatttttccaggttttaaatatatttaggagatatttataccttacatatgctgtttggggtattacaaattctaatcccagaattactatagataaaaccataaatataaaatgataggggcctattatcttagcattttgttagtctgcttttaggaaccatttgctatggcttaccaatacaattttctttcaacattaggatcctctttccttgaagaactacaggaaacacaagctcgggagttattttacataacaatgaggatgagatgttatttgtttataagttattcagtgtctaaaagccttagggtaccaaacataacacaagatagaaaagaaacaaatttgccttgacatttagctgtaaattgaaattaattcatataaaatactgaggtgaaacacttcagttgtagagttttgcatactgcttagctttcatgattttgtcactttagattttagttcaaaagtgtgcttttaaactgtataaactcattagctgcataaaattctccagctatccactttttcctatattttcttactctgcaggtgaaaacagcatttttaatatttaacattcttaagtgatctgtttcatgtggattgtttttcgttttcttgtccctggccctacctcttctggagtcagcgcaggctggtgggtgcgctgccagatctgggtgtgcgtgtgtggtgtcaggataccattattgggaaatggatgactgcaaaacagtgaggcctacttgtaggcagatgacataaccagcagctcactgaatgccattgccaagacaaataggtttgagctctcccctcttggtggctgttctcgtccatgctgaaagtcattgccacccttggctctgcttttctctaacctggaggaggttgctgaaatttctgcccaacggaaaaaaaaaccaaagggaccaaaacaggatgtaagcaaagttttaatattccaaaccaggaaataaatgatgaaatgcagaaaaggcagggaggaaattctaactggcaccaagttgggaggtcagcgtcaatagcccacaagacgctgacgaggacttgtagttcccgaaagttctttaacttgtgtttcttgtgagttgaagtaacacattttttattccttcttcatcaccaccctttctaattcccagtcatcacccttagtgccctgggagggcatgcaggaatggcaggaagtgccaggacctcacttggacagataccctcggtggccacccccttccagtgtccatgctgtaggcggaccctagggccaggcccagagagctttctaaggtgcatttcctcttaagtaaaacataaattagagagcaggaaaatgttggctcttgattttttttcagggaatttatttaataaatactattttaatactaaagatttttaaaagaatgattaccactttattgcttgcctctcaagtgtgcctttagccactgctctgtctctagcacctagaacagggattggcagtgttagaagaacaacttcagccaaattaaatttaaagaagtttaagtgagcaacgaatgattcacgaattgggtagtccccagaatcacagcagattcacagagactccagggatgccctgtggtcagaataaatttataggcaagaaaagagaaatgacatacagaaatcggaagtgagatacagaaatagctggatgggttacaccttggcatttgccttatttggaaaagagttgaacactcagcagtgtatgactggttgaagcatggctactgggattggccaagactcagctattgttacagctgcatactcctaaattagtttttcacccttgtctacctattagacaaggttggtccacaaggactcaaatataaaagtacagagtccttctcaggctatacttagtttgctttcacagcagatactacatacccattaagttttcatgaaatgaatgtgtggtccccagatcatcagcctcagaatctcctaggtggtcattacaaaataactattgggtactaagtttagtacctgggtgatgaaataatctgtacatcaaaccctcatgacacgagtttatccatataacaaacctgcacatgtatccctgaacctaaagtaaaagttaaaaacaacaacaaaaaaaccaaatgcagtttcttgagtccaccctggcccttcaaaatcaggatgtttgggagagagcccacagactctgcattttaaaaagggcttccccaccagatccattggtgctcccagatttgagcactcttgccctacggacacaccacttgtttccaatttccttgttgcttttcatatatgttgtaacgtgatggatgaatttggttcccgtcctctatttcatgccccatcacagcaatattatgtaatggatatcctcaatataatgaatgaatgctaatattacataatgaatatttgcctggttgttatattttaatgctgtcggacaaaattga

SEQ ID NO: 106709 - DNA, 1068 bp, Homo sapiens
tctagaatatagggacacaaatgttggacacagcttgcacaggtttattatgcaggtgatgggaaggtttctgatatgacacgtgctctggaccaagggccttgcattttaataagtggagtgaataaaaatttatagccaaatgtcatgttggcagcaatggaagtgtgctccggaggtgacaaatgctttgaggaatatagagtgtctgacagcacaatgtgaagaaatgacagctgccatctttgcctgtctttttctctgtgctgcatttgctttgctcttgtcacctttcttaggctggttactgggcagttggaagagactgtggagaattcaattcagttgtttggcttagggacataaaattgaactgcataattcatggataggtatctgcagcatcgtcttcgtgccctgtagaatgggttgactgccaaaggattttacgattctaaaatcctaacagattttaacagttgcttaaatattatttcttggcatatatagctttttaagtctgtgggtcaaagatagatgtactcatttgagacttagtgatttgttttataagtatgttgaataagttgagccagtttgaattgtgtccttctcttttaaagaaaagatttcccaaatttaaacctggatttagatgttttttgggttaaccctactgaactttccaaaattttcaggcttctgggcctaactcaaactgtaatttcatgaggccggccaagtgatttttaatctcatttaaaagttaccataagctctacttgaaccatttgggttttagtataataaaagggcacatgtattgggttttttatttaggctattgcaataaagagaactttcattaatgaagaaagtctcaaagaaaaggcagaaaatttggggttttatgaaacaagggagtcatttaggaaggctggagatatatcttataatattccagggcagagtgtccattgctgctagcagcaattatttttaaaaagatactgccaggctgggtgcagtggctcatgcctgtaatcccagccctttgggaggctgagg

SEQ ID NO: 106710 - DNA, 2135 bp, Homo sapiens
ttcagtggttggcattttactttcggtgctacagagtggcagcaagctacactgtttctgtgctgaggttgttgtctgagagagatttatctggccctgtgagccccgcacagcagggagacaaaccttgatttgttcagtggaggaaagaatgtggccttgtacacctgcctccctggatacacctgtagggctggtttccctgctgaaacctccctgtggagctcttgacactggtgcaattggctcagccctggcaacagtgtcaacagaaactgggctcggagggacccaggtttccgtgtccttctcttgctggttaaatcccaagtatgtgtgtaatcgctctcaggctggggaggtgaagttgaaacctggcttatcactgggcctagattctcctgtagcatattttagataagagtggaaaaaatgccaggcccagcattagctgccctgagactgaggagctttgtttttcctcatgaaggcctttggtttcgtctggaaatctgcctgtgaataggccagaaggtataaaggcagctgtccttacttatctagttttaatttttcagcaagtgatttggaagcaagaatgaagatttgatcagaacctttgctcacttgcaatgagtagagtcttgttgcttgttttcgtttggcattgccctccctttgagaacaccataggcagctgctctctgttggaattccaattctgtgaccttgggcaaattacttaacctttccctgagcctcagttgtctcatctgtaaaagggggataataatagtacttgactcataggttgtattagggattgcagagttagtatttgtagtccttagaacagtatctgcacatggtaagtgttatgaaagtgtttgtcaagacaaacaacaggaaatactttgtacagttaattatatgaagtgccagtgatatttatgtggctttttgttgttgtttgtttgtttttgagatgaagtctcgctctgtcgccgaggctggagtgcagtggcatgatcttggctcactgcaagctccacctcctgggttcacgccattctcctgcctcagcctcccgagtagctgggactacaggcgcccgccaccacgcttggctaattttttgtatctttagtagagatggggttttactgttttagccaggatgatcttgatctcctgatctcgtgatccacccgcctcggcctcccaaagtgttgggattacaggcgcgagccaccgtgcccggccttatgtggtctttctggttggtaaatattctaacacacacaaattaatcattagatcaaaagaattgtgttttggtacgtagttaaggtgctcttttcttttaaatatacactccttgctgttcttcctgttccctttgcagagcaaaagtatcggaaaaaaacaagtgcaagcacttccttctaatattggtttagttgtggtcaaaaacaggaattatgagtcatgaacaccaaattgacaggaatgagccaaggcaaaattacatcctaaggatgggggtcatctttgacaaacagacacacagattcatcaggcattaaaacagcattcttaaccttggaatccacgggtccccaaaaagtctgtcagagaaataggggatctgcaaatttgggtgggctaagagttatctatctacactttcactaacccctaactgaatttgagcatttccttgaattatgaatgtaggcaacaaaccacagtgacagaagcaatacttatgactttgtcgtcagtaggaatctcagatattttaatatcacattgcaatctcatttactcttatcactacagtagctaatagattcaccattatttatttattgttcttcagtgccttaagaaaaagcatgattatttaagaatattttgctcactacagttcagtataattaggttcctttggactcttacatattttattcatttataaacattattctgaggtaataatagtcatcaccagactgccaaagaactccatgcgtaaaaatgattaaggagttttaaagttgaaggcttaagctgattggaatctctagagctgttctgtccaatagaaatataatgcgaaccacttgtaattt

SEQ ID NO: 106711 - DNA, 1315 bp, Homo sapiens
cagccaccacacctggccaaggttattttttattagcttaaaaagttatttacctctaacgtgttttcttcgcttcccccctcctccctgtctctgtgtttctccccatctctcattctctctttctgtctctgtctctctctttcgggaagttaagtaagggaagaaagaccagatgagagaggttaaaactgctgggctctgatttcacaaacaggtagtcttttgctaactgcatgattttgagcaaattccttcatttttctaagtctcaattctttcatctctcagtggaggtaacagttgtacctcttttgttatgagggttatgttcagaatgacaaatgtcagaatttgcacaaatagcaacagctgcccttacctggcacttcctcagtgccaggcactgttctgagtacctgcttggtatatatcccagcagccctgggggttggggcctgtggtttataggtgaagaaactgaggcagagagtgtttaagaaacttgacttaagattcctccagcaacaagtggcagaactgagattggagtgcgaggctgtgtagtccagagtcgaggtcctctgtcgcagcactgccatttccccgccgtgccgcctgacaacacaccccgcccctcctccttctctctgtagataactatttcagtttggcataacttcctttgtaatttgtagcaacaaacctggggtcagacactccactgcctgtgcatcttgcctgtttccggatccgccgtgtcacagacattttctatgtcagtgcctatggctctacccaggtaaaaaattaaccaccttggcaagcgctgcccatgtcgctcctgcttgccggggctggctttctttcagagcaaccccgttctagctggcctgctgcctaggccctggctttctttcccacaaaatagcttctgaaaaaaactgtgggaaacaaatggcttcagaggtttttagaaacagaagtgcaaactctaacaaatttcatctggcccaaaaatgttattacccaaaatcttgaaaatattttcttataggattattcccccaaggttgttaatctgagaacgatccaggcctaataggcctgactttttgccccctgatgttggagtcttgagtagttgagtgccggagtatggggggttggggtaaaaatattcctctggaggaaatgaagtcattttatttaacattatagctaccactgggactctatcattttagaaagggaatgccagttcacacagccaaatgaagcttttaaattagtccaagaaaccttttaaaaggta

SEQ ID NO: 106712 - DNA, 1055 bp, Homo sapiens
tttagagccagaaactctgaatgagtttagctttaaccctggttgaagggctactaggtgatcatttgaatccttaactgaaggtggggccattttgttagacttcaccctacagaatctcacacaccaaggtccaaatgccggtggcaggctatgtaaacctacatagttatttacctctttgagactcagtctccttatctgcaaagggatgtcattttaaattcctcaccgagttggtatgaagagcatcagtcattccaccaaaaagcacttagttcctggcccatagttattatcaaacagtgagtcacaggaagatgcggctagctacattgctgtagaatactcttatatttattttagtttatctatttttaggggaaacaaagttatttcacccagagcattagacgtcaaaagtcgatatatcctttctggaactgccttgtttgtttgatgtcctggtgttttgaaggctggcatgtttatggccgggcagaaccataaacactccttcggcccagggctgccctggatttgtgtatatttcatacatgggcagtggagaaggaaatcatcttcagcttgtgttttgacacagagaagttttgcttttcgtttatctactctctgcatcctccaccgaaaacaaacagaacactctggcatgggtaaatattgtgactggcggcctcagtggtgttgtttttccctttgctacaattgctgagagactgatggtggcattgtagaagatccatggttgtcattctgatacttcagccagaaccatagcagttctggaaatgaaaaagtgaagtaaagaaaaataagaattacaagacaattttttttttccaagggaaattgtaaggcatttcaaggatggaaaggcaaaaatgttatatggttttgcatttcttctcctagcagcgatattcatcatgccaccactcctgagccttagaatagatagactcttcaaagacagctgagcttcatttcaggtgggttccctccgagccttctcctgcttcatttgccctgcttag

SEQ ID NO: 106713 - DNA, 1117 bp, Homo sapiens
tacagatagattcactcagtatggattcttttatacctgacttcatttcctcaacattgtattgagatttgtccatgtcgcatgtagctgtagttcattcctttttcttttctttttcttttttttttttttgagatgaagtcttgctctgtggccaaggctagagtgcattggtgcaatcatggcttattgcagcctccacctcccaggctcaagcgatcttcccacctcagcgccgcgggtagctgggactacaggcatgtgccaccatcctcagctaaattttttttttttttttttttgtagagacagggttttgccatgttatccaggcaggtcttgaactcctggcctcaagtgatctacccatcgacgcctcccaaagtactgtattatagatgtgagctagtgtgcccagcccattttgacttctgtataatactatagcatgcatatatctacatttactcatgtgtcctacttttgatgagatttgtgttgcttgtagtttggactattacaaattattatactgtcattatgccttttggtatatatgtattttcatttctctagggtatgcctcagagtggacttgtaggattgggttagactatgcatttttctaatcccaataacataattttttttgagaaggattctcactctgtcacccaggctggagtgcagtgacgtgatcttggctcactgcagcttctccctccacggttcaagtgattctcctgtctcagccacccaagtagctgggattacaggtgtgtgccaccatgccaggctaatttttttgcattttttatatagagatggggtctcatcatgttggccaggctgttcttgaacttctgacctcaagtggtcctcccgcctcagcctcctgaagtgctgagattacaggtgtgagccaccatgccctgccttcaataggtaattttaagcagtgttccagctcttctagtttatgttaccacgagtagtctatgggtttccattatttaacgtccttgtcggcgcttggtattgatgatcttttaattttagccacctgaaagtatgcctactttgaattttttaaatttctgtgtttcactgtaaagaa

SEQ ID NO: 106714 - DNA, 3556 bp, Homo sapiens
ctagacctttaaaaacaagtcattagtttctccaagagggcttcattttaatattattttctaagataccctgcatagcatatttaagggtctttctatgttgaatgcacaaatgatttttcagtggatttttggggggtttttacatgttttccttaatttacatgaggactctttattatactgatcatctatttagttaacagtgtacagttcagttatgcattttgcagtgttgcataaggaactggagttgaaaataacagttgtagttaccacccaggaagggaggggctgaataactgaatgaatttaaagaggtgaggggaaatgcattatgggtagatagtaccaagctcaaggtgacttctgtagatttgtgttgactaattcttcgactggacagagaccagttcgtttcctagctgtctgtcctacctttaatgcattgcagtaagtggtaatagcctgttgcaggggtacaccaaatggacacaggaatgcccccttctgccttcccctcttatccctagatgaatggtgtcatggaaattcaaaggttattccgggatttcatgttagttgaaagcaagttttcttatttctcatttggcatatcaatttttgcaggcctgccatttcaggctggcccatgctctgtactgcctatagcatagaaaagacagatgaacttatagcttagagccaaggtacagaaagtaaataagagtgatgtcttcttaatagacaaggaaggaatctatttaactggggtatttcaactcttttctcagaattttctttgtggccatataggagcaaggatggtgaagttatatggaaacaaaggtggggaaattacagacagaaatggaagagttgaaaggaaggaaggataacaagagcccacctccctgcagtctgctcaagggaaatcttgtacaatttgtgtggacaatgaaatttataattttggcttcaagcttgggtgactttctcctctctgattataggaaaaaatattataattaaattaggattacgcactttttcccctcttcagtgtccttacataggacagacatccttcttgtttggtgaccacagggaccagtgacatcctagttttcttggaattgtttgtacttattgctttattagaaaccgccctatagtcagatgtcttgcccacccttcttcagttcttttcccccaagatgtcaaaaccctggtgaggaatctgtgaaatgtgaactatgatttggttgtatgaggttcagtgaaacagctggaggttttcccagcagaaggctaacgcagaattgtctagacatcacttttttcttatctagtcaagcttttctgggagcttttccacatgaggaatctaggctcaaaggaaaatcagtttgactggctaaaagctcatctggcaagtttaaatcactccggaaacatacagagctgcagtcattggtttgacaagaacagaaagatacttgtctctgttgttgctagtattaaaagagaatttattggccgggcgcggtggctcacacctgtaatctcaactctttgggaggctgaggcaggcggatcatgaggtcaggaggtcgagaccatcctggctaacacggtaaaaccctgtctctactaaaaaatacaaaaaaattagctgggcgtgatggcgggctcctgtaatcacagctactctggaggctgaggcaggagaatggtgtgaacccgggaggtggagcttgcagtgagccgagtttgcgccactgcactccagcctgggcgacagagtgagactctgtctcaaaaaaaaaaaaaaaaaaaaaaaaagagagaatttatttatttgtccattaagacattaggatgggcgtggtgccttacacctgtaatcccagcactttgggaggctgagatgggaggatcacttgagtccaggagtttgagaccagcctgggaaacatagggagaccttgtctcaataataataataataataataataataataataataataataataaaaatgctgggatggtggcccatgtctgtagtcccagctacttagtaggctaaggtgggaggatcttgaacccaggaagtagaggctacactgagctatgatcacaccactgcactccagaccctgtctcaaaaaaggaaaaaccaaaataacaaaaagagcatcactcacttactgtgcacagacatagtgccttgccctggggaatcagtgatgggtagaatagtgatgttctttgtactgaattaaatcattgtatagctaagaggataaagacaacttgagtaaagggcaagtaggaaaggaataatgtcttaagggagtagaagacaaaggatgcagtagagaggaaggagaaatcagagaacgtttgaatgcagtaagcttgaggtgagcctgagatatttttggaatttaaccaaaggaaggggctgtcaaacaaagctagttcagagtcccaggatttgtatcttttggagtgactgtgccctcagaaacttccagagacttttagaactcattcaggctttggctttggcagttgtaagaagcaccacaattctttctactctggacaaggggcaaaatgtggttttttttgttgttttttttttttgagttacagtctcactcagttggccaagctggagtgcagtggcacgatctcagctcactgtatcctctgccttcggggttcaaacgattctcgtgcctcaacctccccaggagctgggattacaggcacacgccactgtgcccagctaatttttgtatttttaatatagacagggtttcaccatgttggctaggctggtctcgaactcttggcctcaagtgatcctcctgctttgacctcccaaagtgctgggattataggcctgagctcccccgcctggctaaatgtgtatttttgctcacaagcaccatgggcatcagctttaaacctccgatatatgggccatattacccggaactctgttgtcttctgtacgacttttggaagttaagtctacccatgcagataaggatatttaattccacactaacctcagcttctcttaggaaccactgcagagaatgcccagtttttacccagtctaaggctattttcggtcaaggcatgaaatgactttgtcattgcagtaaaccctagtcactgtgcaggtaagcctcttcttgagatggattgcatgcatacctttttgatgatacaataagcaggtctttattggatgtgaacagagtttaaaatgttgctgagttgaacattggagggtgaagggatttctccatagagttgttcctgcatgttaagaatattgagctaaatttagaatgtcttacactgtacctattttttcctgtgtaagtctcaaaaacttgatttagacttgaaggttttatgaatgtccctacttttttgttttaagagggaggaagagggaaggagagggaggtcatttgattgagaagggcataaatcgcagtggatgagttaccacaaagtcagtccat

SEQ ID NO: 106715 - DNA, 1051 bp, Homo sapiens
atagttgccctttctctttttgtcagtcgcaagatgcagaaatttcaggattctataaggtggcagagatttctgtgattgaataaaacaaataggtagacgcacctaactattatttattattattattattttggtgtaacttttagctattgaaaagtcagtcttgcagaagagagaacaccttgctgttttttgtagtttggtaaaatactgtcccttccattagtatttccaattcagagggcttttgctgtatgggctttaactgacttagctgaataggaattaccatggggtattttggcagtgccatcattggtcacctgtttagcttctgagatgctagcaaattactcttagtttgttgtccaaaatattttgtgggaagaaggttagaaaatagaaataagtatactactgactctatctcatacatggaagttttgaggacaaaccacactccagttggtcatttaccctagattgtggcattgataccgtcttctatctctgagaagtaacccatagtaagcagtataaagaggagggtgactggtggggcgtgatggctcacatctgtaatcccagcactttgggaggtggaggcaggcggatcacttgaggtcagagttcgagaccagcccagccaacatggcgaaatcccatctcttaaaaatacagaatattagctgggcatggtggtgcattctactaggcagactgaagcaggagtgttgcttgaacttgggagatggaggttgaagtgagccactgcactccaggctgggcgaccgagtaagactccgtctcaaaaacaaacaaacaaaaccaaaaagaaaaaaaaaaagggtgaaacagagtcctcagattttgtcttctcacttgagttcctgcttcagttcaaattcattcctttcctcctcttccattaatcctttctcagttcttgagattacatcaagtaagtctctatcaggtgttaatatgtcttcagcaccccctaacatttgctaattttccttcctaattgagagaccataccttttaa

SEQ ID NO: 106716 - DNA, 2071 bp, Homo sapiens
caatcataataaaaaagggtatagagtgaaaagtctctaatatcctgacttctccagtttcttgtcctagaattgtttatacgtatacaagtatacttgtttcccctcctttctcttgctcgcctttaaaaaaatataatatatatatattatatagagaatctgtgtgcatatacacacacaccttattttaaaaatgatatgtgtatatgagtttctgctccttgtttttttccacttcacgtttacagctacattttagagctctttttccatcagcaccaagatggattccattcttttcaatgacttggagtttacctttgaatcagtgttctgtatgtaattcattaagcctgtcctctgctgatgagcattaaggttcttttcagacttttgtttttacaaacaatgctggaatcagtaatatatcgttgtattttgatctttatgcacatataattgcatttgtaaaataaaatcccagtagtggactttcctggttcaaaaggtggacacatttcatgtttttgttcgatattgccaaattgctctttcaaaaagatgcatcatttttcacttttgccaactgtataagaacatgcctaaaatttaattccctttcttaccatatttttctttccatttctgtctctcatttacttgcttcccttagacctagtctagaagctgtcaggctttcagttcaagggtttatctcattacattccgtacagcaccagtcataggagcatttgtgaaagacataacctgtctcctttgagagcactgcctcagtttcctccttgacccccaggtgtgggcattaccgctgcagactcacgcctcctcccctttaatcgctggctcagcttcacctggatgaaatccccttcctcactcttccttcccttccatcccctgggaggtcttcaagagctggtactcatctatagagcctgagaagttgaaatctgttaacttgccttgggtgcttgccagtacttaaagacaggcctggttggaccactgcattctttgtctttgtaggagaagccatatttgtttgcatgtacagcgtcaagaaacgtttcctgtcgactgctttggcctggcatttccattaacactttcaattgggagatggtttctctagcttagctggcagaggacccagttttacagcccatctgcttctctctgtttctcagccattggccccagttggggcaacctgtaactggaatctgtggcctatagattttaactgggttactttttggaggggaggcaggtcggggtggggaaatcctttcatcctgacattattggcgtaaccttttttttcagtacgcttccatctttgaggaggagatgacactctgggctcttccttgctctcctcccgatgttttcttatgaaaaattttaaacatacagcaacgttgaaagaattttttagcaaacacctgtatgcccgctacttagattctgccactgacattttaccatgctgttttatcacatagctgtccaactgtctatcactctgtctacctttttgggctttttcagtgatgtttctccagcatttcaaaggcaccatggtatgggtagttaggaatatgtgctgtggtgccagactgtctgggtttgaatcctggtctactgtccactaactctgtgactctgggcaagttgctgagcctctttgtgcctcagtattgtcatctgtataatggaaatcgcggtagtgctaacttcatagagttttgtgagattaaatgtattaatacatgtacgacacttaaaacaacggttactgtctattaaccatttggtatatgaaagagagtaagtgctaaagtaatgttcatttcatggatttaaaaaagactaattcagtaggtgtcatggattttagggagaagcaactgtgtgcctggtactgtgccagacattttatgtacattgcctcatttggtcttcaaaaccaccttaagcagattatccccacttgcagatgaacaagctgatgcctcgtaattagcagcaatggggtttgatcaca

SEQ ID NO: 106717 - DNA, 1151 bp, Homo sapiens
tgggtggaaccatctgagttggtttaatgacttttgccaaccaagaccctgagcccaatcctattcattcctttattcagcaagtacttattaagcccccatggtatgctggcaactgttctaaaggagcttaaatgctctcagtacttagagctgtgctgttaggtggtcgagggttacatgtgtctatttaaatttaattaatgaaagtcaaataaaaaattttaaaatgcagttcttcgataataggagctgtatttcaggtgcttaatagccccatatggctagtggctgctgttttggacagcacatgatggatatcttcttgcagaaagttgtgttggacagtactgacttagagggtttagggaaagccctatagcagtggtaaagagcaacaactccttaaaccacaagcttatgaaggggtcaccttgtgagtgcaagcgtgctctagttattcagccacatttgagccaaaagctaggcagtcagcgtccttccccagcacttgggaaggtgaatgagcaagcagttcagtttctcccaggtcagtggcaattttatcccctagggagcacttggcaatatctggagatatttttggttattgcaactacgaggagggggaatggaggccagggatgctgataaacattctacaatgcacaggacagccaccccccagcccctaacacagaaccataccagccaaaatgccagtacttccaaacttgagaaataactccgctcccggtgaaatggttacagataacagctaggaactgtgagagcaatgttttgtggcatgtggaagaagctactattgtacagtgagaggaaatgaagtcatgaagatggagagactccccacggtgttcaagtcttcacttcccttgttctccagaccagcctcaattcttcccttgggttctatgaaggacctcagtatgataataactttactctttcgcttgaattactctgagctgagtgttagccttttgctaaatgttcctaatacagcaaattacgtagtccttcttttgattgtatcccatgtaaaacttggtctacaaatatgctctctgactaccttggatttaaggtcgtctcatcaaatgtttagcatacgataagcatttaattgc

SEQ ID NO: 106718 - DNA, 3020 bp, Homo sapiens
gtagaaaataccaggttagagaacttaacaaaaatttactttatctcataacattttggtgactgttaggaaagggggctgagatgagtgagaatagggggcacctgttctgctgagaggagaacaaattgccttttatttattttattttatattttattttattttattattttttgagacagggtctcactgtgtcacccagctggagtgtagtggcatgatcatagctcactgcagcctccaactcctgggcccaagtgatcatcccatctcagcctcccaagtagctgggactacaggtgtgagccaccacacctggactgccttacttttcatctgagtaaaagtgtagttggtaaccaccaggaggtagtatactagtgaagtggttgggagaacaagacttgattgattggctctggctttcataggagcaccgctgtctttcatatgtttaactttcatcaacttgctggaactcatttgagcttattttccatatataaaataagaataaaacaaacatgtttttgtgttgttctgaggattaagtgtatgcgtatatgtgcctaataaatgtggaccgtgaatagttgagtatctgactgcttctcttgatgtttttccccttgttgttcttcatcgttattcttattgttagcagctgatctcacccagtcctagcccttcaggggggatcataatgattttagcaaaaatacatgatattttggactgaatagaaactgcaaataaaaggaagtgaaatggctctggccgagtaaagatcatatagtgcctactgcccagaagttgtttacataatagaaacaaagttaaaaggaatacctaattaattaatttattataattttaataaaggaagaaacatgtatatgtcacaggcatatgtcttagacataggaacctgactgcatcagaaaatatttaaaactaccaagatgtagtcaattaaccagcaaaatttcttctgctggacattttctaaaatatattctctgctcctttctcgcaatagttaacaatttgaattagcaacaatggctttatgttataaacctctttccacggtcttctctccttcaccttcttttctgctgctagtgtgtgtggacttcttgtctgctgtcttctgtccctgtcagtttttcaaatgagagataagaactgctttgcaatgtgaggtggcagaattagggaccagtcaggctgccaggctggaggaaggtgggcctgagcaagccttgcccaagcacctcctttcttatttcctagaatagtctgttgccctttgctagttctctcatccctggctaacagcttgtcctatttgcctttggattttattatctgctccttcttgctgaggtacgacatgattattaagtgtgcccaagaggaaactccattgagctcttggggtgaagcagcgtaagaagtttgctccttaggaaaaataaaaatcttaactggttctggtccttggtcactggtacagaggtggagagaagtagagctggttaaagtccagggaagtgtgtcaggcaggaagctgggagggcttctcccagcagggtgcaggaaggcttctgtgtcttgtggaagtgatgatgtgcccgagtctgcttcacgagtctttgtagatgataacagggctcctgtgagccctcaggttgttcacagtttgttttctttgaattgcgtgaaaacatgtgcttgacttggatgtagattttatttcctttcagggtggagggttgcagacagtagaagatgttggctgccagcttggagtgactgccagggacagctgaaaggggaaatttaacgagaatgttgaggcctgaagtgcttcagggagcatttcaaattgcatctctttagaatcagatggtctccagagatcataatgggttatgagaggtgccagggtttgttttcttcaggctcaacatcacttaagaccataatccatagactcttaaggaatgaagcacagttctacattggacccaccttcttcaaggatctgaggcttagtggaccttttaaataatgattcatcaaatgtcatagttcatggttttatttatgtatttttgagacggagtctcgctctgtttccaggctggagtgcagtggcacaatcttggctaactgcagcctctacctcctgggttcaagtgattctcctgcctcagcctcccgagtagctgggactacaggcgcccgccaccatgcctggctaatttttgtatttttagtagagatggggtttcaccatgttggccatgatggtctcaatctcttgtacccgtgatccgcccacctcggcctcccaaagtgctgggattacaggcatgagccaccgtgcccagcctatttatttattttttaaaactgatctatctgtagttttagaatgcagctgatccttagccacactgtggcaagtattcattattctttcaatgttctcttggtggcaaagccatgaccattgagacttaatgtatctgactcttgctataaacatgctgtgtaacaaacttccctggaacccataacctgcaacagcaaggatctcattctctcagtcatagctttgtagggtagctttacttagggtgtgggttggctggtgttggctccagagtgtggggttgggttcaggtttgttccatttatttctggagtatagggatgctgtaaagaattgtgagcaatggttcagtccaccataccatattaagctttcttgattctttttttttttttttaacaaaattgtaaagtatacctgacacaaaatttacccttttagccacttttgcatgtacacttctgtggcattagttatgtttatattgttgtgcagtcgtcaccaccattcctctccacaactttttcatcttcccaaactgaaactctttatcgattacatattaagtccccacttcctggtacccccgatccctggcaaccaacattgtatt

SEQ ID NO: 106719 - DNA, 3991 bp, Homo sapiens
cccctggccttctcttccaagcattctaggctcctggagattcagcagtgagcaagacagagcaggtctctgctcttgtgggaaggaggcagaatttcctacttatcagtgtggattctagagccacaaacttccagacttggatcccagctttaccatttagtggttgtgtgtcttggacaagttacttaacctctttgtgctttagttttctcatttgtaagaggaggataatattcttacttgccttataggcttgtgagaaactgaagtgcttagaactgagcctgtcacatagtaaattttccatacagtgtaagctttagctttgatcagctgctattattataaagcttaccatcttgtgtgcacacatatggcacgtaataggcatgtgagtgaataaatgcggaaaaaaataacagctagttttgagagataatgggtaatgcaataggtgttagatgcactggtcagggaaggcctctctggaagttagaaacttgagacaggacctggattttgagtaggagttggtctcctggtgatctgggggcagaggacagcgggcagagggagcagtgccaacaattcaccgaggcggcaaagaacgtggcaggtttgaggaagaactagcagatgaatgtggctcaagtcgggcacaaacaggagatggaggcctgtagggcctttcaggtcatggagatgaggtttcttttttttttttatttggtagtggcaggaggatggagtctcactctatcatccaggctggagtgcagtggtgtgatctcggctcactgcaacctctgccacccgggttcaagtgattcttgtgcctcagcctcctgagtatctgggactacaggtgtgtgccaccatgcccagctcatttttgtatttttagtagagacgaggtttcactatgttggccgggttggtggtgaacttgtggcctcaggtgatccacctgccttggcctcccaaagtgctgggattacaggcatgaaccaccgcgcccggccgagttttgattttattataagggtggcaggtccagctgagcggtggcgtgatctggtttcgaatacgctgttctgggacactgaaagcatacttacctgtacctaagtgtgttttcaggatgaagtcaagtggagtcctcgtaggttgagggtgacagtgacaacaaagtgatgatgttgacaacctttcacatatgccactgcgggatggtggtggggccaaaggattagactccatgatgacctatggtctcctttccaatgttgagatgcctaaagcacaagttagatggaaagaaaacctataacatcacaatcatttataagtaggtattgagcatcactaaaaagcccagggtgctttaattgacattttggtttcctggaattgggatttgaaagattacctgctgagatggtttccatttcttgttaacttgtaatatgtgcacaatttctgcttgaaaatacctgtaagagacaccactgagagtgaagctgtcatttgaggatgccttctacctgttgtaccttttgaacaaagcaagtgtgaaagcatgtaatttgaattagggcaggtaataaagcttctgctaatttacgatgacactgcacagcttctaagtcttcttcatggtttacctgtgccttaagctaagtgtgtttcgattaattcttgtatgtaattgagtttggttcaaagtcaaacgtgagggtaattaactccagaacatgatcaaaatattttttagccatcgacaaactcattagtgagaaaggtcttttttttgtttgtttgagacagagtcccagtctgtcacccaggctggagtgcagtggtgccatcttggctcactgcaacctctgcctcccaggttcaagtgattctcgtgttgcagcctcctgagtagctgggattacaggagcacaccaccacacctggctaattttttgtatttttagtagagacaggattttgccatgttggccaggctggtcttgaactcttgtcctcaagtgatccaccctcctccgtctccccacagtgctgggattacaggcatgagccaccatgcctggcccaaaaaagatcttttaaataaattttgtatggcctacatcttagcatccctcatcccactccgtttaaaaaatggctatatataagtaattacatcatttaaggtattggtgatggtttgcttaattcgtgaatatcttatgacttttacaatatcatcttatgtcacataggggttgtctagggaggagcagcaaaaagtcaccaccagtgcagagagacatagccgagttcaccaaatgttcctggcttcttggcactcagagtagaactgggatgaaacacttgcaaaggacaactttgaaggcaccaacctaggatgaagccataaataaagactgtcctttggaatggagattctccatcattcagtagcaactgacttcagcctggtatttgtttctcttgaatttccagctcaaaaatataatttgaagtattttgtattagtacatgccagccactgccaccatccctcagaagcatcttacataaggaagaatgtgcaaaataaggatactcaggcttgatacggtcagagaagagcttgagagagtcaacagctgtcagttatgacttaatcttagtccaagtctgagtgacatttcattgcaaaggaaaaactagagagaaatcagtgtaaagatttggtgatgcaaaaatcatctttctttattattttattttatttttaatttttatctatttattattttgagattgggttatgagactgtctaatttttgtatttttggtagagaggggattttgccatgttgcccaggctggtcttgaactcctaggctcgaacgatccgcccacctccaccttccaaagtgctgggattacaggcttgagccactgtgcccggcctaaaaaccatctttcaattcagacttgggtaataaggcattctagaaagtattttcttaaattttatgccttatataaaatgtcgaagaccccagcatttcaatatgctggtatgaagactagaaatgacagattattttgtggtctaaattctttttcctttaagtttggcctgtgctccataaagagacagacataattttggaaattcgctttcttggcactgatgtgtttgctgagtcaagtcttgaatttttagaatgaaaacgaactattgccatgagttgaaagttgggcaggaagaacatttcaatcatttttgggttaggaagaaaatccaagttgacatttctcatggatatttactgtttttttttttttaaatagctatttcccttttaatctttgcaacataatatgaatgatttgaataagtttttgcagctgtacaaaaataaccctgcctatggtactatgttaatttgttactggctttgcaatttagaagatttgattatttcaaactccacagcctctatgatgtcctccaatgatccctgccttcttgtatttacaccttcgtgcagtctgttcccaggtctgtgagaccaatagcctaatgatggcgtttcacttccaggataaggttataaaaatctgccttctgtcctagtcatcctttctatttccctctctcttggatctcttgctctgggagaagctatgctgtgagcagtgctgtggagaggcgcacacagtgaggaactgaagccccctgctgacagccatgcgaatgagcttggaagagtatcctttggaccagtcaagctgtagatgactgcagccccactaacactgcagaggtgtgagagatgttgagccagaaccacccagctaggccagtcttggattcctgacccacagaaactgtcagataataaatgcttattgtttgaagccaataagactggggttacttgttacacagcaataaataactgatacaaactg

SEQ ID NO: 106720 - DNA, 1051 bp, Homo sapiens
tggattgcaagccatcaagtttatctacctatcgactctttgcagaggtgtcacatggttcccagtttctgatcctgacctgcattctgaaaacaaaatgaggaacaaagaaagagaaaggatattcatttctttgggtacttcaaggttctaatgaatgaaacagaaatgctgccattaaaattccctgaagcaagacaacagtgagttttactagcacatcaccaaagaagttaatcaggtttccttggggttgctgggctacgttgctttgaagaaaaatagcacttccctgaagagtaagaatagctgaaaccacatgtcccagcgagctttcagccaactgctcctgaaggaaacggaatttaactgcgagaatggtttttgttggatgacgttttgattaagcaacaggctacttttccaccccgggaatgtgatcatttgaagatagatatattatgacccaaatagaagctggagtagaaggaagggcttgtaggctgaggttatgccttatttggtaaattactataagaaaattgaactgggtgagtttaatattcagtccttattttctgttccagacatcttgatatctctgtgagtagctgtggggggtggcggggggggggaagaaaagaaaaaaactttggctgttctttctaacttgacttctttttccagaattttaaaaaaacgtgagtgagatggatagttgggctcagtgaatgaaggaagagatgctttctgagtcctcgaaattattgctttgtgaatgaagaaattaagagctgagccaggcgtggtggctcacacctgtaatcccagcactttggtaggctgaggagggcagatcacttgaggtcaggagtttgagaccagcctggccaacatgatgagaccccgtctgtactaaaaatacaaaattaactgggcgtggtggcgcatgcctgtaatcccagctactcaggacgcaaggctggaaaattgcttgaacctgggaggcggaggttgcagtgagctgagattgcaccattgcactccagcc

SEQ ID NO: 106721 - DNA, 2279 bp, Homo sapiens
gagctggatttactctaacaagtgcctgcacctcttggtcgagttccctgagcatcggccctctcctgtggctttgggaagaggtcttgacttaggaagaaggcttccatgatcctctcagcctgagactggcctggggttttaattcccaccctctgcttatctcttggccgacatttgggcatgccacatgccccttctttggtgcaaggtctatcatctgcaaggtgcattttacagaaaaaaaggcagagtcctgctcttgacctttctccttctcaccagggaaatgcttcatgccatccaccctgagcagaagtccagagacacctgggcaacttccatggtgcatttaaaaagggaagaaatgccagaatacagctgtaaaaatgatggtatattttaaatatcaatacctaataaatcaatgcttttaatgcctacataatatgccacgtggagtgactgccattacgagacaattatggtctcataaaaaatattaattatcagtgtcttgtattgtagagtgtgtggtctggtaatagggctcatgtgtaacatcgtaatgattgtattgtcatttcagtcaccattatagtgactgtatatctaagctcagtaggcaccagtgccaaaaatctacatttgaagccctttgtgactgatgcatcccaggtactaaaagctctcatgagaggtcctgagagcacaagtcctggcttacttcaaaaaatatatatttttgtttgtttgtttcttaacagtaaggaaaatgattttttatttttttatttttctaaagacaggctctccctccgtcacctaggctacagtacagtggcacaatcatagctcactgcaacctccaactcctgggctcaagggatccttctgcagcagccttttgaacagctgggaccacaggctcatgctgccatgcccaggttatttttgtttttgttgaaatggggtcttgctttgttgcccaggctgggaaaatgaatattttaatgcaaggggtttctcagaatagaggaaaagttcaagacacatcataaagtaaaacttgtttgccttctgacataaatatttgcttttctttatatgtgcatataatttatttctctggtcttgccttctgcttcagtagttactgatttatgaaccaatgtttagtagtgctctcctttgaagctggggaaaattaagtgaagttcttttatgtgaataatgtggagtacaatgagactctccgaggcctctctgtgaaatgactttaaaaccactggtgagcatttcaactctggacttttctgtcttttaaaattcactcacatagtttggatgaaaagaatttcaacagacaatgagatttagatagcctgattctaagtttcggtgctcttctccaaatacagtttctttttaggtgaatattatgttttaaaattttttaaaaatgaaattagagtttgatagcagtcttttaaataagtcatttccccacccctccttatctctctctccctcccaattattctgtcacttattcactgatgccctggctaacacagtcactcagcactcctcctagagagaacattagttgacaatggccgcttccagggtgggtaactttgccaaattacttaacttctttatgtttcagttttttatatttgtaaaatgggaatagtgatggtactcaccccataaggtgattataatagtacagtttataagttggtgggaggtttgaatgagttaatgcatctaaagtacttgaagtcgtacctagcacccaggaagtactcatgttgtcatattttactcatcaaatagtaattgagtgccttcttaaaaggtagtgtaggccgggcacaatggctcatgcctgtaattcccaacactttgggaggctaaggcgggtggatcacctgaggtcaggagttcaagaccagcttggccaagatggtgaaaccccatctctactaaaaatacaaaaattagccaagcatggtggcaggaacctgtaatcccagctacttgggaggctgaggcaggaaaatcacttgaagccaggaggcagaggttgcagtgagccaagattgtgccattgcactccagcctgcgtgacagagtgagacaccatctaaaaactatataaatagtgtgttgggtactaggaatctggtggttagtagaaagatgcggttttgcattcatggatcctcaaacacaccatttatttattaaaaattctgttgatactggga

SEQ ID NO: 106722 - DNA, 1291 bp, Homo sapiens
agtgttacgatcaccactcactgcagcttcagcctccccagcttaagtgatcctcccacttcagccttactctcgggagtagctgggaccacaggcatgcaccaccatgccttgctaatttttttttctttttttttttttttttagagataggagtctcactatgttgcccagggtggtcttgaacttctgggcccaagtgattctccagcctcaacgtcccaaagtgttaggatttacaggtgtgaaccaccatgcctggcacaaaataccatttcattctcagattaattttgtaccatggagacaaggggaagttttctcttttctttgtagatgaagcaacttgaggacagatatttggaggtcttgtctgaggttcatttaaaatggggcagaggccccaggccttctaactctccatccagttctctgtagtagcccttcctaccccagctttggtactgatgtcaaccccagtgtttcctcatttactgagcatgtgtgactttcaaaaggctctgttactctcttgatttctgtgaggagcgagatagccatgactttaccctgaccatgtgactggaaacatactgaatattattggatggagaagttcacagtgtttcacaaacacatgacaagttattgttaacattatatgaatgggaggtggcaggtcaagtaaggccagagaagcattcaagctgacaccttgttcatgaatttaatctcttatgagaacagctagaatgatcatagtggccagtttggtagcctgatcattttggtcatatgcagaaatgttctcaatggactttgagagttagaattagttggtatacaggctcctccttggaaatgtacacaccaagcaattgagaaaagctggaaatgcacctgtctcaagtctcattgaaaattcctttaggtatcatactccaaaagattacatggaattgaacatttttgaaataaggacaggactaatagactttcttaagtggaaatctctcgtctttttttcccctggtactttgaaaacttaaaataaacatcgtttccagtatttgatggtttatttactaactacctgtttggaggaaatgtcatattgtctcagaacaatggaagctctgctcacaagagagcaaggagagggggtggttttcagtagtcagttgggatagacccagtttggctcacattttttgcatctctgagttcagatgaaaaggatagtgagtggcactgcagaaaacccaagaaaactggaaatagaaaatggcaa

SEQ ID NO: 106723 - DNA, 1824 bp, Homo sapiens
ccatccttgataaatgacattgtttttttctgttgatgtagtcccaattttacccatattaacttttaaaaaaaaagattgtcttatcttagtagaaatatctaagctcagctgaagaaatagattctataaatacccttacaacctaaacgctaattttatccctagatgagttgagatgtgcacctgaatttgtctcttgcatctgaatcagggccaattgctaagctctattaacagaagtatgtaattaagataaagggcaggagcaggacagccagtcctaaaattagctcttgccttgatgttccccaggtgcaagtgcacacagccttggtcctttcattctggatgcacccgatttccttttcaagatgtgtgcaggccttaccaggatttccaaaagcttggttctggctcaggttgggaagctgagattgttttctcctgtgggttgttattcgtgtttgaaatgtcgtctggcaccttagaagctttttgcgtaaatattctttaagataggtgtcacattatttatgtttagcttgtgatagtccaacggtcttcttacaagctgtttctggactggtactttgagaataatgtaatttttatcagctgtccattctttacaatgaaggtaagtagtgcaattaaggaagggattttttttttttttttttgagacagagtctaactctgttgcccaggctggagtacagtggcatgatctcagttcactgtaacctccacttcccaggttcaagtgattttcctgcctcagtttccagagtagctgggactacaggtatacgccaccatgttcggctaaatttttacatttttagtagagacggggttttgccatgttggccagactggtctcgaactcctgacctcaagtgatccgcctcgatctcccaaagtgctgggattacaggcgtgagctaccgcgcctggcctaaagaagggattttaagcctacctgtcaagggataccagtatagctacacatttcactcatgtgactttgggagggaagagcttgaactctgctattcctaatgtgcatccttgggcaaggcatgcaccttgtcatgtgctctagtatcctagatgaaatggagatggcatcagtaccgacccctcagggttggtataaggattaaatcaaagacataacagacatttgtaagtcaacgaacacagtgcttggcatatgaagctaagatgtaggtaactgcacattagaggtgggaggccagggtaggaactagggtgaggcaggcgagccacttaccttgggtgcaaaatttaagaggcaccaaaaccctcaagaattaagaattaatgcaatactttcacttcttccttcctgcctgcctgcttttctttcctttcttttttaaggcagagtcttactctgtcacccaggctggagtgcaatggcatgatccccacacactgcaacctctgcctcctgggcccaagcaattcgggactacaggtgagtaccaccatgcccagctaattttgcattttttgtagggatggggtttccccacattgcccaggctagtctcaaactcttgggctcaagcaatctgcctgccttggcctcccaatgtattgagattacagtcatgagccactgctcccgactacagtacttttaaaaataaaaattagtgtggtaaagtccatcacgaattacatatcaaaactgtaaataaattcaaggactgcccctgcacttgcatgcccctgcctcctagtgttataaggacaaaataagaccatgaatctgaaaacgggttgaagata

SEQ ID NO: 106724 - DNA, 1397 bp, Homo sapiens
caaattcatctcacgtaccactcctggctcatgtactgtttatactaatctttgacctatagcagtggttctccacagtagcattatattagactcatgtgggaagatataaaaaaataccaatgcctcatgcttcactgattaaatcaaaatttatgggaatggagtacagaacttctaaaaagttcattggacaagtctagcgtgcagccagaatttaaaaacactgagctgagaatgtggtcaaatatccttcccatcttcactctctacctgtttgaatgtatgttttacattatttctatataaatcctcttaaaatcttccatgtttgaggcttactggttatataaaggcagtgacagtgctttgaatagtgtctgcataggaagcattttaaatgtgtaattttgtgatggagcgttggtataaaactgagcaaacctaggttcttggctctgtccttcgacttattaacttgaggattacaggcagttgtctgcatctttctgagccttagttaagtcagctgtcagatggggagactaatccttaccaggcatatctcccagaattgagtaagggtcgaatgagaaaatatatttttaaaatggtctgttaactgtcttcagggaatcagggcataaaaatattgttaataagtcagtgggtgggggtggtgataaaaaatagaataggaaaagtttgaggacaaaatatttcatattaggtgtgataattcttaaaaatgagttctttctaattataatgatagaagctgtgccatgtttttgctcttggactgttgattgtcctcagaatgagacagctgggctcatcttagtgcttgaactgaacaacagctgctaattacaactcaaggaaaaactacaggctgatctgattatggtttctagaggttagactccctttcactgtatctcattgtgttctttgttgtgtttctgctatggtaggttaactctggttttgccctcatttgtaggtagattcctggaagtggcacatctctacgttgttagtagaaatcttgccttgcagccgctgatggctcatctggagtgatgtgactgaggagagacctccaccctcccaatctgccactgtacttaggggtattgtctgcataacccccttcactggggccagtcgccaacattgtcaacagcacagttatgcctgctttaactttcacctcaaaaatagctgaccactctggcttctgtgttgaatgaaaaaaaataggatgtcaccaacacaaatggatatcctgaatttcgggacaagtgtagatttgagtaacttgtaggggtccctgaatgtttcctggtacttactgactttgttttcatacttgattggaatgtcttgagccc

SEQ ID NO: 106725 - DNA, 1053 bp, Homo sapiens
ttttcccaaaatatgatttaccattatttatttctgtatctgtatatataccacctaagttcttctgcacaatggcctatatatttgaagatgactaagtttttatagtcagcattctctttctgagcaggtccagtttacaacacttggcctttaggaatgttacgttatactgggttcaggctcatcatagttactctgtgctaagaggcaaaccggctcaaaggaacatcatgccatagcaggaactgaaatctgaagaatgaatcttgaagcatgtgcttgagaatggcctgacagctatgctcatctggtgttagaagcttcggctaaacaaggagagtctcccttaccagagggtcattctttggtaggcggtactcatcctaagagacttgtaaatcttccgttagggaacaagcctgagcggttgatttagatgttggtcttccctcagtaacctccctaatctttaacttttccatttttgccagtggtggaatgctgaccgagaacctgcctggtatttatagtacttggagcaagatactgaacttgagttcatgatcccgcaccttgccgtggtgacttgtattacctctttctttccctcccctgcctcacgttaatctcactcaggtcttgccagctcttcctcctgtgtctgctacttcctctttatttcctcacaagataatcctcttcattatcatcatcatcatcatcagatctctagactttagtcattcttgaactactttcttaatttcttcatatctgtgtaccacctgaaccagttttatttatatttttctttcaatcaaattacttcttaaactttagtctgtaaaaactgtaaaatcataggttttatatgacagctaactttccccaaatattcagtaaaatgaacacaacaactgtataacattaaaaaattatgtctgggtcaggtgcagtggctcatgcctgttaatcccagcactttgggaagctgaggtgggcgggtcacttgaggccaggagttcgagaccagcctggccaatgtggcaa

SEQ ID NO: 106726 - DNA, 1681 bp, Homo sapiens
tggtaaaaccatgtaaagcaaaaaaaagaaaatgagtaatctgtcatttataagcagctccatgtggcctgctgtgatggctctcagttaaatgggatgctcttagacatttcatttgcatatgaagcatctggaaataaagctgtaatgaagccaggtgcatgtagtcccagcactttgggaggctgaggcaagaggatcgcttgagcacaggagttctagaccaccctgggcaatatagtgagaccctgcctctactaaaaataattaaaaaaaacatagccaggcatgatggcgtgtgcctgtagtcccatctactcaggaggctgaggcgggaggatcttttgacccaggagattgaggctgcagtgagccatgatcatgccacttcactccagcctaggtgagagagtgaaaccctacaataacaacaacaacaataaaaataaagccgaaatgatgcccagattcttggaaagagaaaggaatttctgataaagtctctgccccttgttcccttgttgtctttcctggatctggaaggcgttggtggtattgagggttttattactcaaaatatggtccatgtgccaactagcagctttcacatctcccgagagcttgttaaatacagaattttggttgccctcccagatgtattagatgataatctgcattttaacaagatccccttggaagggtccttggaaagctttggttagacagtcctggtattgaagggaagcagagtgttggaaatcaagggaaaggtactgctttctggcaggcaagacatagctaccacagttcactgttttttgctcaggttttcttcaatgcaaactgcactcagtccatgttatttcaccacagacaataaaggctagtactcaaggatctggaggagtagaggaaatacttgtactaaataatctatggaaggactgtctttgtcaagatataggtgagtcactgtttccttagatgtgcaactgtgtgggttattcaagaaagggagagctgacatttatgaagtgcctattatatgccagttagtgtatgaggtaccttctgtgcattttttcatctgattctcctacaacttcttgaggatgttatggttttgtgaggttaacttacccatgaccaaactccgactttctctggcacccaaacccttccatgccatcatcttgcatgcttgtttctcatggcattcggatttatgtatttttatttttatttatttattttgagatggagttctgctcttgtcacccaggctggagtgcagtggtgcgatctcggctcactgcaacctctgcctcctgggttcaggcaattctcctgcctcagcctcccgagtagctggcattacaggtgcctgctgtcatgcccagctaacttttgtatttttagtagagatggggtttcaccatgttggccaggctggtctcaaactcctgacctcaggtgatccacccacctcggcctctcaaagtgctgggattacaatcacgagccaccgtgcctggcctggatttattttttaaactgataccaccgtgtgatttagggaagagtctaagcaagaaagatatctagatcaaaactcatatttggtcagtcagagcaaagtcttaaaatgttgtagtgtttgttaagtattagaatttcattg

SEQ ID NO: 106727 - DNA, 1084 bp, Homo sapiens
tgtcattttctctccttccctgacaatagtttgaataggatttgaatttaccatttggggcctcgtgatacatttaggatctgatctctttctcaaaaaaaaaaccctttaagggagccgtatatccttatggggaaatggatgaaaaggatgtgtcctcttgtctgtatcacctctactctttgaaaaatatttaaatttcttattaacttgagctttcagtgggattgaattgacctgtcttattatttcttggctctcctgcattgggacggtgtgagccactcacctactaatgactcattgtaattattggctattgctgaactcctctggacagcaccattgtgtaacaagtccatctctagaccatattgcatttgttatttatgtttttgcttatctcagcacctttatggaaatgtgtttcttgttgtctgtcttcaccagggagaagccaaggctgagtgactcatcagaggatcacggttccttccgagttttctagagcctgcagtatgggcaagagttgagggtcagtggggaacagacaatgtttttgtccccgagaaacttatatgtggatggaggagctttctgtctaagaactccatgcccctcaggtttagcacctgaccacttaaccctttgtttctttcccatggttaagggaaacaatgagttaatttcctctctgcaaatgactggtctttgtggaggacagaggaaagaggaatggagccagtgattgaagtttgttcattcattgatgtgtgtaagttacagtcagctgttggctagatagcctcagtgaaacccacttcatgtgcctagagagtcccctcctgttgaaggtacacagggcttgtgcaccactttaagagtgtggtagaagtgatgatactgtgattccagctaagcaatttgagccagcacccagctgtctgagccattctagctgggaccccagatggttcaccccaacagatagctcagggagctgagacagaagatactgcattccctgttcacattctaaatgcacagagttgtaagagagatgaaatggtggttggttgttcta

SEQ ID NO: 106728 - DNA, 1680 bp, Homo sapiens
acacaaaagcaatagttgaacaagagaattttagatggtgggtaggttgacttggtacagaactccatgaaatttcatcatggatatgatattttctttttgagacggagtcttgctctgtcgcccaggctggagtgcagtggcgcgatctcggctcactgcaacctccgcctcccaggttcatgccattctcctgcctcagcctcccgagtagctgggactacaggcacccgctaccacgcctggctaattttttgtatatttagtagagatggggtttcaccatgttggccaggaaggtcttgatctcttgacctcgtgatccacctgcctcagcctcccaaagtgctgggattacaggcgtgagccaccgcgcctggctgatattatttttactgagttctgtgaggccgatattcttttctttgtagcatgacattgcaatcattttataaatcttggcaaatctgaattttggtctgtggataagttggtggaggttttagtggtttggatcttgtataaggtcttgcacagtgctgctggtggtcagggtatgtgaggaggtgctgccagaccacttccactgaggtagggtgggtacatagatgcatttttaagtactccctacaacaaaaaccattccctggggaatgtaaagtgctggaggcaaaataatctgcagaagaaaatctaaagaaccatatatatcccaattaaatttctgcctctgctaagcaaattgagaaaatcagcagtctggttccttttcagctgtgagaaaattgggaatagaatacctgacaaggtgtgtgttggagatgacgtcattcgtgtatgacaaccacaagagttgcttgttaagaagcaagtatgctagtcatttgatgacttaatcttttatcttggccgcccggggccttcagttcagggtgttgatttcatcagaactaacctagaaagaatgatatgaaacttcgtgagtgcccggccctccgatggtcccagctgtcccagcacaagctggagtgtctattgctttacctggcagagagctccgggctcagaacaggaaatgtgggagttctccacccaactttgacagacgggagtggaaaggagtgaagcgagcggaagtctgacttcatttttggttttcagactgtcagactggaagggtaactttaagtgggggctcgcttccccccccccccccttagtttttcatttatagttatcactaaatatattccaatgatggaaaattacggctttttacttgccatttggcagctgtgcctgtatctcttttttagtttttggtgtgtattttaaatttagttaggattgaatggggtggaattatgagatttaaaaaaaaatgaagtgttgcactgttaatttagggttaggtgcagtataaaaagacaagttataatagtagctggcaattattgagagcttattgtgttctgtgttgcaggtgaagaccttgaaatacatggtatcattttttttatcctccttaacattctaggaggtaggtgctgtaattattttcatattctagatgaggaaactgaggctcagagaagttcaatagttgcccagttgcgaagttcagtagtgttacctaactaatgaatggtgggtcgtagattccaatttaatttgtaggtt

SEQ ID NO: 106729 - DNA, 1050 bp, Homo sapiens
atgtgccttaaaagttcatagcctcatttttatgagcttcaaggctttttgcattagatgaaaggaatagtaccctgtaaaaattggtatcttatgggcttgaagctttcaccagcattttaggaaaggaaagggtaaaaaaaaagaaaaaccccccaaaaaaaccatcaaatggtttcagagtataatctacaaatgggataagtgatcattatcttttggctctagtcaaataaggaaggcctaacagattagtcttggtctcttaaatcttaacctctaaatatgtaatttttattaaaggagtatattctagagtaaaaactaggcttaatacttgatttgttgcagaattgtcacaattaatgggtttttgcaagtgctaacaagttgagtcttttcatttgttacttcagcaaatgtttattgagagcttgctgtatcactcatttcttggcacgaaaaagctatgtaacaaactaccctaaactgtgtggcattcagcatgaagtattctcacactcaggggtctgcaagttgactgggaaactgtgctgtatgtgtctcattctgcagcctggtcctgggactgacatgacacactgtcatttcagcacatacccagagcaagtcagggaagtatagtcttcccatgaaggctgggggaggaggagggagagaatatttgccaaaaaaaataacggaatccaccacaactactgtttgttttttttttttttttcccgagacagagtctagctctgtcgcccaggctggagtgcaatggcgcaatcttggctcactgcaacctctgcctcccgggttcaagcgtttctccagcctcatcctcctgagtagctggggtttccccctgttggtcaggctggtcttgaactcctgacctcaagtgatacacccaccttggcctctcaaactgctgggattacaggcaggagccaccacacccagccaacaactactattttgccttgtcttgtgagactagagttggcgaacagtccttgctctcatgggtcttaggttcctggt

SEQ ID NO: 106730 - DNA, 3307 bp, Homo sapiens
cagcatcaagtcatttcagaaaagacagagatcttcaccaccaccccccaccccatgaaatgtccctaattcctacctaagagctagatccttacaaataaaattggaaatggtagtattgtgttctgtatgtttgcattaaaaggaaacaaaatgtcaagtgattaaaattggtacctcagggaattatttattatagaaacatttaatgcagtgagatctcccctccccatccagacgtgtttttttcttttctgcaaatttgcccagtgtttctgaaaatgcgaatttaaaatgccttatttctaagctaaatattgaagttaatccttacctgaggagaactaatgcaggcccctttattgccaagagatttttgtgcttggcatttgtttttgtttatgagactcaatctatgaaattgaggcaggaagcctgtcaagtggcttcagaaggtctgagcacactggggcttataagacttgaggcgggaagtggttgatcaaacctgagcttgctttgggaacaagtactgaggcaaggggaaggtttggaccttgctagtgatcatataggatcacttttgtttaatatatgtgagagctttcagcttccgtgtttttctaaaggctttaacagcttggcctgtggacaagcaattatttaattaaaattggcacagatgtccaaaattttccattgttcttcagactacttgttttttgttaggtagacacattgttatgaactggacaggaagcaaaattggaagggcaggtaggagcagctgttaaggccacggacatgtaagtttctgcattatatagggttggggtctgcttatttgtcatgtgattttaagccatgttatgtaacctgtctgagcctcagtttccccctgtataaaacagggataattatcggacctgcctcctccagttgtgaggattcagagggatcttgtctgtcaagtgtttacattttagatttttattgagtcctgtgaggctgatactcttttctttctagcatgacattgcagtcgttttataaatcttggcatatctgaactttggtctgtggataagttggtggaggttttagtggtttggatctagcataatcataataatttttagatattatatatcttttttgaatattcaaagtttattttaaaattttctttttgaaaacctcactgaggtgagttctttactcctgggaggtcttcatcccccttcacctattccatcctaatcgaaccaattcctacttgttcttcaagactgagctcaaataccatggccttgagatcctccacccccaaatacttaggggccttctctgggcaccctgaatttgtttcttctaactacattctattattttctaaagacctttctgtctcccctatttgatagcaggtcccttgaagagaataatttcatcttttccattttgctatgtatctccagcaccaggacaagacatctttataatatcttaatacatgccgactgcaacttttggagcttcaatttcctaattgttcactgggtcattgggatgactaaatgaaataatggctgtgaagcactttagacagggcctggcctgccatgggttttcattaaaattggtgggctgagaggataataattgctgcccttctgtaaaagcctgatatgaaaggtttagcctgtgatgcaggatgttgccctgccatggacaggaagtaaacacccattaactgcccatgttgggccaagccccttgtgctgagtcctgccccaccatgggggctgagcagagctctctggctcacctgcttcctggttgaaatactccagtgtggaatacctttcatcatgtctggtgcctttggacagttttagcttttatttcccacaaggcccatcttgtgccattatttacccttggtaagtaatcaaggtagaagcatcacagtatatgtgttgggattatttttgccttagtcgtattaggtttaaaaatttttttttttaaaccctgcgtttatttcaataagaaaatttaattggggtaggaagaaagagatggagaaatagagattaaaacagaacatcacctcccagcctggtttcttgagcccaattggaggccttaaaaggcatctggggaaggaatgtcaagctgttttatcattaaaagggaacaagggctgggcgcggtggcttgagcctgtaatctgggcactttgggaggccgaggcgggcagatcacgaggtcaggagatcgagaccgttctggctaacacggtgaaaccctgtctctactaaaaatacaaaaagaaaattagccgggcatggtagcgggcgcctgtagtcccagctgctcgggaggctgaggcaggagaatggcgtggacccgggaggtggagcttgcaatgagcctagttcgcgccactgcactccagcctgggggacagagcgagactccgtatcaaaaaaaaaaaaaaaaaagcgtggggggaacaagacctgattaaccagagtacattttctcaagatatggttacctagtttaactaaaatgtcaagtttctttacttttaggtagagtaaggttaactctgtgtggttacagtggctctctcgggggcagataggttacttattagttcgaaagcacaattggggaacacagacttctcgaactgggctgtatttgcaaaacatgatgcaactagttcttaatggcaaaacgattgtggagcattggtgtgtcctattgtggcttaaaagggaacttagcaatcagataataaagaaaggaataaaccaacattaataccatgtgtagaaagtgatttgagatggagaaaacgattaacttcccaaggtggtctgaaagtatatgttaaaatagacttgttttattcatggaatatttcaccatatatttgccataaggcctgaagactctgttaggtgcttttcccatttttttcccctcacacttgaggggtaaagaaagatatcggtaggtcataatcatttatacatgtgaaattttgatattgcatatgcttggcacattgaaagtaagcatatcagtaccatagatgaggaagcatattgctcccagattttattgattctttctcatttctgcctgtctttcctctccttatccccctaaattataatttcattgaaaaagggcttcttttcaacacacactggtgcctgtcagggagtgcggggttgtgcggaggagagcatcaggaaaaatagctaatgcatgctgggcttaataccta

SEQ ID NO: 106731 - DNA, 1053 bp, Homo sapiens
gaggttgcagtgagccaagatcacaccattgcattccagtctgggcaacagagtgagacgaggtttcaccatgttgggccaggctggtctcgaactcctaaccttgtgatccacccaccttggcctcccaaagtgttgggattacaggcatgagccaccgtgcatgtcctgcctctcctctttaaccttgaatcaacaagccaaatctccactctccattactctgtggctgaattgcagttgctgtggtgtgtccttgtctccacatggggaggtggtggcgaatggctggtaagaaggagagggaaggagggaagagtttgtattagggtttatggctgcccctgtgactctgctgttcaaggggaaagggctttgtagttttgcaccaactgccctgttcatcttcacagtcttacaggtatcaaagttatctcttcttctttcatatgttcagggcagatggatcaaagcagttcaaagggaagttttgcctaaatacatgactatagatctaatactccctgggactgtgtatatgtgtgtgtatgtagtggttgttgttaattccagctctgtactattaataattctcctgttagtgtcaatcattaggtgcaatttacctgtctggacaaatggcccttactatgcttgttgtacctgaaaataccaggaaggccacctttgaagtgcagtgaatcagaagcactatttttgaaaaataggccaggtgcagtggctcatgcctgtaatcccagcactttgggaggctgaggtgggcagatcacctgaggtcaggagtgcgagaccagcctgaccaacatggagaaaccctgtctctaccaaaaatacaaaaaattagctgcgtgtggtggcgggtgcctgtgatcccagctactcgggaggctcaggcaggagaatccctctaccagggaggtggaggctgcagtgagtcgagatcgcgccactgtactccagcctgggaagagagtgagagtctgtccccaaaaaacaaaaaaagaaaagaaaaatagtctatgtgggacaggt

SEQ ID NO: 106732 - DNA, 2479 bp, Homo sapiens
ctatgattgagctactacattccagactgggtgagagagtgatactgcatctctaataaacaaaacaaaacaaaacaaaacaaaacaaaacaaaaccatgttcttcaaagagaggaccgctaaaccaagaaaaaactgaaacaaaaatttaaaactcataatcccattcccctgttttatttatgtgtctgtgtgttgatatgtttttatgtcatactttctttaaacgacagtattatatgtgacatcattagaaacctccttaaagttctggtaccataggatgatcagagtctaaacagatgaaaaagctttacttcagcattgcctagggtttgacatatgctgaaaataaaccattctagtttgtcttactcatatgtatatgtatagacacatatacatacccatacacacatatatacatatatacctacacataaacacatatacatgtatacctatatgtgtgtatatatgtgtcacaagtgaaaagttacttgtttgactttaggagaagcttttaagactttaacatttgaaataaaatgctgggcaactttctgtctttagaaggtgggatttcattttttgtcgtatccaatactggcagtaatagtttttcagcctctcatgagttaattcacatttgctgacattattcatatagcagccagccacacaagtgcttccatactggttgctggttcctgtctggtggacagctaaatcctcatgagcaatagacaataagggctaaatgaatgtgatagatttctgtttacttggctgtgtctggtagtggtaaagtcacaaatttcagtgatgggaagaattgagttgtcacttaacaaattactgatctctctaaatataattttttatcagctcaacataacccaagtaaatccagagttttgaagtgactgactcgaggcccagtgtgtcattcaaagaaatccagtccaggaaccaaccctagaagtgattgcaatcttattggaagtcaggtgattcccttttgcagcccttcctaagtgccctttccctctctgtttatttgtcatcattccatctctagattcctggtagatccatgggagatgcatggaagatctctttgtggtatgtttcttgtcctctaccaaatctctccctggcatggtgctgccattcctttttgtgtcatcttctttccttgtctttgtccttcagctattttcttctctccctttgatttccccccttccactcacacacactgatggcctcaatatgtatagtaagacacaaggggaaggcgtgggagatttaggaatggggttagtgctgagtgggaagtgctaaagattttcttagtgggtgaggagaggcaaagaggctgtgaatattgattttgaacagctgaggatgaggctgttacttataagatgaggatattatcctgatgggaatggtgttcctgcttagtgatgtaaccagaagtctgaaaggtgggcctattttgtccttaaaacataggaagagcctgtagtatcatttttaggttgagacaaaagaaaatcaagatatgggccactcattgcagatgatcttctctgcctccccatctcctgcttggcccaaaagcagcctgctgggagatgcagcattattgaagactgtggtctcccttgcaacacattcaaagatctgtaggtcacattgattcttagttaaacctaacccacagctttgcatatgggactgctttaaaacagctgccctctgtgatccattaaaaataaaaaagccatttaacatggcaaattcatagtttcatagattttatcttgatgtcatctgaactttggaattataattcagcagatgttttaatactcttgtacattaaatcagatgtcaatgggatacagaaggaaccaagctgcaataaaacagcaaaggtatatacaataatatatgttgaggacccttctaattgttgccaggagtagtgtttgtaatcatggcttcaaaggcaccttggtgggcttctgtggctaaaaccccattcttctagctctctcctgtgatcttttgcctgtcagagtttgctttaaatctgcgatagtcgaagatgcctgagactcagaatttttggacttaccttgttcatgggatttcatctatcagtggtttgtctgcaatggcagattgcatttttttcccaaagttggtggcaaaaaatagctcccatgccagatacaatgtgaacttgactgtgcttccatgggagtggggaaggtgatgtctatataccatccttttaaacctggacagacctttgtgattatctggaccaacagagtatgacagaaagtcacaccatgtgactcttgaggcaggaccgtaaaaatgccatgtgcttctgccttgctatcttgggatgcttgttcctggatcccagccaccatgctatgaggaagcccagactaag

SEQ ID NO: 106733 - DNA, 1030 bp, Homo sapiens
tgcttaaagcctctcagggcttctctctgttcttaggatcaaagtatttagagctacaagagccctcatggtctggcccctgccccccggccagcttcattgtacatgtggtgttctcttgtcgttcctgtaatgtggtatgccatggggtctttgcacaagcctttcctctttggctggacactgttccctgcccccccatactcttcctacttaatatgtagtcatcctgcagatttcaattctaacatcattttctccagggatcctggcctgacagaatctcatcttgtttaatgctctcataagaccacttgtttcccttttgcagcacttgccactcagttgtatctttatgtgcgtttgtggttgtatgggttgtgtctgttccccagaatgcccagctctgagctgcgtgagggtcaagggcattgctgtgcctgccaggtatagtgcctacatgtggtgggtgctcatgttttagagactaaatggaggaggagatgaggaaaagattgaaatctctcggttcaccagatggtgtagggcccagcattgtaaattcacacgttgactgtgcttgtgaattatctggggatgcaggtcctgattcagtaggcccaggttgggcatctctaacaaactcccacgtgatgctgatgctggtcctatgaactatactaaatagtaagaatctatggagccaggctgggcatggtggctcacacctatgatcccagcactttgggaggctgaggcaggctgatcacctggagtcaggatttcaagactagcgtggccaacatggtggaaccccatctgtactaaaaatacacaaattagctgggcatggtggcacatgcctgtagtcccagctacttgggaggctgaagcaagagaatcgcttgaacctgggaggcggaggttgcagtgagccgagatcaggccactgtattccaaccagggtgacagagtgagactctatgtccaaaaaaaaaaaaaaaaaaaaaatctatggagccagataagc

SEQ ID NO: 106734 - DNA, 1062 bp, Homo sapiens
ttgaaggaattgggctggaggagaagttaggctgtgaagtcgtctcaaccaaggcccagccgacctgcaggaagctctgacattgagatggttcttcagtattgtcctgggttgggatgatagggcaaggcttgtataccctcaagtcaacaaggattggaggcggctgttctgggaaggctatgtgacctcagggaaggtgactctctgcagccaacacaagtcttggagggggatcctggaggcgggtggcatagtacagcatagtgttcactgcatgtgggcatatgacataggggtgtatgtttgtgtgtgtgtaattggcttaataagcaccaccttcttcagtaacatgaccaagaacacacatctgggaagtgggtgtgcttggatttgagctcatgtttgactagctttcaaacctatcttttcgtcgctctaggactgttgcaacgtttgttgtcgagaaaagaatacttgggccgttccctttcattttccctttggcgcatttatgtgtgctgccatgtggggacacccttgaagttagctgaattggcttcctctggtatctccaaccttttgtcacagagagttgaaaggaaaggtaaattcttttgtcctaaatgaatcatcagctggaagaaaagtctgaactctagccctctattatattccccagccagggatgactttgggcaaattggtgtccctccagttccctgggaaggcacttgactcaacaggcctctttccatttaaataccacaggtaacacttggcttcctctgagaaagctttcaagtcctgcccctttgcttacagctggctggcattctgtgtacccactacggcactaggatgagaccggccataaaatatttgctctatgcttttatcactgcctggaaatcctgagggcaaaggtgctttgtaaacaccaagttggtagtgagtggtgtgcagaaaatttggaaataaacacagttcagttcatgtaggggttatgggacttctccaaataccacaaactggaaattctgaaaagaaagttagatttta

SEQ ID NO: 106735 - DNA, 1050 bp, Homo sapiens
gctcactgcaacctctgccacctgggtacaagtgattctcctgcctcagcctcctaagtagctgggattacaggcatgtgccaccatgcctggctaattttgtatttttagtagagatggggtttctccatgttggtcaggctggtctcaaactcctgacctcaggtaatccacccgcctcggcctcccaaagtgctgggattgcaggcgtgagccgctgtgcccagccagaattgaagttcttctttgggaaaacagcacacctttttaaaaaatttaaaactgtgaccctccccacccctgggttcctcaaacataaatttagacacaataggagttaaaatgattaaatgagctacatgcaaactattgacctagagtgggcttcagagttggctaggttcctcttttctttgcttcccagtaaaaccctagaggaaatggggatgggtgggaaagagctgcagttaaaaaatagcagtgattcagatttaccggacattacaggggcacttctgatgtgccaggcactgtgctagatgatttcacatctgtccccttatttattcttttttttttttttttgagatggagtctcaccctattgcccaggctggagtgcagtagcacgatcttggcttactgcagcctctgcttcccaggttcaagttgttctcctgcctcagcctcccaagtagctgggattacagatgtgtaccaccatacccagctaatttttgtatttttagtagagatggggtttcgccatgttggccaggctggtctcaaactcctggtctcaagtgatccactcgcctcaggctcccaaatggttgtctgtttttatctctcatccatttctacctctgcttttctgaaattagctagttattactgagtcttaatattttttttttgtttcaaggtaagactggtgatatggaacttttaatactacctcttctcatatttatatttataggaaaaacttggaatgaatgtttactgcataaagtatagtttgtattattcatgttgagtggatcatgg

SEQ ID NO: 106736 - DNA, 1422 bp, Homo sapiens
ggtggaatgttattctaagtggaggcaacagtgggagcaaaggcctggaggcaggaaaattccaagtgtaccatggacccagagtgtcttaagttaacatttaagaaaatgacggaatgagatagcatgtgtcctttaccagcctggcagaatttcacaagtgtttattaactcttggtcttgaaatgatttgataaggcctctttggagagtattgagaagaacctattaaaaatggtaacattttgacctagcctttctaccactagaaacctattctttggaaatactcaaactcataaaagatatatgtggggctgtgttctctatatagcattgcttgtaaagacaaaaatttcaagttggcttatatgtgttgtgggtggttgaaaaattatatggtatctccctacagtggcttattctgtagtcagttaaaaaagtgaggtggatctctgtcctgacatgtaaacagatgatgatatattaaataaaaaagtaagagacagcatctataggatgatcccattgttatatcacagctactgctgacctggttgggtatgcttgtgtgtgccttaaaaataaaaaaagatctggaacaacaaggatatgttccctgtggctacctctgagaagggtgaccatatgtctcggtttgtttgggaaatatctggtttacacctgttgttctggtataattattaatagtaccctctttcagtgtttggtgaactgctttggatggtgaattatgtgtttaccctaccttcctctgaggattggaattggggcaagagaaatgggaaatgggctgtgacataggtgactcgttggtgtagtttacagcaagcaggtattatttttatgagggaaattgaggaagatggccctgatacattatgtagtggttcactgcggagccaccattgcatggtctttatcaggggagaagttaccttttttcttttcgtcaggtgtatgagtatctccgttttacttaaataagtcttcagtcaaatcattgacgatgttttcattgtctgagaaaagtgggtagcattggccctaacatgctttttcaaatacctagtggggatgtttgcatttctttctttcttttttttttttttttgagacagagtctcactctgttgccctggctggagtgcagtggtgcgatctcagctcactgcaagcctcacgtcctgggttcaagccattctcctgcttcagtctcccgagtagctgggactacaggtgcccgccaccacgaccagctaattttttgtatttttagtagagacggagtttcactgtgttagccaggatggtctcggtctcctgatctcgtgatccgcccaccttggcctcccaaagtgctgggattacaggcttgagccaccgagtctggcctctatc

SEQ ID NO: 106737 - DNA, 1059 bp, Homo sapiens
cctgacctcctccattctgcttttctttcttgctcagttttgcctgactttccctgggtctctccggagcaccacttacccaaagtctccagctccggtgctggggcacatattgccagagtagagccttgccagcaacgtgtcctcgtcgcttctttgcaaagggtgtgtgtattggtcagctgttcttcggtcccgccatcagctttgacccagtcgacccttccacctttctggcttggaggctgtatgctcagtaattatgtgcacaggatttgaatttcatgtagtccgggttcaaatctggtcctgctgcttccttgctatgtggccttgggtacatgtttttacttctgtgaagtagcagtaataagagcacatatcttatatgattgctacagggattcaatgaaatgatgcagtcaactctcggcatggaacacagagcaaaggcaacactgaatgactgatagttattaccatattaattttgtcagttttcctcctttgaatctgatcacttgattctaggcttgtggaggcgctgaatagacttcgtaattgactcaaaacacttctgttttaacactctgggtttttatcttctttcctggcaccactacctcctttgagattttatagagctgaatttgttggaccaaattatatggagcatatttgatagaaacacattctaagtatactgtctttatgtcctcatgttatttcctttcgatttcttgaagtctcaatttagtcaccactctgtaggaagctacaaatgatgatagagcaattaagtgatccctgagtctttagtgttctagaatgattgatgtacagatagaaagagagaaaatgcgtatagacattttccaataaactttatgtcagggtagtttcctggtttggtcaatttttctttctgttgattattccagtgtagatgggataaaaattaagctactagacatttattgcttataaactttttggcatatttaaaaaatatcatctaattgttattttaaggcagtagctatagaatatctagcatat

SEQ ID NO: 106738 - DNA, 1023 bp, Homo sapiens
gagtagacctatacggatgataacaatagtggagcttgatttagtgcctctctactcaggctttgcactgagggccacacgtgcaccatccttcatccttagcacgtgctgtgaagtgtgtgtaccatcctctccagtttagcggtcagaaccctgagccttggaagttgttacttgtctgagattaggtgacagcagattaggtgacagcggtgggtttcctctagcttggtgttcgtcaggaggctgcattgttgcctggtgacaggtggcaggatccccttcagggtgtgatgtaccattgtgtgaattaagggtaggtgaccccctggagtttgatctgaagaaagctgaggccaggcacccttccttgcaccctccgttgggagggagacgttggtgccttggcgatggtttcactgcgagcctggctcattgcagcgcggagcttcccggtttttccatctgcagccgcgccctgcgcgtgttgagacacaagtgcttgcgtcttcccgcactgactaactcctactttctccttggggttcccggcagtgcaacttggcacttcatgaacgtagcaaggttctatgagacttaaacaaaattgtggtaaaatatacgtaacataacataaaattaaccattttaattatacaattaagtggcattaagtatattcaggttattatgcagttattaccaccatccatctccagaactttttcatcttctcctactgtgcctattaccaactccccattcccctttcccctggcccctggtgacctctaaatttctttctctgtgaatttgactactccagatacctcataaaagtgaaatcgtacagtgtttacccttttgcgactggcttatctcaattagtgtaatgtcctcaagattcatccacgctgcagcgtgtcagaatttccttccttctaaagtctgaataatattccattgtgtatgtaccccattttgctcacccttcatctgttgatggagattgggttgtttcca

SEQ ID NO: 106739 - DNA, 1483 bp, Homo sapiens
tacagctcccatttattgatcatttgttacctgagctcttgtcaaactctccacagacactatcttattattattatttttgcaacaactttgcaagtagataaaatttaacccattttagtgatgaagaaaccaagtcttagagaggtgaagtaatttgctttaacttaacagctagtaaactgcaattctaatctggttctaattgcagagcctgtgctgttaaatagtattcaagatcagtggttttcaactgaggtaatgttgcctttccagggaacatttggcaatgtctgaagacagttttgattgttacatctgggaagtgccactggtatatagaggggtaggggtcggggtactgtaaacatcctttaatgcaccagagagcccactgccaacaaagatttatctggcccaaatgccaatagcagcaagattgggaaaccctgccttctagttctcacagaattccccatagattcactcaccatctcctgagctcactttattttcttcttagctctcatcaccatctgaagttagcctgcctattatctgttccactggagtgtaatcacttgagagcaggaatctgatccataatccatgtattctactctccttatggccaggcagtacctggcagctgagcagcataaacatttgtggaatgaatgagtgaatgaatgaaccaatcaagatggcatccttcttggtgtgggtaggtaccttccaattggatatggctcagggaagatacgagaatttaccggaagccttgaacagttctggggaacaatggagacacactgtggcttcccaaagggaagagcgagaggtgatcagacagccagttctcattcttgcaaaacttgacaagcaatgacttgaaagaggaggatgggaggtaagtaatgagaccaacccatgctgtgctgagtgaggtgagagtcagagctcaggtggctgattaagaccccgagcactcagaatgcagaaggctgcaaagagggtcaccagcccatcagcggccaccaaaggctgtaccaagtccacctggaacctagccacaagggatggtgatcatgatccatgtgaggcaagatagtttactggttacagtggtcactggcctattttcaattccttcaccggcccttaccggctgtgtgaccttgatcacttgcttaacctctctgtgcctcagtttctgcatctattaaaaaaaaaatgcctggctctttgtgcctggctggaggccacttagcctagaattttggaatcccagggtttaactcctggcactgaatacccttgttggaaggtagagaatgggatgtcacctctggggtactagagtatggccaaatgctgttaaccaggcagtcagtctttggaagaaaatactctgcttttacatcccctggtggtagcagaaagttacacgtgtgaaaatatgcaggggctgctcctgtgtgtg

SEQ ID NO: 106740 - DNA, 3344 bp, Homo sapiens
ccggtgtttctagtgtagatttttcaggttttcaagagaaccagaagcctgttctttttttttttttttttttttttaatgaactttgccagttttaaagcactggttcaaagttttcttttttttaaaaaaagggtgaaccaaacaaaacacatctgggagccatatttggtcctcagatgacaagcttgcaatgccttgtttatatatttgtctctcacttggtttctctcatacttcatctctccaaaagcagtaattgcattactctttctgtattctcagggcccaggatactgaccaactcacaaaaagggtcaggaaatgtgtgttgaaatgaatagtacattttggaagtggtctactttggcattatagtccatgtaggtttatttgaggcccagctggtgacagctttccaattcaagttatgaagagctggggagagagcatattttgacagctgatcataattcttggaatattttgtcccagggccctggtctgccgggtcttagaactgggtgcaaagtcacatcttgaaattgatgttcacgtgaatttgagttcttagtacaggaatagaatctattctctgccctgaagtgatttgattgtgaaatgtgtagctttaccaacaagaacgaatgaagtttatgtataccatttagggaggttttaaatttggcaggaaagttcctaataatacaacttgtttggacttttctatagataaattgggaccctaacctttaccccaggagtggacagtgtcagaacatgattaacctctaagaccggtagtcatctgtttttcagtgccagcattacatggtagaattttgttttttgttttttgcaaaccagtgtagcccttcttgctttcctgcctgcataatggattgttctgcattgcataattcatgtcgggcaccaggtttgctgcactaggatgaggaaagggattcaggtaattcagatgagaaatttagtcagtgcagttttttttctatcaaggagccaagaaaggtcctctattaaattaaaactataaaattgtcagcaaaagtccaatgcagggttaaaatcttacttggtttggacttgtactgtgtgtcttttctctccttctctagtcccctttccccctccatttccatatcagaatggaacattccaatagactgtctaggaattcaaattttagataggatattctatatgtaatccagaacttctgatgtgagatgcaacttaggagagttttcaagtttagactactgtatgccccgatccacttccttcattgtggtcactgcttttggagcacccagaagtcccctagcttggcgtgaagtttgacttctttctgctactataaaatgctcaaggataatgtggcacaaaaagcttatatttcatggtgtttcaggctgggcgatcccaggttaaatttctgtgctttcgtctttgttaaagagtttagccatgtcacagtgcaaatgcacagttaagttcctccacagtgtatatgaaacctgttttatttcagttaggattagcagagcactctagctgaccctaagtgaactctaggtacatatgtgataaatgcatattgctatatgccactgaggtttcgtgattgttaattatatggcattataatggcaataggtaacagagacaatgagattccatgttcgaatggctgacacgtgtccaaaagctatgggttaatttgggactttgaatcttgagtttaggcaaagatggaaaaaaatccccagtaattgttcattccagtgtaaggacagcagatgagactgttgtttcggatacctacatccaaggaaatgtcctggcttctgcctatttgaatctatgagccacatttattaaccctataaatttatttttcttttaaaattaaaaagagaaaacttttgaagacacaaagtgttatctcaatattgatatattatacatgtgtcattatttataagagaaaaatcgggaaaataggatgcccagcaaaggaaaaattcatgtagctgttgcctaggtatgtctcttcaactccgtgggaaaatactgccatagggaagaaaggccctggctttcttaagcaatgtgaatttgtttctgcgacattttagctaaaaatgtaagctcaagatattctgtgtgaaataaattatcccaaagaaagataattgtgagaagaagccattaatgggaataagacagctggttgtaaggattggaggcttttttttggtggaaggagcttatccatggggtttaatacaacatggtgagtcaccctgttgcctgaattccagaggggaaagagacattcgggaaaaggctgcgggggaaatttgcagtcctgtgcacctgttaccaggcacttatattcacctgatggctgctaacagattgcaggcacagcttcttgaagaaaatcatcaactttgaacacagtaccccacacattggatttgggtgaatggaaagtatatcagaattacctgggagagttttcaagttatagtcaccggggcgtggctttattagtgattctgactcatgtctccctgctcagcacagtcctgatactccacctccaaagagtggtccacagaacagccacttacatagaatcaggcagggtgtttgttaaatatggggattactagaccccatcccagacctacgggatcagaatcctgggggtgtggactctgtgaatccagtgtttaaaggtgctctggctgaatgtggcaagtccagcgtgtgatgctccaggctctaaaatattggcctttcttccagttatctaacaagtgatggtaacagaccccactgtacactcgaatgaacactgattgtgggaggcagtcaagaatagaaagacaaattgagttatttgagctgcaagttcttctagggggcaaatgctaggtgtgtgcatatgtgtttgtggaagttcattttcttgcttcagggttttagtaatttagagggaccttttcctctgtaccatgcttgcccttttaaggcagaaagggaactccggtggaaagacagcattgactaatagaactttctgtgatgatggaatattctttatctacactgtgcaatattttattccctagccacatgtggcaattgtgtacctgtaatgtggctgaggaactgaattttacattgtactgacacacagtttaaatctatctgcttgtggctagtgtctaccgtattgaatggcacagaagacagtgcctccacaaatagtgaggacagttacagatctttggtgtcacatccagctgctc

SEQ ID NO: 106741 - DNA, 2558 bp, Homo sapiens
ttctcctgcctcagcctctcgagtagctgagactacaggcacccgccaccacgcctggctattttttgtatttttagtagagatggggtttcaccgtgttagccaggatgatctcgatctcctgaccttgtgatccgcccgcctcggcctcccaaagtgctgggattacaagtgtgagccaccgcgcccagccggtcctctctttttttaagaaaaagaagaaaaaaaaaagaaaaaagaaagaaatgtgtctaccccatagcctggagccctcatgtcaatgtagagacaccggtcttaggctggcccttttgctgccagagagacatgcttggtgaccccacggaagatagtccgataaataaaaaatggtttcccaaagtgtttcctgccaaaaaacggtgtgctgctatatattttcaagcaattctgcttaattgccgccatctcctcttctctctgatcagtctcaccaacactgtccattctttcctcccgtgtgccctctctctatcctccatgcacttcattatttcaaagagtcacaatggtgccttgtaactatagttttgcccaactgtctcccatactagattatgtgtttcttgaaggcaacatccttattttatggatctttgtagtctctgccctctgtaggtactcaggaatatctgttgaattgaattctttttgagggtaatgagtaggcaaaattaaaaaaaaaattgtctgagatcttgttggctagaaaatccatgtcttatttttaaagcatattaaatatacttagccatatgtctgacttttccgtgatgatttaagatggttgtctgccagttgttgtagcattttgaactatagagaaaaatattgaattaattatgttgaaggtcttagagggcctttattctggccagatgtgtgcatctgcttgcgcctgttgcttatgtaatgtggccgtggaaggtaccaccttggcctggtttaaatagtattttaccacctggattcttggccaagcgttagaatttacatctgatagggagagcatgttcatttcctcctccatctatcagcctgtttaagtctgtgtgagttagttaagaattcagaactcaagatcaagttgttaaaaaaaaaaaagctttctccggtgttgcagcatgtgtttttttaacattttattttataaaaagcgtaggcatctagattttggtttctaatcttttaaaaacttaaatagtatcgtgaccttatatgactatcaatcactatctaaaattggtctgtgattccacagcttatgtattttcctggtgaaatttaaattttttctcatttaaacaatgtatacaatacagaaatatgttaatatggcagaaaaatatgtccgaattgcccgtaatcccaccccagagaaatacatgtgttaacactatttttatccagacgtacacatacacacacacagacacacacacatacacaaacagaaacacaaacatatacttttgaagatgggggggctttttcttatgaaaataagactgtacagtacatgctgtttgggtgggagttttcttcatgcctaacagcatatcatggactttttttgtttgtttgtttttttgtttttttgtttttgagacagagccttacttctctgtcgcctaggctggagtgtagtggcacggtcttggctcacctgtatctcctgggctcaagcgatcttcccatcccagcctactgactagctgggaccacaggtgggtgccaccgtgcccaaataattaatttttttttgggtagagacagggtttcactgtcttgctcaggctggtctcagaatcctgggctcaagcaatccacccaccttggcctcccaaagtgctgggattacaggcgtgggccactgtgcctggccaatcatggactttaaaaaaatactatatgtagatcaagttgactatttcagtgactgcaaaatttatttttggttactttataatataataagctctactttaaggttgaacatttagagtgttttcagttctcttttatataacatattgatgactaccctcatacatacattttagcgaacatcttcagatattttctttggatagctatctagaaataaagctgttggctcacatgaattatttctttttaaggcttttggtatccatcatcattttacccccccagagaatatattaactaatatcccttctggctgtatatcgagagtcctgtaatttttcacttatctcacttgtaaagataataccttctactggaattgtttatttatggtggtcttcacaagtcagaaactgagtagttttttgtttgtttgtttgttttggaaacggagtctcactcttgttgcccaggctggagtgcaatgatgcgatcttggctcactgcaacctccgcctcctgggttcaggcaattctcctgcttcagcctcccgagtagctgggattacaggcatgcaccaccacacccagctaattttgtatttttattagagacagggtttcaccat

SEQ ID NO: 106742 - DNA, 1051 bp, Homo sapiens
gctccccatttgaaagcccttgggagagaagaaagaatctcttgagagatggagattgcagtgtacagttctctggagagcttttcaagtctagaaaaaaaacactcttttttctgcttgattcagatgctgcctttttgaaaggctgagactggattagttcagacaagtaggaaggaagcctccggacctcacggaggtttgagttgcccgagtttctcccacattgtcctcggtgaggaattgcttttaatgattgttcgcaggtcgcaggttgtggtagtgtggagggagggcgagttcttgcgtgttcaggcaggcttttaccatcaacgatgattcttgagaatgggactctgtggtcctctcatcttcctggtaccacgtctgggctcctacatcaggaatggctggggaagcagtggggcttagtggtcataagggtttggagtcagaccgcctgggttcaaatccaggctctcgcacttcccagctgagagaccagggacaggttagcctcccagaacatcagttctcccagttgaaaatgagaatgttacctgtgtcataaagtggttgtaaggattaaatgagataatgtatgtaaaacttgtactaccctgcctggctcttaagtggtgctcattgaagtacctaccctacaagcagctgtgatcttttcttttcttgatctcagctcactgcaacacccacctcctgggctcaagcgatcctcctacctcagcctcctgagtggctgggactgcaggcatgcacccaccacacctggctatttgtttgtttgtagagatggggtttcactacattgctcaggctggtctcgagctcctgggctcaagcgatctgcctgccttggcctcccaaagtgctgggattacaggcatgagccttcgtgcctggccagctgtgatattttcagctgagaaatggaggtacgtcagttagtgcctctgaatcagtggttctcagctgggggcaagtttgttccccaggggacatttggcaacgtctggagccatttttggttgtc

SEQ ID NO: 106743 - DNA, 2104 bp, Homo sapiens
acactgagaataaaggctgtcaaattcgttaagggctgacattcacatcctaaaaaagtaggttactgcatgcctgcctgtctttttgcagctcatatgtgagatctgtaaccttgaaaaatccctagtacacactggtgcattgctagacttctcccctatggaggtcggcatcgatgtagtatttcttatgaattcattttgttgtttcaacagatgtcaaggttggtcctatcatattgactctgctttctagttaagtgtcctgtggagggtctaatgtgttctggatgtcaacttttccgaaggcatgtagcaaaattagaaaatgtaatttgagcagtgtcttttatgattaaatagaaatcttctctttttatggctcagtaattacataatggaataatccattattaatcatttctgtagtctctgtatctgagtgaaagccgaagtccttatagtgacttccaaggctgcccgtgacctgtcctaaggatattacttctctttctctgtcctgcctgctagtgcccacctgatcatcttacaggcttgctatctcttgagcttcaagtctttctgaaatgtcacctgcccagtgaggcctcttgtgagcacattattgaaaaccataactccactgccacgtgtcattccctgttccccctctcagctttattttactccatagtatgtagatcgcttcaccacaagtaaatttcttattttacctctttctctagaatgtaagctctgagatggcaggaatgttgtcttgttctcccacagtatccccagtagcaaaaacagtgcatggtgcctagtacttgcttgggtatttgttaaatgtttacagtcaagtttagaactagaataaatctcttctgaggtcagttacctctgaaaatgtagatatatagaagtccctgaaaatttaggtgactgatgatggatcacattaaagttggttagagtttaacatttacagtcaatggctggggctaaaatagagcttagccgattgatccaggaatattcttaaagtcagtgaacattgctggcctgcttcagttggtcttagtattatgggtttacaagtaagaacatgtgggtccttggtttcttgtcaagaaggggagggaagagtccactggagtctccttggagtcagagataaggtcacatttccaattttaggtttccctgcatggaagaggtccttgactttaaaattaattgagtgtcctgattttcagaggttactttgatttgggaaatgacggtaacaaggggtaccaggtggctgatccaaacaggagagctgaggctactagagtcaccatgaagatcttgtcgagttagggataggtctgtgcacagcatcccttacttagccaagtcattggcctcagtccactttcagtcctgtgtgctccccaccaacatgaatccctagaaggcaactctaggtcaggatttgaatgcacagggcttatctgggaggtgctcccaggaagttccagtagggcaaggaagaggtgagaccagtgagtcaagaaggccaatggagatgctttaaagagcaagtcaccactgtgtgtctaaggcagccccatgctgagtgtgtcatggaactttgcagactctctcacccctaaacagactgagaggttcttctggctgtgtgtatagactttttctgttaccatctccagtgtcatgaagatgagttccataagataattacattctcatggctaaggtatcaaccccaccattactgtggatggaggcatttgtgtgtctgtttaatgggccacagttatgcttcttacaataaggataatctttactcctttatgagacaagactcgaggctctctttatggacaggggcatgatggtgcaattaaaaggcgatcgtgccctgattataagccatgtttcaaaattactgctatatatagtgtcatcaggaccgtagtactgctcataaaatgatccacaaatagcaatttactgatgtgtcatagagtcagattttggacccaaggttggcttgggtgaagaggcaggctttacactttatgagctgggtgtt

SEQ ID NO: 106744 - DNA, 5214 bp, Homo sapiens
tactacatgcccggctctgtgtaaaatactttacttgcactatctcactccgattcacaacagttctaagaacgagttgttcttatttatataccccaaattagagataaggaaactgggattgatactggttaagtgacttgctcaaggtcacacagttgccaaaagcgagggtttgagcccttgctgcagagccttaagtatggaggaggaaggagtggggggatgaccctaccgcactgaaggggctgattcctgaggagggagtggaagcaaattcctctctcagaaatctgtagaggccttttaaaagatgcatttgctggctgctggtgatgtaggtcccttacatctcactttggtacagacaaggggctgtcctcatgtcaacccaatggagaccagctgaggcccttaaagggctcccttgtgcaagcaagtgccatgacgcaggttctccccagtgaaagcaccgaaggaagtcgtgaagttgaacatggtgaaaagttcccatgtgtttccataaggacaggcagcagctggaggaatgtgtcaaaggaagggctgggcctagctggtcctctcttggaaacaggcgtgctccagatgaaatggaggagggggcggccgactcgcctggccttttagcagctttgggagctgaggagctgacacttagctatggaaagctccttgtatttatgacttcattctccactgggatacctcctccaagaagccctccagaatcctgctaggatgcacaaattcttcctcctttgggctcctttaatgtctactttgtggcttttttacttactctgaactctgagttaggtcctcatttccatacaaggtagtgagctcattaaagggagagattgtgcctcattcctggcatacctctccaggttttgcttgaggttcaaaacctttcctggcctgacaatgcgtcttcctcacactggctttcctgtgggtattacataagctaacacgtggaaagtgcacccaacagtgcctgtacatagtaagtgctccataaagattagctatttatgtttgaattgattttagcagctatttatttctgaaactagtttttagtgtcaggaacctggataattatgacttgatagggctgtagagaaaatactgtgtgaaggcataggatgggagcagctgcaggtctcagttcaggaccattttggagaaagggtggaggaaggacaggcaagggtacctgcccaactagggggatgcctcgcagtgtctaacgggtcctgaataggggctggcttgcagtgtttgcagtgtgcaagatgctgcatgggcttgtgtctcttccttccactagttgccaaatttctgggaggcgatgtcccagggctctctcatcatggagtttaggaaggcttggtgagataatcaagtgggtttggaaacagacacctctgagttgaaaggaaactgtagtgtctccaggtgttagctctcttcaccccttgtgcacagattgttcacagcaggggcgagtgtgtgggtatgtttctgtgtgtgtgtgtatatgtatgtatggatggatgtacgtgaatctacttgtaatgggatagaaatatgatactgattgggaaacctgaatggcctggaattcattgcagtctgaaagtgactatttcatgtaataattacacaggcacagttggatcttctgacgtcttcattaccagtaatgatggccctagaaaccatttcaccagttttctgctccctcttccatgttgagaatatgatttagattgtatgacagaattgctcttaatgtgtcttcattactgtgccttttaaagtcatatcaagcaggctcatacttggtatatggtaaagaaaaatactacttttgtgttgtttgcatcccaagttagccacttccagggacacagatcactctggatactgtctacatggtgggagaaaattctgtttttctacttcatggcagttctctggaaagatacatggaccaaaactgtctgtgacaggactggattgtgcaggaatcaaactcaatggatctgccaggttggacttggttcattttaaatggagaagacagtcctttgtcaggttggagttggttcattttaagtggggaagacagtactttgtcataaaatgcctttacaaagttatatataattatgtgtattcaggtatcatttacctatagtaaaatgcatatcttagatatataatttgatgagttttaagcgatgtatgcactcatgttaatcactcaaatgaagatagagaacattttcatcaccccagaaatttttctcatgttcctgtccagttaattcccccctccccctgcaccatagatctaccatagaataattttgtcttcaacttcataaaaatgaactaatgcagtatgtactcttttgtgtttggcttttgttactcaacaaaatattttggagatttcgttttgttgcatgtgtacttcatttggttctttttttattgctaagtaatattccattgtatacacataccagtttgtccttttgcttgtttatggacatttggagtatttaccattttttactattacgaataaagctgttattaatgtttcagttgctctacatctttggccatctttgattttgtttgtcttttgaattttagccgtcctagtatatgcttcggaaaaatgtaattaaggaaactttgatacaggatataagatgtcgctagtatgtattaagatcttgccttagaatataataggtgcttggctaagctgatgcttcgtgggcattctctttttcagtccttacaattggactcagatgttagaagctgaggttcagagaatttgggtaacttttccaagggtcataccacagtggcagtagagctgcaacccagctctgtctgattccaaagcctgtgctcccaattcctgggacagtaggtctccaagtgaggtcctcagaccagtggcattagtatagtaacctgggaactggttagaaatccagattcctgggccccaccttagttctaccaattcagaagctttgcgggggatggggttggggttggggggtggggtaacaaccatggggtgttttaataaaccctcaagggattctgatgggcttattaagggattcaagggttcagttttaagaactactgtactagggtatagaccaaaattgagaagatgacatcagatgagacaggtgacctgggttctagaataagctctgccagtcacattcttggagcctacatttctctatgccaaaaataagtgggtgagcctcttcaggttatttgtgctcgtgaaatcctttgtttccatgaatcacccagactccaaaggtttaaaatggtatgattgtagtttcccaaagtggtgtattacaggtcatgcttacatatttttgcaggtgaattttgtggtttttcaaattacccaggaactgtaactatccctctactttttgtgtatgtgtggcagtgtggagataataaaagagatacaatttaaaagccaaaccaaaccaccaccagacccttcccctcactgtaatgagggaaattgtgatcacatatggttgaatatagttctttgtgtggttttttgttttggtattgttttgattcattggaatgtatgacaataactctcattttaaaacacagggccttgtctttcagagttgtttggtttctcatgaatctctggtcttgcttctttctcctcagtgacctccttctggtgtgctgtaaaatgcttaacaaccagtgctagtagtgggtagaccctgatttatagcatagctggagttgggaagagacgcgtatacttgctgttcccaagccaatgtgagctggcccccacacaccactgactgcatataagatagtgcccttgtggtggctcacctgtaatcccagcaccttgggaggccaaggtgggtggatcacttgagctcaggagtttaagaccagcctgggcaacatggtgaagtctctaccaaaaaatacataaactagctgggcgtggtggcgaacttctgtagtcccagctactcgggaggcagagtgggagaatcgcttgagaccaggaggcagaggttgcagtgagccaagattgtaccactgcactccagcctgggtgacagagtgagacccccatctcacacacacacacaaaagatagctccctgagtaaagtgccattccctcaccctgtttgttccttcatagccttgacacaatctcgtattatcttctgttgttgttgttgttgttttttttttttttttttttgagatggagtttcgctctgttgcccaggctggagtgcagtggtgcgatctcggctcactgcaacctttgcctcccgggttcaagcaattctgatgcttagcctcccgagtagctggcattataggcatgtaccaccatgcctggctaattttttgtattttagtacaggtggggtttcgccatgttgcccaggctggtctcttgagctcaggcaatctgcctgccgccttggcctcccgaagtgctaggattgtaggcgtgagccaccgcaacgggccctgtttcttctttattgtctgtttcccctcccatgagaatagaagttccatgaaaacaagaagcttgtctctcttgttcactgctgtatttctcagtgtctaaaaaagacccagcagggccaggcgtggtggctcatgcctgtaatcccagcactttgggaggccgaggtgggtggatcacaaggtcaggagttcaagaccagcctggccaagatggtgaaaccctgtctctactaaaaaaaaaaaaaaaacaaaaaaattagccgggcgtggtggtgggcgcctgtaatcccagccactagggaggctgaggcagagaattgcttgaacccgggaggctgaggttgcagtgagctgagatcgcgccactgcactccagcctgggtgacagagtgagactcatctcaaaaaaaagacccagcaaataataggtgctcactaaaattggttggatgcctgaatgactattccattgtttcggaaggtaagtgcaactaggccacttgcaacatctttcctccctttctctcgatttgtcttttacttcttgtttaggatccagaggtcttcactttctcgt

SEQ ID NO: 106745 - DNA, 1651 bp, Homo sapiens
gggaggcggcgagcgccccggggcgggtctcgggggtttcagtgggacctgcggcaaggggggcggcgaaccagccgggctgggtgaccgacagcctggccagccactggccgagggcggttaggaggcttagggccggcgcgagtgcgtgcgcgtgtgcgtgagtgtgagcgccagggtgagtgtggcagcctccccaacccccacctgtttgaaatggttttcaaatgccaaagccagattgcccgggtttcaaaagttgcaaacagttggagtaaaacacgtgtgcggccctccagccccaaaggaatccgcggagtccagggcactgaaagaaaaggagagaggataggggttcaggaagggttgggggggagttgccttctcccggcaggtcggttttaggacccatcgggaagcacgttggaatctctcccttcggggaggaggggaggggtgggccggccggctggcggccgcggggcgcatgcgcgcgcgtctcctgtcgccggccgctgcgctccgcggcgcggaatagaatgaactgtaacaaaacaagccgagcctttgtatctgcttaaaggggccgcgagcacttacctcccgccctgctccccgccgccccgccaccgcgtcttcagggctcccggcaactggctggaagggcttccctcaccctcagtaacagcctgccagcgaggagaggcgagccgggcgggaggcaaagaggaggcaccgcatttgtaaaaggcaagagagaaaggaaggaaggaaaaaaaaataacccgagcggcgcagagtggactctggtccgggagagcacgggcgggcgccggaacgtggacccagaggcaccggaatgcaaacaaagctcgcgggcgcctgtgcggggctcgcggggaagcccagaaagtttgttttatgatggcttgagtgcgcgagcgtgtgcaggggagcgaggctgccaagtttctctctcctgttttgtgatttggggagagatgtttctcccatgaacaagcggaggcttgggggctcgtgctgtggggggcacctgtctctcgttttatttttttggaggaggggtgtaactcatcatgtccaaagtgatccagaagaagaaccactggactagcagggttcacgaatgcaccgtgaagcggggaccccagggcgagctgggggtgacggtgctgggaggcgcggagcacggggagtttccgtacgtcggagcggtggcggcggtcgaggcagcggggcttcccggcggcggcgagggcccgaggctgggcgaaggggagctgcttctggaggtgcagggggtccgggtgtccggcttgccccgctatgacgtgctgggggtcatcgacagctgcaaggaggccgtcaccttcaaggccgtcagacaaggtaaggcagggcgcgcctttggggggcgccccgagaaaaggagggtggtctgtgggctgccccttattctcgatttcctgcttccctcctcggagcgcagtgaagagaagttgaggccgtgcgccctgtggtggcggtgaaatacacaaagttgttgcgaggttgagggttgtttgcccacctgcgtttcgaagagggggctgggtttgcgcaaggtagcggggggacgtttctcaggcct

SEQ ID NO: 106746 - DNA, 1087 bp, Homo sapiens
ggatgattcttaaattcagacaagtttgagaacctctgaactagggaattgcaaagaaacatgtcacaaagtccctatcttttggtcaccattttttatggtgtctctacactcattcttctaaagatccttttatcttacatattgcatagaaagattattttgggaagatgtacaattagctgtagtgcgtaggttacatagtgatgtcattaagatcacaggttttacattcttccctcgggagtttacatatataatgtggttttgaattattagtattatttttgccatccatgaaacttcagtgaatgggagatgctagggaaaagtcagagtaccagggttcaaaaatagccttgttttactgccaagtttgaaagaattggacttttgtgtgtggtgtcttttttcttttgctattggttacggttttaatctaagtacagaacttcactgtagttgatcatcagtggatgtggatgtttttgtaaacctatgctgcaggagtgaggggttggggtggggctagagggaaacaaagatggaaagaggtgaagagaagaccatgtttaggagccttagtccctattttgaagggaatgtagagaaagcatagctttttttttttttaaagagccagaaggaactataggcatcagctagcccagcccctattctttgctttaacttgttcagcccccaacttggaacctgactgtactgacatttgcagttagtagaggccttcttggatgccacctggagggtggagggaggtttggaacttatattcttaaagaaccttttatgttacaaaagaagccataaagtcagatgaagttgaggtggttaaccatgaaatggaggaagttttaccactgtctctctcccttttcttgggggttaggagggtaggatgtagagtggcagaacttaacagctgaatgcaattagaggtattatagctgcacatttattaagtgggctgaagtgggaaaaatcacatgaagaaacacaaatgggaatagacttgtgttaaccaggtaaaactacctgaactggtcattattcattcatggacaga

SEQ ID NO: 106747 - DNA, 1034 bp, Homo sapiens
ccatttcaccccaaccctccccactcctaggcaaccactggtctactttctatctctatgaatttgcctattttggacatttgatataaatggaatcctacaatatgtggtcttttgttactgacttttttcagctagtgtagtgttttccaggttcatccgtgttgtagcatctgttagtagttggtttctttttaaaattaatttaggtgattatgtcctgacacacagtctcgttacatgcagttagtctggagtatgtatacttacatttgttggtacattgttgagagcaagcaacaaaaaaagaacctggccacttcatttcacctggggccatcttgcctgaaagttattttgccatgttgaagggcaggctttcctcagtttataaactttcagtccaaaaaaatagaaagtgatataataggtagggcatatagtagctattagatttctcatgttaatcatacatctttttatttgtagaaagtcgtttatattctgatgctcctagtatctgtaactaatatttttaaaaaattggagccttggaaaaggctctaagtttctaagatttacaaatattatgtcataacatttgatatgtggactgttaggcatgggaggtggggtaggtagattttagaattaggaaacaagtatccatgagactggagatacaacagataaggacattcttacctacattgtgtcttttgggggttctgtggtccctgagctggtaaggccaattatcaaacacctatttatagttgctatggagctgggctcttggtaatttgcccatgttggcttcagactcttggcctcaagagatcctcagtagctgagactactggtgtgcgccaccaggcctggcaattcctagagaatctttgtttttattttgtttaagacggagtcttgctctttcgcccatgctggagtgcagtggcgcgatctcggctcactgcaacctctgcctcccaggttcacgccattctcttgcctcagcctcccgagtcgctggg

SEQ ID NO: 106748 - DNA, 1709 bp, Homo sapiens
caatgtgggatacgtatagatagtaaaatggttgccacagtgaagtaagtcaacatatccatcatttaacataattagtctttttgttttgtgtttgtggcagggcagctaaaatctgatttagcaggagtctcagttatagtacaattttattatcttgcatttagaataggatggtttgttaggtgggtgggtgcaaggaggggtgttagagttctgaaaagaccttgttaggtagttttaagttccatatgtttggagcacagtatgatagggtcaccctgaggcgaagcaggggctgagagctatagggccttgcctgctatagtaaggagttgggacttttttgatcagacttgtaattttaagaaagtcccctggcagctgtgtggagataaggagactattaaaggaatccccaggagagaaccacagctggggcagagggatgcagagggagagagtgagttcaagagatgttaaagaggtagagctggtggaaagatgatcattctttcaggagcccttccagcgacatccttcagtgcgtttttcatcatggatgccttttagtttgttgtgtctatgtgtgttgtgcacctacttgaattctccaatggagtctaccgagctaagttgaataagcatgccccatcttgccagtgggcccagccatctgagtctgagctaacacgcagagagggaaagaagacgaaagagagagagggtcagaacgggagggtcagggcttcccctggcttggcattatctgtgtgtggttatgaccttgcttgtagttattcatctatagtacaggcatgaatgtgctgaagagatttatcagtgaggcctgtagaaaggaacattgtaccccatctgcatcctcacccccagtttctcgatgagttccttttctaacatatttcagattgttttctgttgtatggattttctttttctaatatagtatgcagtgttagttcagatggtattgattcatgacctgggagagtatatttcattgatttttttatttagttagtggacaaaaaggaagggaagctctgttaactttttatttaagagctgcatgagtttatagaacacaattaagttgagctttataggcacagtatgattttcatataggttgatgaagttgaagaaacgattctgagccacaggagtgtaacttggtcagttattgccactgcattgtaaatggaaagactgaatactactctcaaaggaccaaaataccaaaggaggttaggattggccacttccaagcgagcctgaactctgtcagtgacaaacctttatttcctaaaatattgccttgttaagattagggttcttgaattaaatgcaactgtcacttatttgctttggtttgtgattgtgtgcttttcaatatttgagttgtatagctaatactattaataggtgctaagagacaccgaataagaaatttgatccccgtttttgaggagcatataagtaagttggatccatctgttaaataactagggagtatttgaggatgtctgtagggaggtagcaaggtatggaccatgggctgtcaagttacacagatcggggtcagatttgtgacttgtccacttatttgtctgtaggccatttacttgccttcactgaaatgctcttttcctcatcttgaaaaaataggattaatgccatcccagtca

SEQ ID NO: 106749 - DNA, 1077 bp, Homo sapiens
tattcacatccaagaaaaagttactttctagttttatagccatatattcatttcttgactggacatagccccttacctgtcccccagacttcaactcagccttgcctagtctgaacttacctcccttcttccctggactgctaatctcatgttttgggaccaccatatgcctattatccaaaccagaaacagaagcatcttactgtctccctacttcttcactccttaacctcctgtcagtgaccaggtccggtgcattttactcctttttcctcagatttgaccttctctgagccatattcatttccagatgtcttttatagaactgctatagcagtctcgtaacccatcttttgccttctggctcgtggtccccctttgcttcttgccttcctccccaccctccagctgtcctgtgcattgcagccagagtgatctccctaagcacacgtcattcctctgcttcagctttttcaagtgttcccactgactatggaatgaagtttcagccccttagcatggtatacagggccttgtctgtccagtcttacttgtcattactcctgaccttgcacttgctgctttggtaatacggaatggtgtgggcagctgccagctttggaatactgtgttggtgggactgccgctgattcccctgaacaccctgcttttgtatttatgtacttccttttattgttcattcttcccactgtgccctttccacctttcttgccagctcattccggctcatccagaaggttctataatggtgtaatcttgggcagtttctctgaatctgggggttggactaaatacccctcctccacatttcccataatctttgtccatgcgccccaccccccttttggccatgttttattgaaattatttatatgtatttgcgggttctttgaagccagggcatcatcttagtcttctttatcatggagtggcttgtgtggtatctggctccatatgtatttcttgaactgaattagataagtttgaagggagactgggtggaaaaatatgttggcccaagttacagacagctttatacataagaagcattcaaat

SEQ ID NO: 106750 - DNA, 1024 bp, Homo sapiens
tcagcttgcctctacggatgtatgcattacttccagtaaagcagaggttcctctggttcatttttcatcacacatgtttgaaatgtcatgtgccagttgcagttctgggcgttggggattcgaaatgagtaaatgtgcttcttgccgttgggaggcttgtagacagatgttcttggaacatctggcgggaggtggcaggatctatataggacaagccaggaaaggttctgggctgacaaaacaatgtacatgctttaagggtccaagagttttaggttaaaaaaaaaaaaagaaactttttgacatcttgcagtaagcctacatattatacctttttactacaatttttgcttaccaaaaaatttcaatttttatagcagttatttactttttaggatataatcaaatttgtcttttaggttgcctgcctgattcgagttccatctgaagtggttaagcagagggcacaggtatctgcttctacaagaacatttcagattttctctaacatcttatatgaagaggtgagatgggttttttaagctcttcttttctttattaagattttatagtagctaatacgaacactgtggatttcatcctaagagccttagagaaaactttagagctaaatttaatgtccagttatagtaaatttttgctaagattatctttgccttttattggtttttgaatattttcatttacatgtttttcaaatttctgagcataacattgagtgtcctgaattgtaatcttcctgcagttcttctggaatcagatgtgaaacaaattttaaatatgtaaaatgaagaaagatattatattaaaacatcagtatagtattttaggtccatggaagagatttagtactggactgataacagtgaccaatgtcataacgtttataccaaaatgtagcttcttttacagatgtatttgaagctgtcagtcagaaattattcttcctgaccatgtgactagagagcatttagctgctttcctttatagtttttatggaagc

SEQ ID NO: 106751 - DNA, 1025 bp, Homo sapiens
ggttgtctggaaatactgaccactagtttgagagattatgaatgaatttctgatgtttgaggctataaatataattgtttttatacaaaaggataattggcatttgtaggcatttgcttttggaaatgtatttaaagcatctcaaatgttcttttcaagagaacacatgttagagcaattaagtactatataattaatatttagtagaataacagcaactaaaactaagtaaatatgtagtcagttttattgttagagatgttcctgtttcaaagagagctaatctgagctcccttaggagctagttatagaggtatataagttatataaggtatagttatgtaccttaggacagtttagaatcattaacctcttagagaagtgtggcaattgtgaatgttctagaactcaaacaagagcaggtagatctgctgtatacagaatgtccttcagaaatctctgccattctttctgaactctcggctgtgtgtttgtttcagggtatccaagggttgtatcgaggctataaaagcacagttttaagagaggtaagtcacttactttccaatattgaagtacgaaagaatgatgtcctttgttcagtaaatttatactacttaacaattagaaatatatttggagaaacttggtttaaaaaatcaaaaagggaaattatcgtcactcttctgttaaattttctgagtttttatatttaaaagaatgagtagaatgggtttgccggaagagcaatttcagtggtcagaatgacccatgttgttactgacttgttattctagggtggctaaatgtctcttatagttgaagtattttttgtttgtttttttgaaatgcagtctcgctctgtcacccaggctggcgtgcagtggcgcgatctcggctcactgcaacctccgcctcccaggttcacgccattctcctgcgtcagcctcccgagtagctgggaccacgggtgcccaccagcacgcccagttgattttttgtatttttagtagagatggggtttc

SEQ ID NO: 106752 - DNA, 1070 bp, Homo sapiens
atcccagctactcaggaggctgaggcaggagaatagcttgaacccgggaggcggaggttgcaatgagccgtgatcgcaccattgcactgcagcctgggtggcagagcaagactccgtcttggaaaataaaaaaaaaatttcttaaagaattggagccatcaaagttggcaagcattaagcatgctaattagttcaacatactgaccaattctctgaattattagttcaaagaagcatgtggacagggatgaaattaaatttgggaatttttcactctagttgttttaggatactcaggtttgctttgatctgtaaataacagatgcttttccatgcatggtttagagtacatcaaacatgttcaaaactttatctcagatacttaaaatcaagttattttattttcctgatatacatgcatttgctttatttttaaaaataaactgtcataaaatagttgtaaggccatacataaaatttactttattaattgctaaaatatattgcttatttaaataatcagttttaagagtaaaagctttggcaactatgaaagcatagggagtatgtgttcatatgtgaatgtattgtgtgtgtatgcatagtatacttttaggtatctaagtagtgaagataaatgtctgctttacttttattagctaaatattatatttaacttaataattatttaatcactagaatgaaaataaaactttgaacagaagcattgtttttaacttaagtttcatagtttactacctcttttggctcttaaccataattttagtactgggaagaatttttttaacgaatggcataaaatggattgcagatgggatgagaaaggtgcaggaccaagagggtaagaactgagaagtcctcgattctgttttccacactccctgaacagaaggcttgactggcgtaggccctgctccaacctagtgtaggctgcaggaagccatgtgacaagagtccagattgttgtccaatggtggaagcctcccatttataagtaataataagaataagaatgtttggcattgagcgaggtgcggtggctcacgcct

SEQ ID NO: 106753 - DNA, 1134 bp, Homo sapiens
gggattataagtgtgagccgatgtgcttggcaaacaaacttttgtatatataatcctttcatactaatatttaactacttgtaaaaactatgttaacccccagtcactaacacagttccgtagtccatatttattattgcttctttcacttttctcctttcttcatgcatgaaaatataatgtgatccaagggggtatgtgtgcatgaggtgtgtgtttatagagtaacagttaaatgtctcgaaataaactgatttggatttttaggttatagatgtttttgttttttattaaacgtcttgattgtttgactgtcatggttgtttgtataactccttgagaaacttccacatgcgggtagtttttgaaaaagaaaatatttatttgcttcagtttttcaggggatggtatcatactgctttttcacattttatgggtgacatatttggctatctctgggcaaaaatccagttaaaaataatagtatttaatatttaataaactaccaggcttttgagccatctggaactttattttctttgcacgcagcatctgagtttcagctgttagcgtttctcctttgctctgggaagggtcaattgcttttaaagtctttgaagcttgctgtgtcagcccttttcatattttcaaaatgcccgtgtaaaagggtttttcatccattcatgctgataagtcttttgaacttgaggtttgaaccaagctaatcaaatttaattatagcttaaatcccgttacagtgaactccagtggacttctaggctagggtttttttgttttgtttttttttttttttttggtgttatactggaatttagccattaccaatattacttgaagtgagcaggccattgactgcagtttgggagaccttttgtaatggtcagattttagttatagtgacattggcaatatgatttgaactttattcttttccaaaggaaataattgaattagccacaagtaaaatttcttgttctttgcatatatttcaaattaccttttcctatttgtcttaaacaattttgaacaattaaaatcttaaaagtactttcttaaagagtcctttggtggtggtgtcgctgatgctcgttttttgtttttaagatccataac

SEQ ID NO: 106754 - DNA, 1433 bp, Homo sapiens
atttaaaattctacttaaaaattacttgtttggatttctaagcagatttgggaattacggcattgaaaatactttgttgctttttatgtctcaataaagtctatgcatttttataatattggaccagtgtttgacctgccagaataaaatgatgatagaactcattgtgtcctcaaataattggattctgaaatggaagatagggttcatgaagaataaaaaatagtagatctcatgtaaaggtgaaaatttacttttctttttagtattcaactcaaaattgccagtttccctgaatttattatagcaatttctcttgttttaaaatgaagtgaaatgtgaagttaatttacatactagctgctttgaagtgtaattttgcttgccaagttgttacagatttttatacagactttttaaggaatttagtaataatgctgccacagtgtgtaggacaagttcatgccttgcatctttgatgggcgttagaattgtttgccacagttcccactctggttggagggcacaaccaattcgtctatgccttttgacttccatgccggagagtgtgacttctgcatctgtttgttagtatttttatgtaagcagaagccaagaatgtcattagaaagtaaaactttaacaagagggactgaatcctactaggccaacataatttatagagagcaggggctaacattttcatttgggaaaaatgcttccatttctatacgtgtttagacggagtaccttaagcattgttttagtcttttcctatctacatgttaccattcagaacttaggtggatgaaacacattttatatgtagttacagagagatacagaattaaaagcctacagatacaagcattagaattgtgacgggggtaattagaaacatggagtctgaaggtagcctatctggattcaaatcccagctccagtacttagccatgtggccttaggcaagttatttaaactgacttattttgttcctctgtaagatgagagtaacaataataccaacctcataaggttgttgggaaaattacatgtgttcctgcatatgaagtgcttaggacagtgcctgaaatacagtcctatataaatgttataatttatgattattgttgtgatgataatgatgataatatcactagcagctcctctgaaacttgttggcctcatccaaggcctatcacttagctttatccccagtgtctctaatactccatctgttgtgcagaagtatatcctgaaccttcctccctctgaatttgcccacttggcacctcttcatttgctcttacaatctctagaccataaatttcaaagacgtggcccaaaatgttggactcaaggtttttgcaaactacaagctaacatgttaaaattgagtggtttcatatacaactccagttatccaagttttc

SEQ ID NO: 106755 - DNA, 1030 bp, Homo sapiens
tctgagatgtttttgttttcacatttaggatacagcaaagtgtcttttaaggaaggaatcctttgttattaattcactagtttgatgcatgctttagatttttaaaatataggacacttttaccctgtgaagtttaaatatgtgactagttaaagatattaaagttttggcacacattttctcattaagcaatgagattcatattttctagtttatgggataaaaataaaaattcgatcagtggttgctacagtttcaatctcattacagctgcagtggagttttcttattaagacaaacctcttttcaaccacagatacactttttagcttaggcttcacaaagcctcataactgaggttgcattggcattgagtatcttgcctttaacagacttttaggactttatttgtttcccacaattttctgcatgtttgtctcaaatgaactataaaatgattcagtgacaacatgtggttttaataacaaacaagcatgggcaaatgaatgtagacttagaatttgaagttttgtacatatgccatggcttcaacttctaactgaatttatagctcagcactcagtcagtggtaaattatcagttgctagatggactttttcattctagacttcaattattttgagtgcctgatattgaagaccacagatcattgatataaagaattttctgcaagtttttaatagtatatttatagttaggttttgtgatcaagtgggagcaaatttcccccaatctgttttttaccttcttggtttttaattattacagtttatattgcatcaaaatgtaaatttcaagataagtaaggtattataaaactcatttctttacaaaggtttctattgaaaatgagtctttttgaagtaggaatgtactatagtagctgctctgagcattagaaataggcattgtggagatgcctctttcctctctgaggtggaagagcatgaggctactaatgtgtgtaaatgcggtctttccctcagattgggtggggcaatggaagggg

SEQ ID NO: 106756 - DNA, 1053 bp, Homo sapiens
tgagtacttcacagagagatggttcatctgattgaatgataaaattataggcagctgttgctttgtttttaaaaatatatgtgcaaaagctacacaatagcttgatcaactacagtatggaaagtatgtgcacgaaaatcattgtctcctgtctttaatctgttataaacttctggtggtaaactcacagcagtgagacctacccagaggatgatatcaagagcaagcctaggtttgaaaaaactaagcattatcctttccattatcttaaattttgtcatgtgatgttactaatttggaattgagtagatgattctgtgcacatacttattttactacatgtataaaaagcatatagtaaaatatcatcatcttgtagggttggaagccatataactgcttttgaatagagcagctaaagaagtcccaagttgtaagtatttgttcactggagccaaaacagttattttcagtgtgttattcataagacagtagtgcttatttgggtgggtcttttaaaagtgaaaaacaaagccttctcttcaggctatactttaaatagaagacacttggtctggggttggactcccagccacttcatagtattgtgcctggtgttggctttctggcctatgactactggtgctaatagctattatcttggggtgggggtcggggagccaaactacttcatgctattcttcctctgataggcctttagcattaagtgaagaatcacttgggaaattacaacctgattgtttttgtagtggtatcactgagtatcctaaagaataatacaaatactgttaatgtaaaaagtcaagctgatgtttaaaaattgcttacttttaaacaatagttattatggtgaaactcaactagggtctgtagcttagttaatagtgttgtaccaatctcagtcttgtgctttgatcattatactatggaagctgggtgaaggatatgtgggaactttattattattattttttgagatagggtcttgctctgtcacccaggctggattgcagtggtgtgatcgctgataac

SEQ ID NO: 106757 - DNA, 1001 bp, Homo sapiens
agacattccaggttgtttagatgaagagcgctccactagttgtttgagaaaagaacgtgtcttagaggggaaaaaaaaaaaaaaactgctaaaaaggtgtctgcctgaaagacaaccaatttgtttttgacaaatttttctttttctttttatctttattaaagccttcactcaggccctggaattaccttaaagatgatttataaagtcctctgtgggaagagacttgctgtgggtgcagggctcaccatgcagctgtctgccttgggcagtgcttagggggtttaagcgatttctgcagaaggccatgattcacggtttgtgtgacatgtttgacagcactgtagattaactagtgtcaggagagcagaggctcctccataacttactgaagggtaaactgttctgtgtaggaagtatggagatctacacatctgggcattttcgagacattaaagcaagagcgaggtgacaatatgcaataccgtgttatccatcactaagtcatatgaattttcaagtgaggctttaacgagaactcaaatgctttaaagagcttaataagtgatatgtttaaaagcctaagagagaagtatattttgttgttacaacgttaaattagaattatagttgaaatacaatggaaatttgccagaaaaggaaacttttagttgagatgtgaagccagtaggggaggtttagggtgttaactttattggaaaataattattttgcaatttgtttaatggtcatttttgttgttgttgtcgtgattgagaaaacaaaatgttcattttatagtactctttattaatagactcatttgacttgtagaattgataatcaacaataagaattttgcctgtagacatgaaaccaatccagattgattatgatgatgatcgtttccacatgacacatagtcattagctgtgttaaataagtaggtggtcttgattcattttccagaggtcaggagtcattattccccagtccctaag

SEQ ID NO: 106758 - DNA, 1105 bp, Homo sapiens
attagtaacaaattactttgaacataccatagtgcaggtgggatgactccactattagcatcaattgagaaccattgtgctacagaagtgcctcagacttctagcttcatgtcctaaaagctctctctgcaagattaaaacattgctttgacaccataaacttgtgaagccgcctgaatgttgagatcttacaggcatgtgaaatgatgatttttctcttagggaccatataccagggattttcttgcaagagcaaagcagtggcctccctttgcagagggtcggtcggcagctgcctggacttcgggcgtctcagctggcagtgccacctcctcatcctgatgccgagttggatcacttatgtgattgtagtttttgtgtacctttggcagttttaatctcagctatttgatgatctggaggacatgaagtaggtgagtcaggacccagttaaggtttttataggagagcagcacatcctagattgaaattttccagttggaagtttgaaaagtaggtgatattggatggttttgttgaatgtgacaactctgagggattgacgttgggggtgtgaagggtgtcacggttttgaaacaagaactggggcaaagccagaggaataattggctgttgacgtctagtgagagcgtgggaagggcctagtggggggcatgtgtgctgggagcctgccacttagggctgccatatcgtgaggggtgcttctatctgtggcacattaattctgctgccagttccacagcaaacaaaggaatggggtgagaaaaaatgagtcctgaagctacttagccagtagcaggtaaaaggtgcttaggggccgggtgcggggctcacacctgtaatcccagcactttgggaggctgaagcaggagggtcgctcgaagttaggagtttgagaccagcctgggcaatatggcaagactctgtctctaaaaaataaataaataaattagcctggtgtggtcgcacgcacctgtagtcgcagctactcaggaggctgagcaatcgcttgagcccgggaagtcgaggttatagtgagttacaactgtgccactgctctccagcctgggtgacagagcaagac

SEQ ID NO: 106759 - DNA, 1013 bp, Homo sapiens
tgctgccctctcggggtcaagtcaagtggcgaccacttttatctttccgtgtggtccacgcaggtgaagaccttgttctggcgcatatgggagtacacatataaacagaaatatattactaaacaaacaccgcgtgttcattcagccccgtagccaaaggcagatggggagcctgcccaccccggatggcccctttctggttttcttcactcatcagctggctttctgtttttgttgactgtgccctttatgtagtagctgccactgccgcgagcatccctttctgtctggcattgtaagtgcttacgtttgctctcatttaatctgtgggcactagaacacgctcctgctcaactcaaaagtcttcacctgcgagactggctggggccctcactgtacaaattactccacgttaaggccgtaattacgttaatagattcagtggtcatctgttgaaaccataaactgcttccatctgtgtcttgccaggagcagctgagcttgtgagtggcagaagctgaacaagacactggcgtttagaaataagtaaggtagtaaaggtgggagaactttgtggccagagtggtctcccacagctcggcatctgctggccgcctgtctagcactctttccttcgtaaggtaggagcagggaggctcatctgtctttcaggcaggaaggacatagtggtaatttataagtttctgtcctcaccacccaccctttgcatgatgctgattttttttttttttttaagcaagtgtagtttggttttcaatacaattttcatggttatttttggacaagtaatcgtggtccttaattttatgtgcagtattgtaatgatttaaacccatagctagctaactaaaaagggcccacaaaactcttcttaagtgtctcattttccttagaagtgccaagtgctgcaaacagagggaggctgctcagcctcccccaacagctcaaaggtgttgggagaaaggatgcagtcaggtgctgggagcagcctg

SEQ ID NO: 106760 - DNA, 1027 bp, Homo sapiens
cacagtggagctgagcagcctgtcctctgtgtggggacgaagactcccacagcagtgactctaacccatctttggcgctgtccttcagaacacggtggccgggtcgtatgcagtgactgcaacaccgaagtggactgttactccaggggacaagccttccacccccagcctgtgtccagagacagcgcacagccaagtgcgccaaatggcccggagccgggtgggagtgaccaagagcattctccacatcaccagtgcagcaggactgccgctgggtcctgccccgagtgccaagggtcgctctaccccagtaaccacgatagaatgctgacggctgtgaagaaaaagccaatggcatctctagatgggaaaggtaacttttgactgtcttctaacaggtgggttgggagctgcttaaacggtcaagtgggggtctgacaggttcgttctttccttgtaggggattcttcctggactttagcaaggttgtatcacccggactccacagagctacagcctgcatcttcattaacttcaggcagtccagagcgcgcggaagcccagtacttgcttgtttccaatggccacctccccaaagcatgtgacgccagtcccgagtccacgccactgacaggacagctccccgggaaacagagggtgccactgctgttggcaccaaaaagctaggttttgtctacctcagttcttgtcataccaatctctacgggaaagagaggtaggagaggctgcgaggaagcttgggttcaagcgtcactcatctgtacatagttgtaactcccatgtggagtatcagtcgctcacaggacttggatctgaagcacagtaaacgcaagaggggatttgtgtacaaaaggcaaaaaaagtatttgatatcattgtacataagagttttcagagatttcatatatatcttttacagaggctattttaatctttagtgcatggttaacagaaaaaaattatacaattttgacaatattatttttcgtatcaggttgctgtttaa

SEQ ID NO: 106761 - DNA, 1037 bp, Homo sapiens
aagggggaccgcccgctgagcctcactgagcggcaccacttgacccctgacaaccagctcctggtggttcagaacgtggtggcagaggatgcgggccgatatacctgtgagatgtccaacaccctgggcacggagcgagctcacagccagctgagcgtcctgcccgcagcaggctgcaggaaggatgggaccacggtaggcatcttcaccattgctgtcgtgagcagcatcgtcctgacgtcactggtctgggtgtgcatcatctaccagaccaggaagaagagtgaagagtacagtgtcaccaacacaggtcaggccctgccagcggagctgactttcaaggagggaggaatggcagtgatgctggggaactgggccgggttccagtggcttttgaaagaattgcactgtgttcagaactcctgagggtttagtcccactaattccattttaactttgaggaacttaaccttaaacaggaatactctcaaatttaaccttaaacaggaatactcacaaatacaagtaactgacgcaccatgcagttttccctctccttgctaactcagaggccgcctatgcacaggccctgctgccacgtagtaggttgttcctgaaacagtgcggtacttctgtgagccccggctttccatcactggtctccacttcttgtggcgtctggcatctgctggctgcgctcttcacgctgggtgtagagtaaagctgagcaggctctgggagggcctgttgcgtacatggactccatgtcatctctctgcacagcgctgatggtcgtcactgggaggatcccctttctgagcttgacagtgaacgtgtgtctgcatttcttgtcactgagaccctggtgttctatttgttctgtctccttgcagatgaaaccgtcgtgccaccagatgttccaagctacctctcttctcaggggaccctttctgaccgacaagaaaccgtggtcaggaccgagggtggccctcaggccaatgggcacattgagagcaatggtaaggcctcagtaactg

SEQ ID NO: 106762 - DNA, 1123 bp, Homo sapiens
ccttgttttgtccagttcttatcctctataagccaagagatctggcttccaaattccaaataccccttagcctggggaagctgctgttctttgagtagatggcacagcattggagtcagaggctagctactgctccagagactgtggagtgcaaggctggtgtgagccctggcctgaaagacacagtgtcctggcagttgacaggtttttactcattaaccagccttggagcttgtcaaggggaccatgtgttattgtgtgtttggaggaggggggtggggagtagatagcttgaagagtttactgtcccaccccagtaacctaatggggttatcctgattactaactctctagttaaaaagaattggcttgagaatcatcagaatggtggatctgctttgctctttaagcccccacagatcacagcgaaacaccttctttaccacactgtagtggggttgtcttggcttattccaagtcctcacagcttccgaaagactcagctgtttgttagactctccccaaaattgacgttgacaggaactctggtggtgcctgacacgtggctggatgcgtcccactctgtcaggacatcgatctttaggctgagcaagctagcaagctgaatgcttcctgcctgggtatacggcagtgggcaggaacagcctgggtgaacaaccatccaaatggatgagccatcccattcatcccatgaacacccatccaaacggatgagccatcccattgctctcccaaggtggaggcatgcccaccttccctctgtaattccatctccacagcctctctcttggtgggtaaagcaggcaagcatcaggcctacctagtgtggatgggcaccccctgcaactcccgtataggcactgccatgtagagtaaaagcctttgctttgaagggactatagccagcctagggtgtacaatgcaaggctgatgggatggaagtgttccaactgtggtgggagaagctgggggttcctgattcacaggtggcaggagtggtcctgggcagacattgggagaaaagaagtgaactggcactgggcacagtgacaggtaggtgtttgccagaggacttcctggttttgcatctagctgtcccgta

SEQ ID NO: 106763 - DNA, 1052 bp, Homo sapiens
ccgagctcaagcgatcctccttcttcggcctccccaagtactggatgggcataagccgccacacccagccctggttcacttttactcagccaaaaaagtcacttctaggaagctccctcttgccctatgaacactcgagtcggccttggcatgtgctgtcatccattttgatttgcctgtcttctcccagcccctactcacatgcacatgtgtgcgactagactccacagttctgtcgtgcactgttctagccttggtgtgaccgcagtgtcaggtacagcgtggctgctcatttgctgtctgtccagtgaagggagtgaaagctcctcttcatcctgtgcatggctgtcattgcaggcacctggagtacaacagcctggtagaagtgaacagcggctcgctctacggcctcacggccctgcatcagctccacctcagcaacaattccatcgctcgcattcaccgcaagggctggagcttctgccagaagctgcatgagttgtaagtgtcctcggctctgggctgtggcagtgtttttagacactgcttggaggtgaaagtgctaggcctggttcgttccaccacacagtggcctcggggagggctcagagacaggccagtagccctgttcccaaaccagccaggcccagggtggaaccctcagcgatttgagccccagtcccttcctcatctccccttcacttcctctgcatttggattagcaggggctccaggagtagcagctaggtccctgcagggagccttggcccccaaggtcctgttgggtttggagacagttccaggggtagaaagttcctggggaagggcagctatggcagagtgctcacaggagccattttgagagtgactgtgtgttaatggccacaccaaatagcatgtgcttcttcagtgagggggtcatttgggctcaaacagagacagtgaaacgctgactgtggatgaatttgtgtcctcggagtcgccaccttccttcctgtagatgagctgcccaggttcttggccccttccctttctctgttttgcaccgcagt

SEQ ID NO: 106764 - DNA, 1051 bp, Homo sapiens
cacccttgtctcccatctccacggctgcctcttctgccaaatggggaactttcccagcgggtgaaagagacttgtcttctgcacagggtcctttatgcagagtggggcccggattgtgtttgattcagcgaatgaaaagactgacaaggagcaaaaggtaccggaccacagacaaagactgaggagacagaggaggaggtggggagaggacagaactggcgtgggagagatgttgggcctgcagctgtcccacggcttcgcaatgtaaggcctcaccccctctttgtgcctttctgggccggtggcgcccggcccttctgtccagcacagacccttttcctggcgccctgataccacattcacagttcccggataagactcagctctgtcgcctttatttcttgtttcttttcttcccatactttacataataaaggttttcttttcttttttcctttggagccagaaaactgaggagactatctttattaaagaacttaataaagaactcaaaggaagtggctttgggggctggggaggagaggaagggaaagggtcctttcatgccggggaggttctgtgtgcagagttgcacccttggaaatggactttcgagttcagggcctgggagacgcatgaaaaaaacaaaggagtccacgagaagccccagagcttctgggaaagaggtccttgtttatgcctgttggaactgattcggtcaagtgtttgtttaaaggagatgccacttggtaagcgacgcctggcttacttgtgttgtgttcaagaatgctttgattggccagagatgctgacactgtttattcagaactggctcgagtgccagtgcctgcaacctagaggcccagcgccaccacccagcagattcctaagtgtctaatattggagtgagggctgcagtggtttgactctgccaggcggcgccaaacccacaacagggcggttagctacctctagccttggctagcattcgtctttctcttgacttataactgttgcttgtttatatagtgggtttgacagaaagtagatt

SEQ ID NO: 106765 - DNA, 1022 bp, Homo sapiens
tctgaaaatgtagccaactggggagagcttatcttgcctgctttccgcctttgaagactgattttatttttgaagcctttaacaggtgttggtttaatagacttctgctgtattaagttctcctcgctccagagggcagcccaaggggtaaactgacactgtggatggaggcgaatgccacgtgacctggccaccacacacttcccccggtccccataagtgcagaatcactggttttgtctggttgcagagaaaggctgcgctgttcctttgatgaggccaataagaactgttcctagcacaacactgtcctcttgccttgcaccatcctcacccttttttgtaaacttaagtggatccctttgcagcttaccttccctaacaataaagatactccttcctccctcgatggcagatctttcaagatctcaaagaaactgcccttttctttccatccagaacattcaaagtaaaaacttgagctttatctgccttatttgctgagattctgtcacatgaagtcctgtgcacatttgcttctcacacaggactctgggaagcttgtatgagagctgggccacctggccgaggccaagctacgtagaacaggctgagttgactgagaaatggccagctaatgttcagatttagccaagctttggaagtttatgggtggaatctgggccagtgcccttaaagttctgccaggagagcctctcggacgggctagatagggtcatgcttccctgggcttgcatcccggctcctcttgcttcccagctgtgtgaccttgggcaagctccagcagacttctgagcctcaatttcttcaattgcctaagtatagatgcttctcaactgacaatggagttatgtccagataaacccatcctaagttgaaaatatcattaagcaaaaaatgcatttaatacctctaacctcctgaataccacaacctagcctagtctaccttaaatgtgctcagaacactcatattagtccacagttgggcagaatcatcta

SEQ ID NO: 106766 - DNA, 1042 bp, Homo sapiens
gattattttgagtgcgtgctgtatgtgggtggtgacagtgagtgtgtgatgcagagccttggtaagaattccagtgcagcaccatgatgggcagagtgctgcagggtgtggagtttgatgaaacctgtctgccaggatcactttgttggggtaatgggggccgggggtgttagattttttttccccccagtctagggctagattatgtgaaacttattttctaaccggaggttcaggcgaagcaaagagctattatgtggatttcgcttattcattaagtaagacgtgttaagatttgatcttgaagtaaaactgtggtagatttgccatttcggtgagagtccacactcagatagttgactgtggactttgtgaatcactgtaattgtctggaagggcggaagggcacagcttcttagatcttagggatggagagctggccagcttcagtatgtttcagactaattggcggaactgaaacgaggaaggatataggatatacagtgtggatttctgtcttctgtaaagtaaccctgtttgcccatctatcttcactggctccagtaaggaacctggttgatctcttgaggaacataacagtggtagagagacttatgttccatttcactttctgaagaggtagaaaagacattggcagaaaagactgtgattagtgatgtctgacatgggcactggagggacaatgggaaagttttctctctgcagttaagaggtatttccttattttgcaggtggttaaacgaggtagagaaagagtgatttatacatggttccaaaattgcatgacagcaagaattagagtctgggtctctgcaccccaagaaacacaaactggttgccatagggttgacagggtcagcacaccacagacagtggtcccaatcctggcccactgcttgtttttgtaaataaagttttattggaacatagccacactcattcatttacatattgtctggctgcttttacattataacagcagaactgagtggtcatgacagagacagtatgacccacaaag

SEQ ID NO: 106767 - DNA, 1918 bp, Homo sapiens
ggccttaagggacactctcatcacctcattcttgatcgttgccatctcaccttttctgcttttcttgtccagaaacagttgctcagcccctggagtctggttgaatccatgtctctcattctgtgtcctggttttcttacctccttccctcaaggggcagagctgaacaggcagggacacatgtgccctgacaattgtaatgaagtatgtttagccttcttctcaaagggaaatcagaggggttcagttcagctgtgccgtacccgggatccacggttgtgccgggcttgctggctccacatgacacagcttgatagcccggtgctctgccaactttcagggtggggcctgtgctctacgagggctgagagcttgtggcggggtctcggtgtggtggagggaacaccatcagtgtgctggggtgtggggtagcaggtcaccagggaaaggaaaacaaagggggaagaaaatagggatgtattgatacatttgggggaaaacacagccctgagagagaagcaagtgtctatgttggccctgagcaaaagcgataaatacgtttggctcttctgacccagaggtgggcatatgtggctgggaattctggtggaagtggctcattgtccatctctggcccaacttgagcctggtttttcatctcttagcccaacctggtactgctttgccatgcccagatgccaagacagctgacctccgtgtggacatggaactaactcctcaagccccttagaagtcactgcccatgttaggatggcatagcctttctccctgggaatgtgatccatatgtggcttgtacagcttcctcgggtcagcagtgtccacgtggaactcccaggggaggcgtgtggatggggacctcaggcagggccgagctgtggctagaagtgagtgagggagagattgttggccagccttggataagcataattgtctcaacattgcaagccagtgagggccagtgtttggggttcaattgaatgtgggaaatgcgtaagtaacccccaccccgtgctatttgaaaatcgaaaatccatcgtattcgacatttgcttttaaataggtctgtcagcttccctaccttttttaaaaaagttaactccacgttgtgtcttaaatttttttctttttaaaagtttttaattggatggttggtcctgcctcagtgttttttttttgttgttgttgttgttgttttgttttgtttttcctgagtaatgttccttggttcaggtttgttgtggtgaatgtaagacattgaactaaagttgtaatttgtttgtttattcaacaaatattgattgagtaccttttaagttctaagcgttattctgggggctaaggctatagcagtcaatacgatagactaaaaattcctagccggtgtgcggtttatattctacccagtcgagactgcaggactacttaatactttaggaggttttgttttgttttgtttttaattaatggacttttatagcagttgtaagtttacagaaatggagtggaaagtacggagagttcccatatgcccccgccatctcttctctctccccctcacacacacacacacacacacacccaccctgtttcccctattgttaacatcttgcattagtgtggtacatttgttacaactgatgagtcaatatcgatccattattactaaagtttatagtttacattagagttcagtcttggttctgacaaatgtataatcacatgtgcccaccattacagtgtcatacagaatagcttcactgacctaaaaatctcctgtgctgaacctgctcatctctctctacccagcctctggcagttaaatattgttactgtctccatagttttgcctttctcagaatgtcatacatttggaatcatacaattggtagtctttt

SEQ ID NO: 106768 - DNA, 1042 bp, Homo sapiens
ggccctttctctctgtgtttcattttgcttatgcagaattgagccgacttccagacaccagagccctcccaagctgggtggcaccattgggagagcctcatgggaagaggcattgctctgcacctggctttttctgtcaggtcttcaaaagagacttccatagttttgggaactggagtcatagagcaaaatttcagttggttaatactttctgattaaaggaatctaattcagttaacatatttgtcaaagaacagatttatttgcattgtgttctgaggataatgccggagccatttgtccttaataaacagaaagcatagaactcaaggaaagctcttaataagaatgggttccggtgagggagctaatttcataaaatagtgccgagaaaaagaaacagacttttgttaaatgggggcagaagctgccagtggattttcacgtttgagatttctttcttttttaatttaaaatccaggacactcaagttacgattcccacagcaacagtaattttgtctgatgcatcaatgacatttctgttgaggaaaaatctctgtttttccggtggtgttgctgcacttgtactgtcgagaagattggtgacagtggaaatcgttgaatttttcagtcctgggagtaaaaatgtatgtggtatagttggtcttagcttttgtctcctgtgcatggactgtagcatattacccatagggttggccttgtctacctaacaacttctccagctggtttgttctagacttcatccctttatggtgccttgtcatttgctctcccacagcctgtgtcctcaaccaggaggaagacctaggcaaaacttaggggcacacaattaattgtgactttgtaatattgctattaaaattccttaggtttaggttgcatttgaaaacacattgaaatgccttttacttctaatcttgaaaaaatgtttttgaaaactattttttttaatgagataagataaatgtacccagggacatggggaggcagtgtggggctggtcaatgggtacaaaaaaa

SEQ ID NO: 106769 - DNA, 1073 bp, Homo sapiens
ttggcagcttccccagcagagcacctccctcttcacactgaatttcctgtttccactccaggctttcatagtttaattttattttgattttgctggttttataattagtttgctcacctatatgaatcttttctcaatactgaggctcggcaggctgagcagagaaactttgcaagaaggtgctattaataagagtgctggcatagcttacagatctcggatctttggctggcagcatgccctgtgttcaggaggtgctgtgtccctgtgaaacatggtcttgggtttaacccttttcatggcattgtgggattgcaggagagcgtggggggttagaattgcacttcactctgtgccctggacagatgacctagtctctctgaacctcgtttccctcatttacataatgcatttttgacccattttatacatgaggaaagtgaggcccgggggagtggaatgtatatgaagctcccagcattctgtgggagtgtttgacaaatggtggttactgtcattggctggtggctagttgtcacgtagctccttggatcttggcaggatctcacctttaaggccgcaggatttaagagtcagtctctgtttctgtgaagtgctggaaggaaggtttgtggccctttgttcccttgatgggtaaaggtctgactttattttgtacccacttggtttgtgggcccagcatctggaaggtgtttaatttttggcttaatcaatgagttcgtcttatgtgaggctgatagggatgtgataacctgttgtgtgtccataaagcaaagcacttgaagatgctaggagctccttgctgcttaaagcacaggtcatggaccatcagtattgagttagcttcgagcttgttagaaatgcagaacctcaggcttaatgccaacactactggatcagaagctccatttaacaagggccctggccgtttgtccacgagttcaagtttgagaaatgctgatgtaactgctcttgttcctcacatagtgaggaagctagggccacagagaatatctctgtgttgtcagagaggaaactgagcctccctggag

SEQ ID NO: 106770 - DNA, 1127 bp, Homo sapiens
agacattgccaagtgtcctctggggggcaaaatcatccctggttgagagccactggtttagacaatgaaggggttttttcccttttctcctttactgctgcttgatgttgatgctactaaaacattaatttaaaaaaatgccgttaagaatagccttgtacttgatagggtgcaaagcatttggaccaggacaccttaatgtaggtagggagctggtttaccttagaatttctttccaagttgttaaatagtgaaatgatactgatagaaattcgtttgggttttcatagagttgcttggagtgccttatttatggatgtaggtggggagggggtatgtctgtaaatctcagtatcaatacggttacttaatacatgatcatgggatgggggcttggatttgagggtgggggagccaggagaagagaagatttctgaattctgggtatgatgccaggttgttgattccgtttttttctctctctgtctttaccagaaacctgagttacaacaaactctctgagattgaccctgctggttttgaggacttgccgaacctacaggaagtgtgagtctccccctaaacctctggtggatggaaggatggagagctctttgggaaaatcctcttgtattgcagcatcgctcactcccctagatccgcagtgtaaacttgtaggaaggaacatttgtgtatggactgtgttgatgaattctactcctgcttatctctcccttactgtaggctcttgaagggtgtgttacaattcagtaggcatagagctcctggaaatcctgggcgcatggtgggtgtatagcagagtccctccattgtgggaagccttgtaactggagtgacacatcctgggctggtactttctcacagttcctgcaccaccacgcccagctaatttttgtatttttagtagagatgagattttgccgtgttggccaggctggtctcgaactctggcctcatgtgatctgcgcgccttggcctcccaatgtgctgggattacaggttaatcagcccactcaacagtggcatgtgagccaccaaacgtgtatttcccaggaagtgaagttatagaaggatggactatagaggcttacctgttcctctccacc

SEQ ID NO: 106771 - DNA, 2195 bp, Homo sapiens
attggaacagcttttatttactttgataatatttcaggactgagtgtggtggggagtaaggagaaaggaaagccagtttggggagacttagctggagtacaggttgcatctgatagctgagtgcctgccttttccagcaaactgctctcacccccaaccaccaccttttgtttggttccctatatctcagggcatagaacaaaacccacttaattttgttagtgtgcagtatgcagacgcaagtcattctccacccttctacctccctaccaatgatagcatgtttattggagggaagtcatgttggagtcacttgatttaggacaggctaggcagagactttgacaaacctcgatttgtcaaaggagtgattggtagaacctgggagattgtgtgttcgttatatagcaagtgttaggctaagtcctagctgttttcatagggcagctgcctcaatgtagctgatcttgtggatgtctcaatttggtatgaccagtgggcttggattttctgtttggatgtgaagatgctctgtgaattgaatggctcttgtctctctctagtgcacagagaggctgtggagtacctagaagtacacatggtgtttcttagatttctgcctgtaactgaaactccaaaaagagtttactgataattgacttttgacaaggctcttaaccacctttgctggtgattggctttaaaagaaagaactcatattccacaggtaccagtattcattatttggttaagatacagtttagcaagtggaatttgccgctagggtccaccctgtaagacacatcctttgtgagtaaatgacctggacctgcaaatgggagtgggatggttggggaggggacaggcgtgtggtggggtgatgcacccagccacattgaatgtagatggggccgggtgctgtggctgacacctgtaatcccagcactttgggaggccgaggcgggcggatcacctgaggtcaggagttcaagaccagcctggccaatgtggtgaaaccccgtttctactaaaaatacaagaattagctgggtgcagtggcgggcgcctgtaatcccagctattcaggaggctgagataggagcatcacttgaaccagggaggcagggtttgcagtgagctgagatcacaccattgcactccagcctgtgtggcaagagtgaaactccatttcaaaaaaaaaaaaaaagaacgtagatggaccttgtggaagaggtgaggcattgtttttagggactttggcgaatgatttaaaaaaaagaaataaaagtgtgttgtggcctagtcattttcacagccagttttccatttgacatagtaaaattttagtatgttcaaggatggaggtcgcatgcagcatctgctattttctgcttgtaatttcagtgaaaaggaagttccatgttttaatagcagcatagtctgtgtacaataatgcatgctgaaatactttgtggtttttgaatcttgacttcgtgtcttctcagccatttcaacaaccagaaccagggaaatcatcactgctccacgcctctaaacagggaaaatgatgtggtagatggtcttttaaatttagagtgtttcacgacgtcttagtactgcagaaagaaaaacttagccttttggctttagctaagcatttcatgacacacgtaaactttaagaagcccagtggaaaaagtgaacaggacgagatcccaagtcgataagctagctattaaagtcagtgacttcactgtgggccagacggctgaccttttaaaactgtgtgttttctttaaaatacttagctagagatagtcgcgtgcctccctgtaatacagcggatgtattcttgaaaagttgtgggtaaattcgcttttctaatttggctgatttaataccagggatctgctgtctgtatttgtatgatctgcattgttttgaggcagctgagaaagagaggataaacctagaaaataatattggaaggaaccttgtacttaatccatttgtaacgccgagcattgtggcaaatgcaagtaagcatggatttttatatgagctttatagattttggatgcttgggctttgcacaggcaccaggagacctcacagagatgttagtgagctgtgggtgtgatgtcacacagttgaaaaataaaggacgtgtgtaagttccagtggaggctgataga

SEQ ID NO: 106772 - DNA, 1355 bp, Homo sapiens
tgagaagcaacattaagcacaggagtttggataccgtggaatccagagggcaaatgacccgggtcgtggtgtgtctggctcaagaaataacattttgaagtgccacctggccctaatggcaacagcagccatcagttaaaaaaaccagctgttaagtaagagcaagaacaggagtgtttgtgcaaacaacctttaaattttctgatccttgatgaatgttagttggtttgtgaattattaacttcagcgtgtgtgaggaaatactggctgcttaagtatatttttatgtaagaaaaaaataaaactgaccacaccctcagctgctaccattttgggctcagttcttgcctgctctcactcaacagacgtatttaaagcagagataggaatgcctgctcctcacagaccacatgtgtgtcgtgcgtcacagtgcatcagttgccatcacaatttcactttgaagggaacggaagtgttttgcagcctgctgggatgtataagtaggatgatccctaccgggctgcacagaggatccagagtcctcatgaggattttggtatagataccagtgtagttgggaagaatcctgcgtatggaatcagaaaactaggtttagtgaattatagaaagctggcttgagaaatccatttaatgtcactcagccagcaacttttaaagagtgttttgaggcaggttctttaatgtgaccctggagagacagccatctttttctagtgctttgatttacacagcagtgtgtctcgcaggaagaggccagcagatttgactgaggaactgcagtgtggcatcttggaaaaaggggatttgaggactttgagagataggaagagacttggagaaatccatttgtgaacctggtttccacagctgtttttcagaggtctcttggacctcttaaagttgatactaatggactacttatttcttttgacttttacctgggaaagagaattgtgattaggcccttatctgggggagaggagaggctaagggaggaaggggtgaaggattaaggagttggagagaattggaactggccagacagggctatttgagcttcacatacctttgggtattggttgctgaattaatcctgcagtgtaagtcacacttagacatgcctaggtgtgactcttggggttcatttactttactacagggtttaatctctgcgcatttcgagtgaggaaaacatgcttgccatgggaaggaagaaagcaggtgctctgtctcccttccccacctcttcattgtcctcagttgcaatgccatttgatataggtagttctgaaatacattgtacgctttattcccaggctgcagggattattgct

SEQ ID NO: 106773 - DNA, 1901 bp, Homo sapiens
gtttcctggagaagctgtgtgcaccacgtggcacatccaccagcagggtatgaaggttcccatttctgcactacctcaccagcacttgctattatctgtctttttaaattttagccatcctagtgggtgtgttgtggtatcttgtgttgtggttttgatttgcatttccataatgactaatgacactgagcatcttttcatatgcttattgaccatgtgtatatcttctttggagaaatgtctattcagtttctttgcccgtattttaactgagtcctttgtctttttattgctcagtggtaagcagagcatgtttagaaagtacaatttcaagcagcttggggtattcccctggttggtagtgtgcttttctctatcttcctcaggcgagaagagtttttatttttaagactttgaagatctacaggtagaagtgtaatgcctcataacttgcccgtctgtttggaatctcaagggaaaaagaaaatgtggcaggaaagagcagtggttttccttgcagtgaatccagactacagacgctctaggggagcttattacatagtgtccctaggagaatgggagaatttgctctcctgtaacctaaggaaattggctgtgcatatgcatttatggaagagcctgaccgttttctctgcatttcctctgttccgaggcaggtctgcctttgccgacggagctttgcagctataaattagacagaagtgcagtattgaggctgtccaagtgcaggcagggtaattgctctggacaggtttacaatagggaggtgtgaagtgcttggtggagaccagaagctgggggaagggaggacgtattgaacttgggcggctgcagggtgatgggctgacagagctaattgaaaactatggccccggtggcttttaatgggaaagggagccgaggcctgcagtggtttcctttagagcaagaaaccagaaggaaaatggctcattgagctactcagggagttagtactaaatctctgcaggcctctgggggtagagggtcaggttttctgagttttgtttttaatttcttactccttagtcccattctagatgaactgacaggagggtggtggtgagcttgagaaaaggcctgcggggacatactggaaaaaaaagctgacccgtacagtggagacccttggagatccatgagttagggagatggtcagcgggctgaactgcctatagacaagtgagataataatgacatggtagcctctgttagtcctctagtcagagtttatggtgccagggcctgggaatctgcattgtaaacagctgttggaggaaattgctttggagtcttaaatgtgagggcagactccctgaaggcacagcctaccttattgacctgtgtggtcctcctggcacgcagcaggtgcttaataaacacctgtgtgcttatttccaaaccaactgtgagttaccgttgggttttctttcttgatagtatccaggacactgctttctcatgtccctgaaactcctgcctgcgcacacctgtcgagataaccatgggttggctgtcctacacatctgcccttaagttaactgttattttctgccccattggggttaactggttaccttttcaggaccacctacatgcactgaaattagttgtgtattaaaagcaaaaacgtagaaccaaaaactggatttatctccatttatttccaattccatggtagcaacgtgcagaaagtccttttcaaaggcggcaaataaacggtgtggagatggtggaggtgataggattttccttgagatgtgctgtggttaatgtgtaacctctttcataagacttatgtagatgttgatgcggccttgaagccattgcaggcccacaaactcaggctgtgtgtcgtgtgt

SEQ ID NO: 106774 - DNA, 1046 bp, Homo sapiens
aaattggagcacatgaatcccattgtttaaagctgttactgtccacctgcccctcatcgcgcttcttacctggccccacctgtcccagccaccacgtggggctttttaaaaagactttttaaataccaccatgtcccatgtccctcacccaccatttcctctgtctggagaatgggtcttccctcttcgccttgcagatttctgttcatctgtcttaaacgtttctccccatagaaaccatggctgacgttccctttaagttagattcccatcgtgaggattctgcagtgctatgtatagaagttttgtgtgaatgtttgattcgtttctgactaccccattagtctgtaagctccctgaatgcagtgactggctttgtttccaatccaccattgtattcccagaatctagtgtgaagcctgtgacacattaaatgctcgtgacagataccagtgtagatagagatagtggcattcattctgtagagtcctgtatgtcctgtggaaatacctctgccagatagaataattcagacctcccaggcttcatctgtgtatttcctgaatataccttgcttgtttagtagcttcctatacccctcaccaccctccaccaaagtctcttaagtgttgagaaacttagaagaatggaaagaaagaagaaacaaatagaaccgaagttgaaaagatgacaggctgtttacctgccacatttagaattggcggtctttttggtctctctgaattttggaaaagtcccatatgcaagaattgtcactgaagtggctttgtagttaaagcagtgcatgtgaactgtccccacatgaggtcctcgggcgcctcgtccctgctggattgctggtggctgtccttggcaggtgggccaggctcaggcgctctcctctgtgttgcgtttggcgagggagcccgcggtgcccttcccagctgttgacatggtctctcatctgctcttttgctggagccgcgttttggagcctgcttttccagagttgacactgcaggggagggtggcttcttccatagacc

SEQ ID NO: 106775 - DNA, 1047 bp, Homo sapiens
ttaagcgtttgtcttgagctctttaagttcaggtgccttgctaaccagtgaaaagcccagagcagtgcagtatttcagggtcttcaggggaagataatgttgtgtccttgtcttctcagagtcctgcattccaggcatctggttatgaggggccatggttgtggggatgcagcagctgtgcggttcatgacgcacggtggttaagaggcagctctggggcctggctgcctgggtgaccttggcaatttactccacttcagtttccttttctgtaaaatggggataattgtagtgccgacttccttaagcttgttataaggaaaaaaatgaaatatttaacacagggcctaacacacaagcagaagcttgaggaagggtagctataatgttattattataactgtcgcaataatagtgtacctttctgcagcaggatatatctgtgttaactgatcatcaccatcttaactctatgaaaaatattgtctctgttgtatacatgaggcccagagtagttgaatgacttgtttagagtctagcacttgccagttagaattcagacctgcgtgtacatgtttagaagaaaatacggtaagactagcactgccttctttctggcctccctttgacgtctctgaattcctggaggccgattggtctttggtggcttgaagcacctagtgtagttctggctgtacagctggtgctctatacatggtgtcttgaatgtgatcttgaagagcgtgtttctttgttggtaggcgtgtgtgtcagatccatttttggtttgcctgtttggtaaagggggtggtaacatgcacatatgttttgccatctgttgtttattgtttctgttaggttgtggtttgtgttcctgttccatgttcctttggtttctggagcaactgcgaatattatatgcttggggatcaaaaaaagtaaactatttataaacagtaaagtatccttgggtttggaaagtgtttttctcaaatgcgtgtatatttgttggctttatgatcatctcactgatgaatcgttagataa

SEQ ID NO: 106776 - DNA, 1070 bp, Homo sapiens
caaagatgacctttttccattgtgctttctgagctcaaaacaggccaaatgatgttcccacccttcttcgagcctcgtgtgtcagtgtcacacactctccctgttactcacttggtctcgttctggtgaatttattgttgacatctcgtcctttcccggaggaatctctgagtctatctgattaggtaactcttcacacatccctgtatgtgtgtatgtgtgtgtgtgtgtttctctccacttagacttgaaagcagcagggatcattcaatttcatgtacctaggagtcccttgataattatttgtttattgccttaccactttgtcttggagcttggtacattctttcagggcagaacggatcccccagtttcattgtttctctaaggggttctgaggtttacccctgaagtgtaatttttcctgattggcctgtgtggaggacttcataggagtgtttttagaatttaaatatcaggagtaaaaggccattttctttgtgctgagggtctgttttcccctctggagccagcggctaaatgcagaggctttcttcaattgctgttgcttcttgcagtgtggcccctcaatgagaagtcatagcttgtggtttgtctgattttatatgtcagaacttttagagagaatatttgacctaaaacaaaaattatggatagtcctctcttcctttcccatttctccttattttctactttctgcttgagaaccacttcaaagaatcagatgtgttggtgccagacgccgtggagttattgttagaagaatttggaaatataattgaaagcaaactttgttgagcaaagcagatctaggcaagtttttactttgagggcgaagggaattccaagtttttcctctatttggagctgatgtctcagaacacttgttctgtgagatgaatcatctgtgaattctacatctgggagttatatattgggaaatggcattctttttaaatgtagaagaaacacaaaagcgtaaagttacagtgtagttggaaaattctagtcagagtttaaaatactagcattgaggtgaaattggcaga

SEQ ID NO: 106777 - DNA, 1004 bp, Homo sapiens
ttaagtttcacgagcaagcctaactttcaattccttttgaatgagctatgtgacatttactcactgggtacgttccccctcctcagtgactgcaatttgaaaccctgggggtcttttaaaagcgaacagaactctgggccgtgttaatattcagagctgtttacaatggatgcagtttcaaaggctgatggcattgtcttgagacaggagggaggacgggtggaggaaaaattcccaggcagggaagggcaaatatctaaaaatctccagtgtttaccagcctgtgggaaatttagggaccgttactgttattttttatgacttaagcatgacactgagccactagggttcattctatctacctcatggcttcagttcttgtatgtcagttatgtggttatcttgtgcttttgtttcaagttaaagtgtggaaattggtaagaaactcagatcttatctcctctggaaagaaatagagcactttgaagaccagtggttaacatttttataatagtttacctctgggacctgcatttatgttttgctcaaagaatttgatatagctgcacagtttagaagagcagtcccgactgaccaattaattgtccaattatgactaggactgagaagttttttgctgaaatacttgatacatgaccattcttattaagcaaaatgaatggatcaataaagattgcagaaaaaatttgcagtttattgatggtctaatttctagttgaaagtcggcaatttgtgtctcttttttgtagggggtggtgggtatgcttgtgaacttttcttatacaaaggctttttgctttatatgttcttatattcttatattttgtataatttgttatcaatggtttttacctaagtactttatgcatagtcttttgaaacacaagttataacttcaatctgttcatagaagtccttcagttttttaagctgtttctccatttcactgggttttatacttttcatttcctgcctttagttct

SEQ ID NO: 106778 - DNA, 1021 bp, Homo sapiens
ttgtttggaatagggagcattttaaacacaggttaattgccaagaatacagtctgaaaggtgcaagtgctcttagagtttcagggaactttagcttgagctcagagtccttttcttttgcaacaagtgtcttccctcttgttgggggataacttgtctgttgatagctctctgacaactttttttgagtaaggtgagatttctggcaaataatattggttgtcgtgagaaaaaggcacactgtttaagtcttgctgatatgaaattgtggccgtaatatctattctttgagtactgctaaagtaggaagtgtccagagattcccagcgccccatgtaaattaactgtgtattggcacacaatgtccctcttgcctttaggacatgtcagaactgttcctgccccgcttttcaagggactgttttaaaaagtagtgtattgtctctttgcataattatatttggttactagattttacagactttggacttttgaacatattatcagcagtaattctcggaaccatcttcagaaagatgaagaaaaattaagtgtagtgtgatgagagctggttcctagtggatgtcctcatgtcccatctccccagctctgcaccgttagctgaaagctttcctccctccagtgttaattactttgcctgggttctccctgcagcttccctgagtccattgggacggcctctggctgacctttctctccctcagacaccatgatcacaatgaaagggcctctcccgcttctgcaggggtgtctccttggtgcaaagtcttcagcctcctctctttcagggtggacaggaatgcaggagagagcactggggttttgtgtgacttaacaatgcacctggcccagtgctgtgcacctgctaaagccctgaaggtctgttagataggaaggctgggtggaggttgtttaaaatagcctatagttatttaaaaagtggcatgcacaggagagggaaatctagaagagggattcattgaattgaaagttgttatatg

SEQ ID NO: 106779 - DNA, 1169 bp, Homo sapiens
ttacagagcagtgttctaagtgatttacatttattaacttatttaatccttccatcaccataggaggcaggtatcattattatcttcatttcataggagatgaagttacataggaattgtgcagctcactgtcatgaggacacacagactcagctggttagagcagaactggagttcaaattccaacggtctggtgccagaagctgagctttcagccacttggctaccctctccctcatggattatcattcttttcttactttgaatgtggatgataaattttttttttcagtttttgcatgaatgaaaatttgcatctatatgtgcaactacttcagccatattgaatagaatggtcaggcgattacgtcaacaggaccaggtatacagacataagaccacttaaaaagaaatgggcacacccattagcatgggtgttatccaaaaaatggaaaataacagtgttggtgggatatagataaattggaaccctggtgcattgcttgtgggaatgtaaaatggtgcagctgctatgaaaacaatttggcaattcctcaaaaagttaaacatagatttaccacatgagccagtgattccactcctaggtatatactcaaaagaactgaaagcaggaactccaatggattcttgtactgccatattcatagcagcattattcacaatagcaaaaaggtggacataacccaaatgcccaccgactgatgagtagataaacaaaatatagtttccatacagtggaatactattcagccacaagaataaatggaattcagacgcacactatgacatggatgaatcttgaaaatatatgccaagtgaaataagccagacacagaaagacaaatattgtatgattccatgtatctgaagggcccagaataggcaaattcatagagacagaaagccaggtgctaacaggaggagggagtggggaagaagggaattgtttaatgggtacagagtttctggatgggatgataaaaaattctagaaataggtaacggtgatggttgtacaacattctgaatgtacttaatgccatagactatatatttaaaaatggttaaaatgataaattttatgttatttatattttgccaccagtgaaaaagacaaaaaaaaagagaagtaagtggcaaagagagacc

SEQ ID NO: 106780 - DNA, 1048 bp, Homo sapiens
tttcttcctaccttctctcttcctcctcctcctcctcctttctactataaatgctgccatcatgaacatctttgtggcttaacatttacacatgtccctgatgacttctacagaatcaatttgcctctcactgctttggaaaccactcgctgtcacagaatttaaccaagaccacaggtccagcagcaaacacacagacatttcaagtggaaaaatgcgttttactccttctagtaacaccggtgggagagtaaggttgtaggagaagcaaggcaggatagccaattctcacttgagatgtggttttcacattgtctaaacctgtttgggcacatcagcctttagcagggagcaactttattgtctcttctgccagaggcttcccaaaattctcaacttcttttttagttcccagtgaagagtcttgacatttacagagagttaaagaagaaaacgatgtgcttgtggacaaattaaaatagacaatgccaactggccgggagtcatcatttctgtatatgagaggtggggagcccgatcaaagccctgagtaaacagcttacagacacaaaagacaaagtgttttgttttctgagcactggaaattcaggaacaacctgtgtcagattttgcaacctttgcaagagtttgggtatcataacatagcgatcttactcttggagccattacagagccaatcaccaaactaaccaggttctttaacctggaagctaaagatggctatggaaccggcccccccacatcagatatacatttggggcactggggagcaagtggggttggaatgaaggtgttggtgacaacatggtatatttgcaaaactaccaaagtcattccctctctcacctttgacaattgctgactgtatactgacattttgaacttgaagcattctccaggtgagcaaaggacaaagggagaaaagatatgctctagtcaaagaaggaacacaccttgtaaatgtgggaggtgacttctggcattgtattctcaagacataaggggctgagctgcaggaagaagccac

SEQ ID NO: 106781 - DNA, 1110 bp, Homo sapiens
aaggttttcataatccactggccaatttatagtggggttttagaattgatttagaattaaatttaaacttgacttctaccatgtagacaaaactcctgaaggatggaggtagcctggtataacagaatgaacacagatattcccgtcagaagacctgggtttgaatcttggttctgtcaatccagccatgtgacattaacccctagtaataatgtacattatcctatcttggagatatttctttttgtcagccaggacataattcaacctatcttgcatgaaataattaacttccatcagtactaatatgccaaccaatgcgggatttccacccagccgtcattgacactccctaaatagccccttaggaaaggactgtcaccattataatggtgataatatatcactgctagcgataatgtacctaacttgcttagcccagttattagcattatttataatcattactattgttattcatcttctcttccccttaatcaatacgatggagaacatgatgttgttctcccttaaatttgttgtgaggatttttaaattagataattaataggctacacatttggtgcttatgatgtgctaggcatagtctaagtatcttacatgcattaacttatttgatcttcacaacaccctgtgaggttctccccatttgacagatgaggaagctgaggctcagagatgaaaagcacattacccaaggtcacacagctattaaggggtgaaactggactattgtaggtgaagagctcagtctggtacctggcagacagtagatcttaatcatggacagcattcatggtgttttgtgtagagagaacctttcctaaggggctgtcttgggagtgtcaatgatggctgggtggaaacccacattggtaggcacatttgtactgatggaagttaattctttcatggaaggtgggttgagtgatgtcctggctgacaaaaaataaaaaaaatctccaagctatcagctgcaaatgagggtggacatatatttaaataggcgttggacccaattcatcccatgtggtccccaaattaataagatctatacataattgtcatacttagaaatgtttcctttta

SEQ ID NO: 106782 - DNA, 1116 bp, Homo sapiens
gggcggtccggcgggaccgggatggggaggctgggtacccgccggcgctgcgccccaggaggcagcgggaggcggcttgagggggcaccggcggccgccgttgttcgagcttccctcgtgaggctctgccctcggctctcggcggagtccgcgcagacgcctctcctgggctgcgagcgcgtttcctccgcgagcacgggtgccgggctcgccgggctccgcaggagcaggctggcctttgaacttgttccgccgatcgcgctccgccctctgtctcccagatccttaactcgcggtcccacgaggtcgtgcgtatatccacagacatttgtatatatcttgtagggggaaaaagcctagcaagcagacacacaaacagaaaaatcccgcgatgccgtaactggctcggcacttcttgtagttgtacgatttttctcctcctagatttaagtaagtcttccccaacaccgaatgggattccatcttcagacccagccagcgatgccatggaccccttccatgcttgcagtattcttaagcaactcaaaacaatgtacgatgaaggacagttgacagacattgtagtggaagtggatcacgggaaaacattttcctgtcatagaaacgttcttgctgcaatcagcccttacttcaggtatgatgatggtaggaacttctgttggtatctgcaccaagctccctttccccctcagtattgtccacttgatgtttatattgagatgcgataatgaaatgaaaccaatgactttgtttcttgagactagaaaacaagtcctctcttaactaagaccttcttttgacttgagggattcttctagatttcgggtgattgctttttaagttagtgggcctgtgtgtgtgtgtttgaggtaaatgaccagaaaatctagacttgtgctggtcagtatggaagccagtagccatgtgtggctgtttaaacttaaattataagttaaataaaataaaacatttagttccccaggtacactaaatactttttgagtgcttgctggtcacctgcagctagtggctgccatattgggcagcacagaaatacagcattttcatcattgacaattttattggacagtgctg

SEQ ID NO: 106783 - DNA, 1202 bp, Homo sapiens
tgcctacacttccagagttattcttacagaggccaatgttcaagccttgttcactgcagctagcatcttccagattccttccatccaagaccaatgtgctaagtatatgatcagtcatttggacccacagaattctattggggtctttatctttgctgatcattatggtcatcaggaactcggagatcgatcaaaagaatacattcgtaaaaagtttctgtgtgtcaccaaagaacaagagtttctccagttgacaaaagaccaactgataagtatactagacagtgacgatttaaatgtagaccgagaagagcatgtttatgaaagcattataaggtggtttgagcatgaacagaatgaaagagaagtgcaccttccagaaatttttgctaaatgcatacgttttcctctgatggaagatacctttatagagaaaattccacctcagtttgcacaggctatagccaaaagctgtgtagaaaagggaccatccaacaccaatggctgtacacagaggcttggaatgactgcttctgaaatgatcatatgttttgatgctgcccacaaacactcaggaaagaagcaaacagtgccttgtctagatatagtcacaggaagggtgtttaaactatgcaaaccaccaaatgacctgagagaagttgggattcttgtatcaccagataatgacatttacattgcaggagggtacaggccaagcagcagtgaggtctccatcgaccataaggcagaaaatgatttctggatgtatgatcattccaccaatagatggctatccaaaccatccttgcttcgagccagaataggctgcaaacttgtctattgctgtggtaaaatgtatgcaatcggaggtcgtgtttatgaaggtgatgggagaaactcactaaaatctgttgagtgctacgacagtagagagaattgttggacgactgtttgcgcgatgccagttgcaatggaatttcataatgctgtggagtacaaagagaagatctatgttttacagggtaggtgcctaagtgatttagtttttcatggaagggtaacacatcaagtggtggtttacttaattatactgaaacagttgtgttcccgttaattgaggaatacctccagcttccttatcaaactattggaacagtctgttctgtaaagagctataaagaaaataaactcttgaattaaaa

SEQ ID NO: 106784 - DNA, 1840 bp, Homo sapiens
tggctaatttttgtatttttaatggagatggggtttcaccatgttggccaggctggtctcaaactcctgacctcaagtaatccacccgtctcagcctcccaaagtgctgggattacaggcgtgagccactgtgcctggccagaatcaagctcttaacaattctgccatcaagcccaagtaactccttgtaccttcccaatacaaacctcccaattcaggttgattataatattatctgttatattgtgtcatggaatgacaaagttttaaggtattttgtaacccatatgaatgtatctctggagattataaaagaaatgttttagaaagtgaaatatatagcaaattatgccctttaatctttagaggttgtagttacaacatataaccaaaaaccaaacataaaaatttacatattcttgttttcttttttttttttttaggagaattttttctcttctatgagcctcaaaaagactactggggtttcttaacccccatgactgtgcctagaatccagggcttagcagctgtatacaaggactctatctactacatagctggaacctgtggaaatcatcaacgtatgtttactgtagaagcctatgatattgagctaaataaatggactcgtaagaaagactttccatgtgatcagtccataaatccataccttaaactggtacttttccagaacaaactccatttatttgttcgagctactcaagtgactgttgaagaacacgtcttcagaaccagcagaaaaaattccctttaccaatatgatgacattgctgaccagtggatgaaagtgtatgagaccccagatcggctctgggaccttggccggcattttgaatgtgctgttgctaaactgtatcctcagtgtcttcagaaagtactctaaatgagtagcaggccttagtgcatcactggcatctcattcttaggaaacttgtctttgatacaaaagagtgctgacagtatttcagaaagctgagagagttttatacatggaaaatgggtatgcttaaagattgcagggtagggagggattttccttcatccttgtgacatttcatttcagtaaggaaaagataacaaagtgcaattatcagcatttttttttcctggcataaaattaatcatttcattttataattttgtgataaatagtaactgaggtaccagatgaatcaggacaactatgcactcttataagagcatttagggtattattgggtaaagacgtctaaacttgtttgatgtgacttttaattttaaatacgggtaacaatctgaggcaatatcactaggactttagctgtgacctctctaacacagagaagcactaacttagatcctcattcttaatatttatatgtatctatttttgtgtactgttttcaagtgtactgagatttaaatgtgttctattattagagtagatcgaagaaaaaattagtctcagaaagagcttttagtctgattgtttccatttcccatgtaattttaagttaagctaaagttttaaagtggcagttttctgtcgatgactttttcaagtgctaacactgtctcttttgtgaaaatctggaaaagtgctcatattcacaggtggctggtgctagtctaacttaattcatgtgtataactagatggatttaaatggtctgagcctatgcctatctttcaaattggtgtggatttcatggccatagtactttacctgttgaactcttgtgatttcacaagattctctacttatgtgataggagggtatggccagttattcatctaactggactcaatcttagaatagtaggaacattatacccag

SEQ ID NO: 106785 - DNA, 1513 bp, Homo sapiens
aacatgaaggataaaccaacttatttgtatacctaaggcaggcatttggatcagtaacatgttttactaagcctagagtaattcgtaaagggtataagcataggacagattttgccctcaatcacaatatttgtattcacttgaaagcaaactggcatggttcgtattttaaaaatcttgcacaaattgtaatgtgatactgtgaaacaaattgaaaacattgcctctttgcatcacatacctcgtttttcagaaactttccaaactgctttacatagacctctacaagtagggaatgttttctgaagcagaagttaaaatggacagcatttctagaattaacattttaaaatctagtcttagctagatatgtggtttcttcttattggtgttgatagtatgtctgtaatctctgtataaactttgtcaacatttttacctccccagttttatcttctgttttgtttttgtttttatcatcatgatgttttggagttattactgtgtattttagaaatcattctttacagttttgcattgctgaggagagagaaaaaacaatttttttgcaagagatgttcatgtaatttatttttgaaagctttgttgaataagatttcctgccgctttttgacaatcttgtgtatttagaaaaatgtattacttgaaaacatgacatagaacattgagttagcaatttacatgggctgtatgttatataagagaatgacatactgtggctaattcaacagtagatttattcttttagcctgcacaacagttgatcttttggctatgacaatttgtatggagggtacgatctaagttaagtgtgtcaaaagcaaggcttaggatttgttatgggagtagaatatatattgaattttgtatgaagaactatttgtttaaattatatagctgggatattttgccactgttaaaatggattcagaagaggtcctagaaaagtaagattagtgacatgtgtgggtttatatttagatatttaaggtgcattttcatagtgtggtaagaccttaagtaaaaggcacaatgggtactacagaattaaaatgtaggtctaacataatgccagttccactttaactttgtttttgcatttgaagaatgtatgtagcactttcctatatatttgtcacacattgaaaactggactgggtataactatgttataggaaagtagaaattgtattctttattttccatctttgttttctgttctacaaagttgatgcttaagcatcaagctgattttattggtcatgagaacaaatggatgtgatcatgaaggaatcagattccctatgtaaagcagtttaaaatggaattcaatgttcagtgctcaggtatgtagtaagtactgtagtcctgtgggggcaaatgtgtagatatttttaaacattttgccataattgcacaattttttgcatttttacctgatgtcattgtttcttataataaaaccttttctgattgaaaacttccagtgttg

SEQ ID NO: 106786 - DNA, 1043 bp, Homo sapiens
acttctagtaggtagaggccaaggatgctgctgaacattctacaacacagggtctgccctccacagcaaagaattattcaacccaaagtgtcaatagtgccaaggttgagacacactgattcaattatatgtattaatttactatagtaaatatgggtcattggtataataaagacaaaaattaccaaaagaaaaagcactgcataaagttaagtgagacaagagtatacttattagataaatatattaaatttaaaaagatacaaatgcttttacacatttctctgagatcttgaactaatttacaaatgttctatgattgtgaaaacttatgtaagttatactgttcttttaataatatactttttggggggataaatattaaactgcaaaaaaatatggtaaatacaaacccaagtaagtttgttttaaagctgatctattcaaataacatttaaaaatctcactcagtttacattttagtgtctcagaatgaaaactcatcttagttttagatctttaactggaataatataattagttactggttctcaaagagcatgtatttcatggatatgccacccagttttgttcaatatatagaacttaattttttctataatatgcgttgtaattattgatgactttttcatgttgctgtaagtctctttaactttgaagtgcagtgtctaaaattctagtatttgaaattatgccacattttgttccagtgatgaatgtcaaacagtatgttgatctatattgaggtgtttcatgggggtgaagcttgctacttagaaaaaggcattgtgtaaggacaatcagcacctcaaaaacatggctggttaaaggcaacatggcagaactttgcctcctgagtatacaaaaaagcatgttccaggcagctaacagttcttcccaaactctaacagagtgctggagggggctaaattctgctcaacgttgtcatcctatgagtgctcaggctgcaaatatggctggtgagcttcaggttcttctgagtcatttcatccttggaagcc

SEQ ID NO: 106787 - DNA, 1036 bp, Homo sapiens
gcctggccaacatggtgagaccctatctctactaaaaatacaaaaattggttgggagaggtggccactgcctctcatcccagctactcaggaggctgaggcaggagaattgcttgaaccagggaggtgaaggttgcagtgagctgagatcacgccactgcactccagcctgggtgacagagcaagactctgtctaaaacaaaatttacacgtgtaactgtcatttaccttctggtccaaagactggtttgctcctgtgtccatcagggcttttgtttcacactctgtcattactccatgaaagccatgctttgattagtttctaaattccttagcctgctatctaacacctgccacagtcaaatgaatcaaagtgcacgcaggttgtgttaatgaaataatacatttttacatctgtgttacttacctatcagcacttaacaaattaccccaaaatgtagcagcttaacaaaaagaacagttattatctcacagtttctgtggtcaggaatctgggtgtggcttaggtggatcctctcactcagggtctctcacaaggctgcaatcacagtgtcagccgagctgtagtgatctcaaggcttgactagggaagaatttgcttccaagatcccttatatggttcttggccagatgcacttcctccttggctattagacccagagcctcagttcctcatcagccgttggccagagtttgccctcagttccttgcccaggtgagtctctccagagggcagctcatagcagggtagtttgcttcatcagagtgaaaaaagagttaaagggagcaagactgaagccacaggcttttgtaacctagtctcagaagtgacactccatcacttttgccatgttcttatctattagaagtaaggctgtgggtccagatcatactcaagggggacggattctacaaagatgtgactaccaggaggcaagagtgattgatctttgaaaaccattttagaagctgccttccacagcatttacaaagtcatatgttagtcaaaataatgc

SEQ ID NO: 106788 - DNA, 1061 bp, Homo sapiens
cagttgttccctcaacaggaaggaggaagcaagtggtagttaacgacaagggcagggtcagtgggcagtagagctatgccttcaaggagaaaccaggttgaatgctgcaaagagatggtgccagcatcagggtaggggctggtgtggaaggcacttggcaaactcatttttttcctttactttctcttattctctacctgtcttttttcttatgtctgttcctttttgagctattccccatgactctgtctcttgtctctctcttcatttgtctctctctctatctccctctctctctctctacccccctttccccttctgtaacaagtttctacctggtcatgatggctctgcatatgacccatttctcataacagatgagcttcatatttgaatatgagaatcccttcaaaaactgcttagttctgagcatgcctagtatatgcttaataattaaggtggtaattaaagtgtaactgcaagtataattaaaattcacttttgtggatcctagaattatgaagcaattaggcattttcacatggcactgaaggagcagctgggaggagagaagggttgtggttttctgggaaactgctccgtcccctttcttccctggccctgtccaccagtgttagcctggagcaaggcctcacttgactggggcacttgaagctgctacaggttgggagaagtggtaacagcttggagtcctcactcagggcagtgagcacagccagctcttcctgggcccttcccagcaaaaggagccactcccaaaacccctaggtaactgtgagaggactccaaaaaaaaaaaaaaaatccctcctgattgcaccttgagcagtttgcggtatctatttcaaccctataggaaagggttgttaggacagcaaggagatctatcaaaaagtacccgcccactcctcttctcgtcaagcacactttgtatgtgggaatccatctggagttaccccgtcggtcagcacgtactgctagctaacggatattgggaggtatccagtaagcaagtctgacaaaggaaagtggatgtttaga

SEQ ID NO: 106789 - DNA, 1060 bp, Homo sapiens
tcataaaatgttaggggtacaaagcatttagatatgattcacattcaaggagaaatctaaagcctcaaagctgcagtaacttccccaggttgttcagctacttgggaacagaaccgggtttaaaatctcagcttcttcctctgcaaaatggaataaaaatagggcaactctataaggttgctgtaaggagcagatgagtttttaaataatttgcaatagtccttggctcagtaaatgttagctatccttattattatctaaacccttgtcagtatctcgactgaggccacatggatggccaatgctgttggctgccaagcacggtgctaggtattaggcacatatcatctcaaagaaataagagctgctgacatagcagaagttttgcctctgattctcaatgaattattctgtttctgacataaagtaacaaggcaaaagagacatgaaaagttatctaaatttacaggtcaccaagaaaatggacctcctctatctaattgccacttgaaaggagactaaggaaggaggtgcaagggtacaggagcagtggacatttgaggaggaatttgctgctttagagaatttggcttgtttccactgaattcccctctcccagtggggagaaaaaaactcagttacttccagcagaggggctgaaatactttaggctttcgaggccatgctgtctgtgccacagcgactgactcctcccattgcaaagcgcaaacagccactgatgaagcaaatcagtttggctatgttccacgaaaaagttatttatggatgctggaatttgaatttcatgtaactttcatgtatcataaaatgttcctgtgattttttcctcccagctatttgaaaatgtaaaccctattcttaacttgcaggtgatacaaaaagaggcagctggctcaattttgcccaaaaactagaacttgccagccctgactcagagcactagaccaagaatcagacctgtcagggttaactggttgtttgatccaagcaaattgtctgacatctctgggcctcattttcctctagtgaattccttcta

SEQ ID NO: 106790 - DNA, 1092 bp, Homo sapiens
tacaccatcaccactcccggatggagccagtgataggcaaagagaacaggaggggttacactaatgactgtccctctgcatggaaggaaacatcccccagtgcacatcacaggtcttatctgccccaggagtgggctgcctttggtcgggtagctgccccactctaggcagtggtcatcccttcaggaacaagagcctgaagttgcttccctgagcagcagctgtgggtgtggccatttttataaggagaggttttaaaactgggcaggtaccaggactcgcatatcctaagtgctgccttatagtgtcagaacaccactgcgtgctctcgggtatcttctgagtgactagtcagttcatttcttcctgactcaatttccacttgaaagtcatatttgatgagccatcaaaaagagcgagcgagcacattgctatcaggacgagacttacaggtgattcagtctgtagtgtcttatagacgctaagtgtgtcccgctgagactcttccagagagcgccaccttgaggctgtcctgaggcagaactacctatggggaaagacttcatgagaaatgtttcagatgagggaagacagctttcatctcatgccaccttctctttattggcagtggctgcctgagcagtgctgtgccaagaaagattctgaggctatatcccagctcagtggaaaaagagttctatgatctttccagccacacatgtgggaaggggtggagggagtggaaattcgagccaatatttgccattgtcaattcaaagagaccataggtgggtttttttctcctagatatatagctgcttaccactatatcaagtcagaagtagggactgcaagctgggaaacaccagatgaagatgattcttgtcttcacctgaccctttagccacaaggccagaaatttggattgtatagagcaaaggtctacaaactttttctgtaaagggcaggattttaggctttgtgtctgtatattccctgttgtgattactcagctctgccattgtagtgttgaagcagcagtagacaataggtagaggaatggacatggctgtgtcacagtaatcttttttt

SEQ ID NO: 106791 - DNA, 1768 bp, Homo sapiens
atcccaataaaagtaataaaaggaaaataagtgacaaagctacaatgaaaaaaaattgatcaaggagtcaatgagtgcatcagtattggtgtatttctgattaaaatgttgatgtcagactgttttcagggtcaaagtgatcagagaccctcagattttaagagtcaactcttctcctgttcttaaagggggaaaggtctctatcagccaattatattattgtttgtcactggaaataactagaaatgaatgcacactacgattgacccattctttctggggatcctttctgtgcctgagttgtcacagaggcccacaatttattagttattcatacatttcgagaaaagctagttaccctgccttaaatttttcccaaaagatttaaaggagtgcatcttttattttcatactctgcttagtattccagaagaattaagtgatttttataatacgcagatgatattcatgctgaaatatgcaaaataccacattcaagattattttccttaatattctctgctgattgcatcagaggtctatctgagatactaagaagaagatttgacatttctaaatttgttagatgatcagatttgaatcttttaactaaatgtacttccaaggtttatgcctgtggttttttaattagttaattagtatattagtaaataccatgtgcatgcaggtcaatgaactttaggcattaaggaggatcaagagagatgtaaaaaaaaatgtcagctactagatggctgggaaaataaaatggaaaaaactaacaacataagacaatatctataaaatggtaacaagtgttatctgctaataggacctgcttctatcttagtaaaagtagccatcaggggatcccagacagccaccagactggtttgctgaatcttcagaaatattgataacttcacaatgtccactgtatcatgaaggaattgaatgtgatagctcaggatgagatcaaagagggcactgccttccaaatttatgcaaagaaaaatatacatagtgacccttcttagccactaccctctttccactattatagctcctctcttaccgtaagaatctgggatctttatcaagagagaaaaagcaagagagctttggacatttctggagtcctagctggtgtccttttcttcctcttgtgggaattggcatcttgtgtgataaacgtcctcggatagatacagggtctcacactcaacatgaaactaccagggatactcactaatattcatatgtgtgatttctgtgaatggagcagacccatagcaagacaagacctatcccaacattgtattgaccatgcctaataaagggaagatgaagcattctgttataactgtattcttggcactgatcataggtgaaacaatgcagaaatttgaagaaggtattatccataaagggaactaaatgcaaatcaagccaatgctttttagactaaggaaatgcagactcctaataatgtgtccctttaagggacaaaagtcagtgcctagtgtagctctgctcactttcattggcataacccacttttatgcttattcaacatggactattatagttatagtagatttagagatgtgagttagcaaagaagtagtataaaaggagaatttccaagttgagtctggaggataggtaagaattgaatcattgcaaaggaagaaggaaggagtgggtagaggatcagaagtcagtcatcaagtaagtcatcatccatacctgagagttggtattgggg

SEQ ID NO: 106792 - DNA, 1060 bp, Homo sapiens
ttcctgagataacagaacgaaacactagattgtgtaagatgaaacaaacacagtacggcaggacttccctgggcctctagcaaactaatgtggcttttagctctccaagtatggcaggtgttatgattctccagattttgaaaaattaccccagagcaaaagcccttttatttatgaatcattttatgagattagtgtttggggaaaaacactctgagaaatgtttctctgagaatcatgcatcataactgaggatcccaaaaagctttggttttttggcttatatttgtcaatgtttattaattgatttaattgataaattaatttgataactgaaattacttggaatttaaaaaataactcttaaaaaataatttgtatattttatggtatattttatatatcatatgtattatatattttatagcaataaatattttaaaaaatttttagtaagaataatgacattgttttacaggtttgtaaataacttttcacatttagcatgtctgtttctgcataaaatgttataacatgttttagttgaagtatatgaagaaaatctggcctcacagacatatgtgtttttcaaaatgggagtagttttgtccgtttgtttgtttgttagtttgtttgttttgagacagggtttgtttgttgcccaggctggtcttgaactcctggcttcaagtgatcctcctgcctcagcctcccaaaatgttgggattataggcttaagctaccacacctagccagggggagtttttaatgctcttttcatatagttctgaatattctttggtactacactaaaagtctattggtaatagtttattgaaaattagtttccatgtggaatctggaactatctcgatgaacttttcatattccattaaaacccattggtctgtgttacacattaagggagttttatccatgcatggttcaaaatcattcactgatgatccagaaaatttgtgattatgcagatcttccaaaggttgtctcatttcaatgtacaatataaaaaaaatcacatttgttaatattaccaccatca

SEQ ID NO: 106793 - DNA, 1179 bp, Homo sapiens
tataagtaaagtgaagaatttaggaagaagagaatagacagaataaggacagattggagtctaattagacccatttccctaggttcccctgactgctttcagaggtcaacctgaatggaaacttgactctccatcaagttactgtccccagaggatctctccataagatgtcgtttccatgctatcagttcagagaagttggaataaaatggttggttcatctcaattgatgaatttaaaatgcccaaatcttgttttgtattaagggtgttgtataagacatttccttttgattctgagattttcaggcaggatcgtggactcactaaaattatttcttttttccttggaagaaattaaaagggcagagtgggagggtatctttcgaggaatgctgtttttcacatgtcagttttagctattttggaggtacatgagttgctttattccaaggatcctggcatttgaagtcacacaaaagaaaataatttcaaactccaagaatataccaaaggtagaaaagtgagcctgagcagcttgccataatttcagcagaaggcaaatctggtcccaatcgaaccaatctgttggtttatttgtattattacaacaaagcccaagattgaattcctcacctgaatcacttccttattgactgaatctatttagactcccctctaatttagcagagtattttttattaaatccaggcatacaaacatcaattatccaagctgcatctcatttccttcaccatttattttccttcgttggctgccagtggattagaagacatgattagaattcatcaggaaaataaaaacaacaaaaaagaaaaacagtttcacaaaaacagatgcttaaacaagagcaacaacattcagaattaaaataacctgtgatttttttaaaaaagtccttatcttggctaatataaacatgcttgcttgatttttatcaacctcatgcctgctacagtgggactaaattagcattcgtgattggaataggcacagacaaaacctaatagttgcacttactgtgcttcacgtatatgctacagtgtttttaaatacaatgcagtacttaactatttgcaataacctttgcaaagtagctggcttactctgaaagttttctattttttcacttccaaccaatgtcagggaggaaaaaaga

SEQ ID NO: 106794 - DNA, 2019 bp, Homo sapiens
aaggactcctacatgtgtctgtaagtcatgttgtaggatagttgtggattggatagtccccttgagattctccttgctcttcaatatcaaattaacagagaaagaacatagttttactttgtggtgtatggacttttgcaaatcagtaacaagaaaatagtctattatttcccacaccatcccacactcatacttaataatactcatcctactactttgtttttcattctttcccttacttctcttgaagtcagagatgaaaatataatttgccaatatacagccaaatttgtttttggaacacattctagattattatctttctcacttaccaccagtgtggtatactgcattgttataaaacaaaatcacaaacaattttcaggtcagtacattttagtaaagtcagtttattacgttgcctattttgtagatgagatacctgacttgtgacaaatggttggacttatatttgatagtaagtcacttcagactcaattcaatttcattttccttttttcacccaagtccattttccccatttttctcctgaatttaggatggcaagtatgtactttatgctttgcagataagttggtttctgtgtaaccataataataaatcaagccaactgggtgctgctgcccatatcaaagcctacagcttcctagtacattccaattaattatcttcatgaagcaatcaaaccatccctgccttccttgcagtgtcttttctgtttccctcaccttttcttaaacatcttaaagagaaacatgcctctgtgaaatgattgaatggttcagcagcttttgattttcagcttctcatttaatcatgcaacctgtcattctaaatatttttcacctcacaattatcctattttcttttcctgcttgtttattgtccactctgtgaatcatgtcaataacagtttttaaatcattgtaaatcataatagtttgacacttatttggagaagccttatttttgacaaggaggaggaaatttcatatcatactgtcataaattgggggtcaaatcaacatagatttctcttctcattaacatttcagacagaatgctcctaatataagactttaagaaaacagtcactaagatttgagtttaaattgtttcctctggccttactagctaatgaaagcacattcataaaagaccttcccagataaaggaccataattttttgttaatattatggttcatgattttagttacatttctcagagccagagtcagacaattagacattctgattcactgtagtttgtaagccaatttcttatgtaccttcctaatgaataggcagaactgtatcttgtaagttcaaaggagtagaaaatctatatcaggagagaccgagataacatctgacctggtgttctaagtggggtgtgataagcgtatctcttcagaaaattacagacatgatttagagttattttaatttgttcctctcaacaggccatcaacagaaagtcagtttctttgtaaatttagctgatgtaaatagaatgccagcatcctttcatcacaggactgagtgcttggtgatagaggacagagatgactgagcgtgcttttgtaatatcaggaagcaagcaacctggaagtactcttaagtgtcataccattgtattctgatcctaacattgtgcagaccttttttttttttaaatccatgacttggcatagagagcacacagctatttcaaaggtttcactgaatgcatttcttataacattcacctgtgtgtctttattcccgactagataattctctctcaatacttttttgttatccctgagttccaggagaggtccaggccgtttgtgattatcccatgaagaacagttaaaggtagtggaagccccacctctacagaggcagagattaaccaggatggtatgggctccaggaacagaggttggaacagcaggcaggatggctcactggaagcagggctcagggacttcaaagattcttccatctccagg

SEQ ID NO: 106795 - DNA, 1050 bp, Homo sapiens
acagttgtacacatattgtaagatcttagtaaaattgtgttgaatgttcttttttttttttttttttttttttttttttgagatggagtctcgctctgtcaccaggccggagtgcagtggcgcgatcttggctcactgcaacctccacttcccgggttcaagcgattctcctgcctcagcctccagagtagctggggctacaggcgcacaccaccatgcccagctaattttttttgtatttttagtagagacagggtttcaccatgttggccaggatggtctcaatctcttgaccttgtgatccgcctgcctcagcctccttaagtgctgggattacaggcatgagccactgtgcccagcctgaatgttctttttttaaacttccctgtcatactttattgctcatcagagctatttagggtgaaagaaaaacctcaagttttgaagcttagtctctgagactcaggtagggctgacagccattcagttctgttctgcatttacttgcctcatttgagtaaacttcttcctgccttgaaggactgtactatatacatgtggactgatgactgtgcaaatcttctttgcttttattcaaagaattgaaaacatttctcatcaaaatatcctgctcctcaacataaccgaaatagactttaaaaagccaattttaattatttttctagtccagtttatgtcaaggatgcaattcagttctcttgacagtctttatattctaattaaactcttccaatttgcaatttttgtcttcattcttcatttattaataaaagccaaatttgacctagatatgtaatagtagatgacaaaatgtggagttgctaagcccctttctcccaatgaatactatttatctttcatttttatagcagtaaaacatttatataaacataccatagtggaataaaagcaacagtctggtgctagtgatcttcactgtgattgacttctattacttgcctatacatttagtatgtttgtgcagaaatgtttctcaaggattttctaacaggtgatgttattgaggtc

SEQ ID NO: 106796 - DNA, 2451 bp, Homo sapiens
ccaccacacctggctaattttttgtatttttgtagagatggggtttcaccatgttggccaggatggtcttgatctcctgacctcgtgatctgcctgccttgggctcccaaagtgctgggattacaggtgtgagccactgcgcccagcatgccacctattttaattagcagaaaagagtgtcatgctattaaggaatcaagtatttataaatgagacatttcaatactggagaaaagtttattttcttgaatatggtaagtatgttctttacagtcttactgtaatatatatttttttactcagcaaatacttttccttaaatattgcaaaggtaaattgtggaagagtcctccatattcacattctgaacaaatggagtttgaaatgaagagttttaattgtttgtgcagagccattattagcattttgggtaatcagagctttctttttcacctaatatattctttcttatatgtctgttttacttgctttcaagtatgttttggttattgtacaaaccaaccttaatgacctcaggtgctaatatgacactgagttttataagtagtgaaataatcatgattatgggattttgttattgtttgcttgttttttttattcttttagctcaagaaaaagcaaacattttaaaatactaaagcttggcaatcttgtcttgtctaacctcctggaatagagacttagcattctctaatactctcagagtacagaatctttctcataggaattgtgtcatatattaagtgagacagttggtaattgagttatattctttattacagaaaagcaggatcttcctgagctggaattcctctctaactgtacattaaaatccttttgagcttatagtaatattttacaagtctctatttgaggctaaattttatttttgggtcattggaaacctcgacagctcgaatgtttatgcagtatcatggtgtccagtgaaaatttactacacctgttttagagttcaccaaacaggacaaataagagatataaagagatttattataaggtattggctcatacagtcatgaaggccaaggaatcccacaatctgctgtctgtaaggcagagacccaggaaggctggtggtatagtttgaaggcctgagagccagagagccaatggcttagcatccagtctaagtctaaaggcctgggaaccagggatggcaatggcagaaggaagatgccccagctaaataatcacacagagagagcaaatcctcccttcttccacctttttttttatgcttaggcccccaacagattggatggtgcccacccactttggtgagggtgggtattctctattcagtctatgaattcaaatgctaatctcttgtggaaacactctcagacaccctcagaaataatgttttaccagatatccggatatcccattttccagtcaagttgacatataaaattaattatcgtactttccaagcatcccaatattaattctagggataaataatacacttaggacagaggtgtgggtcagtccactgataatacccagatcttattctgtatgcctaaaatgatgctaagtacaagaaggcaataccaagtaaaaataggaaactctttgccctgtaattagaaaaacaaagtaaattcataagtcagttaggaagccataaatcatagtaatcttatatgacattgaatttaaaactagaagagcgcttaattcaaatgcaaaatgattctctggctaaaggtgtgggggaaggggaggcgattgtgggtggaagatgttgagtaggctcaatgagcagccttgatagcagaagagttggaagggtgtaagagaaggtaagggcttttaggctggatgattgagcaggagaatacagtaaagagattgttcagattggctaaaagtggaatgctaagcaacatattcagccagataaaatggggccaaatcttggagggcaaggaatgctgctgccacttctataatcatcgttgtcctgcagcagttcatttggggtcctccatcaagcagcagtagtgagaatggtggtggcagaagtgatgctggtggttttagtaacggccagcaattactgagctcttatgacttgccaggatcttgtacttcatgtggattattgtattttaagacatgattatctattttacagccaagaaaaggaggcatagaagagattcataactaaccagaggacacagagctagtatgggtatagctagtatgttgagcccgggcaattttacactatattccgtatttctaaacacatccctgtattaccactggacagtaagtagctacagagagcaacagttccaatgcatcatcctacattttaggagggatgttggtgactagagtccgtccagagaaggataactgggaaaataaagagtccttgaatctctgtgaatg

SEQ ID NO: 106797 - DNA, 1694 bp, Homo sapiens
gccgtattaccaagtgggatgtatcctgacacacaaagactgtttctatctggtacgttaaaaagctatcgtatcatttagccttgtagtccatgtctggtattttgtcttaagaaaataataccagcatttttgatgccagaagatgtttaacacaggattgtattttcaggcagcctttaaaatggcccctagtgattgatccttatctcttgttgttcaggctcttgtgtaatcacctccccttgcatgtgggctttacctgctgactcacatctaatgaatagaaatgaaataattcggttataaaaaagactgaagcttcagtcttgggggctgctgcttgctctctctgtttacacacagtattttttttaaccacacctggcataaaacttctccccactcccagaaacatactagaaggaaatatacaaaattaataatactcaatgtgtttaagtgttaggactctgtcatttgatctacttttttgtgtttttctatttcctatcttgatcatatattattttacaaaatggcaatatttaaaaggaaaacaataaataaaagaaaagaaaaagcaaagaaaaaggacaaagtacatgtaggtgtttaaacacaggtaacatttgaaaaacatttgattgtttagtgagaaaaaagttgaaatgtgtgcatttgtatttaaatacctacaaaaatgtataatttgtattcaagattatataatattgaaaatttgtgtggtggtcatacatcacttataatttttttaagcactaaatgagatgtttatacaaaaatactggtaaatttttacctaacacttgctgatgaaaagtatcatgtaaatttctagtaataatattgatgatgatatagtgacaacttagtaaaagtcctatagtaatccaggcaacagacttgactagcacatcgctgctagttggttcctcccaatccgaatccttcaaccagtgaagatttttgaatcgttggtcttgtttggctacaggatttttataaatgccattcaatgaagatttgccctctggccttcttgatgttggtttaccctccctcctccagtctattatttagcatggtgatgccttccataatgactgagcccatctccttgtgggctctctttggggtccactatgggtcactgtgatatgggtgtctggcaaagggctggaaagcaggaacattaaattacttcagtttcagaccacttactttttctcctgcaggaactgaagcagagcaagattttgttttcctgctcattcattattagcagtagccttgtctttagaaaaaagcaggttatttttctcacttttgagcctttggttcttaaaattacctgaagcactttgagacttgacttcatttcatatctttctgtgatgctcaaaactaatgtttgcccttaatttttttagaattgctcaaaccaaataaaatagtttcccaagtaccaaatttactgctataacgtatgcatctcttcggatagcaaatacaatttcaggaccgcttttgggagacactattcctcacatacttatattacaaacagtattaatagaacttcagtctaaaatatatgaagaaaagaacatctaactacatttaatggttagtggaaattccatttagctatgttcgtgtttgttcctaag

SEQ ID NO: 106798 - DNA, 1039 bp, Homo sapiens
ttagtttatcaaatgtacattttgaccttgcaaatatcgattcatttatttaattcttaaaatacttgagcatgtctcatggaggaggtggcatttgagttaggtctaaacagatgagtaaagtttggatgaaggaagtgtaggaaatgtattcaagcagccaaaactacagatttagaattgtgaaaggtgttagaagaaatgtacatgggctgagtggaggccactgcaaaaattggacagtgtgttgagttgttcagttataagacactgctatcacttggtcacctataaattgggaataataggaaggaagaccttcctcatagaactgttttaagggttttatgagataagcaagtgaaattcctaggacaaggcctagcacagagtaagcgctcaataaacgctacctgatggacataccatgaggccaaagaagtgaattagggccaggttgtgaatggcattttatggcaagcagagttagtttagttttgcacttatgtgttagggactagagataaggaagaaagatagccatgggccagatacagtagcaagccttctgggatgggccaaggcctgggaaatgatgttgttatcttttacaatagtctttccaaaattgtggattgggacctggtgattcttgagagaactccctctaggtagttaaataacaatattaaattaaatagccttgatttctccatagaggaatggatagaaagatgatgtctgaaaaaggaaatacagcaaatgccagatgatagtatctagatgatgggcatataggtgttcactgttcaatttttttcaacttctctgtatacttgaaaattttcacaatacagtattggggaaaattgagaaagtgtattccctctttagttctttttcaattccagaaaatctcaagaaagtctcttggtgccaatatggcttaaacactttgctttggctcagagccactggcagcctgtatctagttacaatttaataaaactattgtacattttcccaggtttggtagctt

SEQ ID NO: 106799 - DNA, 2947 bp, Homo sapiens
agagcagtcccttgtcatagagttttaaatcctgcatgtaattggaatgtctttcagcaggaaaggtacgactcatgaatgtcttgggtcagagagtacactgggcacttgggcagtgaacctgagtgctggctctgtagtgcagagacgttagacaaattatggaacctctgtctctccacttcccctccccttctttatatcttatcagataaaccccagagaatgctcactagaatgtttgcattgcctatattttctccaactggtagtgttgggaatgattttttactctcttctttactgtatagttttaatttttccttcccagtgggcctgtattgtttttactatcagatcaaaatcagtattaaagtatagagcgaggatgagaagctagatttcctaagtccttttctggccctgttaggatttttataataaaagtcctaccattgattcaatattacagtgaattaaagcactccgataatttggacctcagtttcctcagctgtaaaatgtgatattaatgacctcatcaggggaatgattaacaccagtgtgatcaagagggctttgatggaattgcagttctgtttccctcctgaagtgtatgaccttagaaaagtcacttcccatctctgaagtccatgtcttcataaaatggagttaatgaaaacctcacaaagttgatgtgaagattgatgagaataaggtattatagcactcagcacagaatttggtgtttaataaatgacagatactgctgttaatttctgctatcattattattgtcacttttattgtactatcatgtgattattgtgtgaaccagattgtaacttttacatagaagtttttcagatttaaggtgttattaccactgttattattcttagctacacttctactactggaaataataagacttcaatcagtagtgatttactaccaagaaattaattggtataaggcagggcctactgagatatccaatatcaatttttttttcttccttaatagtagaatctcaacaaaatgtcaattctatgatattgttccacctccctttcagctgggtggaatcacgtcactgctttctggccagtgatatgtaaacaaaagtgtaatgtgggacctctggcaaggctgtgtttaagaagctgaagcagctgggaagggagcccttttccctgctcctcactgttgcttggaatgactttacaatggcaggggctccagcagccctcttagactgagaaataaccttagaacggtaccattgcatggtagaggagacaaaccaaaggcatctgagttcctgatggactcctggtagcatcctaccatcccaggcctatctaccaccagtgttcctttatgtaagagaataaatccttgtatgtttaagtccttatatttatttctttgttcctagcatccaaatacaattctcaactaatttatttagtcttggtgcgaagagctttggcatactttctctcatttaccatggagtacttccaatagttctgttcttccctggtaaatttctttttcattatatcacaaataaacaaactgacccaaatttaaacttgacccttgagcaaatcaccaagcaaaagccttcataaaaagagtaaagaaagacacatggatgtttttcttgacatgcattttaggcttgttttgaagatggaatagttttagggaatggggtaattggcctgggaagtagatttgctgcctgcctggtgttttccttccaacagttggtgatagcatgaatcttgtgggttttctgtgtacattgactccagaaaggtcatagagaatgttgttatttcagaatacaaagagaactaagtgtgtttccctctacttaaatgtgcttcgtcaagcaggccacgttagcttaaatagttgagaatgaggaaaacgtaaaactgtgataacgaattcatattaaaacacacacacacaaaacagctgccctttgaatggttcactggtcaccaagatcagaggcaggttgaattaagagcatttggataattgaccttccatgtgaatgaattagaatagattagatttgattgaccacataacaatttaaatcataaaaaagccccttttctctttccaggctactttgttatattgggtctcaaaggtgattaaccatgtgtttttcttgttggaagactttcctgaacacaaattagcagactgaaaaagagatggtaatatttacatttgccatttcttttttaattgaaaaactcaaaggaccatatgacagactgagttgtttaacgatattccagaagggcagcatacttggagtgttttaatatgcattcagccgtctcttcctgactggtggggtggttcctgttactcagatggcctgggcagttgggatgggatgttctcaaggtgcttttttcccctccgacctttgctagtgtgtgtgatgtgatgtgttgaaaaccactgtataaacaataagcaccggctactcatttagagtcatggaatttcagagctgaaaagaatcttagacgttcagtgagttattgactctctttactttagagatgatgagacacagtcagtaataggaaatgccccaccctcagatgagaaatggaactgctgtgtgtttgataatatacagaattgttctcatgcagtaaagccctaccccctcgacttattataggaggcgttattcaaattggataaatgcttctgtagaaggatgatattattagtgcctatttcttagggttgttgtgagattaaaatgagtcaaatgtctataaagcactgttttggttattatttctgcatagcaaaccaccccaaaacttgatagaaccattttcttatgatttagcaatctggcctggggttaggtaggccattcttccactgt

SEQ ID NO: 106800 - DNA, 1086 bp, Homo sapiens
agtatatttttagtttctaaagcctgctgtgggaagaaaaaggagcaggtgaaaggaaggcaggagaatttcagagagagagagagagagattgttttttgaggtttgcttctgagacctaaagtgccccaacattataacaaaaggctgtaacaggagctgtgggagttatgagctaggaactgtggacaaaaacatacatatatatatgtaaaataataccacaatccccatttcctgcaaactaaattctgaatttctgagtcagagattcagaagcttgtatcatccggccccgcatgaccttacctccccttgctggcatgatctctaccatctgttccagagacccttctcccagaatgttcttcctctccctcctcactttgcctgcctgttatccctttctccttggaaatcttcccaggttctgtgaactggggcgggatggaccagatcagctgttctcagctgggggccatgctacctcccaggggacatttggcaatgtctagagacatttattattgtcattttggagtgggtatgctactagcatctggcaggaagaggtcagggatgctgttcaacagcacacaaacagctcaccataacaaggcattttccagcctaaaatgacactagtttccaggttggggacccctagatactagatgaaaattctagtactagtactagtactagatggaaggtcctccttttctgattgatctctgttttcccagtacctgatacataatatatgattccgaaaatattaaatgcacaaaccccttccccctcagaatgccatctttgtgcttcttccaataccgttatatggaattcgaattacattttatgtttttacttgccagaatacaagaatcacttaaatatataatctatactttcaagacttcaagcagatttatggagttggcaacagaaaatgagaaatgagttggcttcaatgcactgttaatgttgagaaccctgagtatcgtttggagcgttaaactcatgcatgctgtgggtaaattgttaatggtcgtatttcagttttctttatctcagagcttggaa

SEQ ID NO: 106801 - DNA, 1113 bp, Homo sapiens
cttgaagatacagtggctatcttcttatatcagggacataaccacaggtgccctgctttcttttgccctgtaatgtatttcaggcaatcgattgtcaagcccctcttccgattcgtcctggcagctctcactcatcatataacccatgtcactatgccatgccctctttgagttttagcaccatgctggcagctttcatagacttttaccatcaccttcaaaccagttgaagactgatccaccaatctcatttctacttctatatattgtctcagagattacaagcaactgatttctaaaagacaaagtaaagtagggcatctgttaatatatggaggtcacttttagagaaaaacaaataaatggaatttgcctaaatgtgattaataagaatattttctcgttgtgacagttcctatgcttccttttgcccacatttttctctcagaagagtagcatgtaagaaagtggaattataagttttgacttggagttgaaggagtgtagacatctgcttcttttctgaccactctggtctgccttgattgagggagatctttgagactggctttttgctgtgcattttgattgagttttcagcagcacagtgagtatgtaaaatcatagccatgatggttgaaatttggaattggggatgtcccatttgaaagaaatgccagatcaaaaagcgctattcccaggaaggatgcatacacacgcttgtaaaattgcacacccatgagggcttcttactttcttagagctgtgaatttttctgtttttgggcatgtgaggtgctcttgctgtccagaagaggttggtgcttatactttaagtaaagtgctgattgccctgtcagtcagagcatggaggaactgggaacttctgagattgatgcttgacagaataattagaaaaccgtcactttcagtaaccatttgaggactcctaaaaggaatgggcttgggccaggtctctgctgtccaaatccagaggttaaatgttcgggaacacaaaacatagtatgtcacaagagaaaattgcttcaaatgcacagaaagagatggccctccaactcctaaacaatgatgctcaattatctgggcattcaca

SEQ ID NO: 106802 - DNA, 1317 bp, Homo sapiens
taaactcttactccatttacttaaagcaagtggttttaattaaacacagtttatacctttatcgctgcacttggcaagttttgggaagttaaagactggtggtactgctactcggaagttatctgtagaaaacagccttaagtcttttccaaacaaaatatcattttaaaatgaagttgggtcaaaattcaaataaaactccctctaaaatgaagtgtgcaatatccactcttaatgtgtgttgtatcgtgtagtcaaaagactcttaatgattgcctgggaggttggtacagaagggatttttatttttaacagtctctaaaacacaccttttaatactcattctttttggaattctaagttaatttctattcttcatcactggtgcttttaaaaaaaaaatcacaaatttcagaattaagtgtctgagggatttatttcctaaataattgagctccataatgtaatcctttacaatagtcattacaaaggatttggaatacagaaaagtacacaaataaagtcatcaagctaggtgggagaaacaccttagtccgggaggtcaaggctgtagtgggctgagatcacaccagtgtactccagcctgggcaactggagtaagaccctgtctcaaaaaaaataaataaaaataaagtcatccataattccttagctcagaaataacaactattaaaatttgacttatctacttccagtattttcttttcatttctgtataaatgcatatttttaaaaattaaagtctagatcatactgttttttccacttaataacatactgaagtcattttatgacatcattaaatatttttctgaaacaagatttttagtggccattttattttccattatatgattacacccttatacttttagtcatttccccatgtttaagatacttagctgccttcctgtctttttgctgtcaccatcatcttagatacgtttagtagtatacatttataaatggaatttgaagtatatcattatccccactccagcccgccttggagacatgggactacattgaatgtttgtttttttaaccctacacctacaagttggaagaattttattttttgctatccttccctaaaatagtcctctggtgaccatttagttaattaagattgattggcttctgtcatctgctgaacaatgcattttgctaaatgatcccaaatattaaataaaaacctattaacaagtataatagatatttagacattaacagatggcttcagagggtctgcatataattaaagtaaataaatctaagtgtaatagtgacagttgg

SEQ ID NO: 106803 - DNA, 1039 bp, Homo sapiens
cttaaattagagttgattttcggtcactgacaacacagaaagtcctgtttcacataccatgagtactattcttaaccaaaccgagaatatgcctcagcacactcttgcgtcctatggtggcccagagctcacctctgttaacacttatttttatttccttccccatacgctttataaccccttatatttgaagatttttattctcttctatttctgtttcaaaatctgtccctgaaatgcagaggactgtatccattctaaagtgactttgttacccagatgagaattaaggataatcttccagataataggtagagttcatcaatgtggtttgtaaatgcatttttctaaagatcaactccctcatggaggacttttattttccttctctccaaaagtagactacatcaagttgtgtaatttttaagtgactttctataaactttatgaaattacctcatcttgagctcagtcatcgaggtagatctaattcatttttgtccccgttaagttaccatcaactgcttcttttcacaagagatttctttcctattactgctcttcgtgcatttaatcactcttagcgctttctttccgcctcttgatttataagtgttttgctgtgattcagtctcctgtctattcttgctacagagtacaaccttcatttgttatctgtgttccttgtgctgtctggggaaaaggacagtggtcagatctttcagtatttgacaaacatcgtgataatagagtgtttcaagatggagatgttgaatcaactttgatgtttggtcaagaaaattgattcataatgatatgtgacataaggtctttgctgagtttttcctcggtatgtatgaggaatgaaaaaaccactgctttttttaaaaatagaatttaatgttttcttttgttgttttttttttttactttgatggctctttgtacaagctccttttacagattactctgtggtcagagaatcagcatgtgactttttctagatattggataaatagtctttatgtcaactaccatt

SEQ ID NO: 106804 - DNA, 1213 bp, Homo sapiens
atttgtctgtgaaggcttactaatcagaatgtcagccatggactgtcagtgttgacaacaatttttaagctgttagaaatgcacagtctgtgttttcatgggatctccaggtgattgctgtgcacgttagagtttgaaaagccctggtctaaagtagggacagacaaactacagtccatggccaagtcctggccaatgcctgtttttgtaaataaagttgtaccggaatacagctgtgctcattcactttcttaaggagttaagaagttgtgaccaagaagtcctggtccacgtggtctagagcagtaatgctcgaaagtgtgtggttggacccatgccagtttatgtaccagtgcctgtttgtgagctgttttaggtttgtgataagtacagatactgagaataagcatttagaaacttgtattgctaattacccttgccatgacatgcaagaggaatatcaattttttagtaatttgcattattacattttataataatacaagtcaatgagttagggaattatttttaaaaattcattcatcatcacagattatgtaagaagcagcactctatgagtgtagatgatatgtttgtaaaaaaaacagtgtcataagtgaatgtgattgtacatcttgatgccaaagtgaacttccttatgggctgcggtaatcacattgtcctattctttgctcaccctgcttttccatgaatcttcctcttgtctctttggggatacttccttgaccttggtgatgctgtaaaatgtgatgccttctttctctctgtatgtcttcacttggatcctgtcttccctagctactgctcacagagtaagctttcgcccaggccaggccaattgctttactgcatccctgccattgtaggttactttcagggatggtctctggccacaagtccctcaagctagttagaaccttccccaggggttttctgtggaagctcatgaaagaggccacctacctctgggatcatgaaagaaaataatgtggcccaggaggctacattccctagtagctggtgaaagcctgtgtaagctccaggagcaaagctcctgccatgctatgatggaggctcctgccatcatagggcttagttcctctagcctaggtttccatgactccatggttttcaaaagtgtggttggactagcagcatcagcatcatctggtaatctgtgagaaatgcagat

SEQ ID NO: 106805 - DNA, 1034 bp, Homo sapiens
aaagggggcttgaaaatgccaggtgtttgttatttctgatagatttgtccaagcagacctctctgatagttgaccttagagaaagaaatgtcatcgccgttccatgatttggagttggagtttgtgggtaatgacatgaatgctatcaatgaaagaatctgcccctcggagttgtcctcctttctcttgtcttgacctaccaaagtgttctgagcaatgttgcttgctttattacagattttttttttttaagttttgtccacttaaatagtttacgcagcaactttaccctaatttgggtggcaactctctcgcaattagaggtcctttctgaatatcaatggatatttcatctgcatacccaggaacctctcctgagaatgcttcatttccacctttgaggtcttctgaaatggagcactgcaaacacacatattagcattcccaagggccatctggtacaaatccgagttaattatttttcttccagcttatctgtgggttttttcattaattgttatctctaagtattctggacacatccttttttctcaattagaactcaatagaaagtttttgagcaaacgtttaggtgtctgctctaatactgaaaggcctgaagatcgtaaacagcaagcagaaaatccatttggagctttaacccttgaccttctaggtttcacttgctcgttaatcccaagtagcacatttctctgagagggagacaaaagtgacttagaatcttccgtgtgtcattatgatccaagagtcttggcatttgggtagcaggtgtgagagaaaacaccaaaatcacctcatatttagatgatttctgatattttctgtgttttataacctgtgatcagtagttgcatttcatgagtggagccttcttctccattaagctgaacgaccaaatagttaatccaaatgctgacagtgctgaccaaattccaaagaatagatatttggtattcaaataagaagggtgaatgaagctaaagtaaaaaaatacaaaagtatagaaacatgaa

SEQ ID NO: 106806 - DNA, 1618 bp, Homo sapiens
ggtagataaaggtatgtgggagttattttatttttctcatgctatatcaggaaaatgaatgcacagctcatctcacagtactttttccaaatcttgaaatttcaaaaccagttaaaaaacatagaaatgtaatgagtattttcaatcctggcttcgtttcacaaaatttagagaacagaacctaaaaaatagtatagatgagttgatgtgattttgcaagcaaactggctgtagttttggcagtaattatttcgtgtccacctgcccaaaagtagaggttcctgagagcccaaagctaattatttcaaaggtgtcaattgtcttgttagatgtaaggattagttagttgaatacacagaaagtcaaaattacagaacaccagtttttgttaaacttttatcaactgatatttacaactgcttatttgcagtgtgtctaagataattctgtttagtaaacacgtcattcaataaaattattacaggttgacatatatttccactcatgatgtcagtcatagagctgaaaattttagttattttgcttgactgttaacccaaatgctgattttcacttggacctaacacaagtatctctacaactaatacgtttcttattattttatcatatatatgaaatgaagttcctctaccaagctgaataaaacaagagtctttttcaagataaactcacttactgaactgaattcatataaagtatatcattaaatattttataattctcttattttccagctgagcttgagatgagagaaaagtaatagagtttgttctgctggtggtcttcatcattttgatttaaagaattctaagcattagtattctttaaatcataaagagcaaaaatgtataaaataggaaatagaagtagggttttgtggttttctgttaagaatttaaagacatttaaaagaaaagcactatatagaatgttaaccttgggtttttgttttccaaattatactctggtttgtattttaattctgaacttagaattccaaaggtgtagcaaatgtaacatctggaatatgttgtgttcacttacacaaaacacctagtgttcacttacacgaaacatcttgtgaagtgaatacaaggaaaggacacttggcacgaatctctccatgaccccaactctgttggccaaagataagcaaatcttttgctctctggaggcctagttttgaaaagcaaaagtacacgattggcattagtaaaggcacctcattggatttgattgtacttcctggtttagatccaactttgaatcatattttctaagcccttgaaatatctaggaagaaatgtgctacctaagcaccaaagacaagttgaagaatggaagggactcttagtgggattcttatgccagactgcctgggttccagtcttgtctttaccagttactggttgtgggaccttgggcatgctatttaacttctgtgtgccttggtatcctcgtttataaagtggtaataatagcagtacttacctcagagggttgttttattacacatattgagacacacacgcacacttttcatttagagggaaaataatttcatatgacagtatcatttaaaaaatttaataaactt

SEQ ID NO: 106807 - DNA, 1035 bp, Homo sapiens
cacatttcaaattgttttaagattctgtgtaaaccatttttattttagttactccaaatttaattagtcacagtcataggcttttctagggaattggagggtcagaaaaatgaaaggtactttaccttgtgagtttctgctgtgttctggagttttttttttctctctcaaggaaagtaattttatataattaagcttaagaagcaaaataagtgcaattgatcaataaaacttagctctggaaaacaagacttttgatattaaaactctctacctactttcttaagaaaggctcctaagatgttggcacattttggttccagttttaacggttgggttgctggtgagcattgcttatattaatttgaaagaggaacaaggggataagaatattgtttttgtgcagtcatttgttcatttgtttctaagtttatccaggtaacattatgtaaacatgtatgactgtactaagtgtaaaaaagtataaaatcccactgaagttgggaagcctgtggttcaatcccacagatgccacattcaaaggaccatattctcagcaaacaaaacattgagaattccattctttactcctgtctcttaaagtatattaaaaagaatgtaattcataggtcctagcaacttccaatagcttgtttctctgcctcctgattctcttaagcttacactttgcagaacctaaaacttccttttttactactggcccaaatcggttacttacttaaacctttccttctttctgtttttcagattgatttaacttcccaatacatcctgttcctcattcctaagtcttttttgtttcattgtttgcatatacatgtcctgattctttatcctaaaagtctatgaactaatctggtttaatggaattccaaacaggatataaattggcctggcaatgacagagttctctcttggcaatatgggggagggaaaatgtttatggaccatttcatgttgctaaatgtagcctgtcttgtgtcccatttgcatttcacagtgaatggtgctggg

SEQ ID NO: 106808 - DNA, 1005 bp, Homo sapiens
tacctgggcatggtggcacatgcctgtagtcccagctgcttgggagactgaggcaggagaatcgcttgaacctgggaggtggaggttatagtgagccgagattgcgccactgcactccagcctgggcagcagagtgagactctgtctccgaaataaataaataaataaataaataaacaaacaaacaaacattatgatgacatggcatcacagaacactaatttctacactaagagagataataaaaggggtcagatacccagataccaataatgccaccctctccactgcagtctctccctgattgtatgtataggagatctgtaaatcaaggaaagtgccctgtagtctgtctcctattatggaatgagttttgctgggtccaggagatttccaccagctccagaaactagagacaattgtgctaataatgcctggcatcctggctttgtgactgaccagtcttggtcttttcgtgtcttataacttgaatctgaagcaccataagatggtcctgcacgaatcaagggcatggcccttgttttaaggattgttattgccattttttccaattaaaaaaccaaggcccagagaagaactaggttattttatcaaggttacagagttagtaatgtatgctggaaattgctaaaagtatatattttaagtgctctcccacaccaaaaagaaaaaccaaaaactatatgagaagatggatgtgttaatttgcttcagtgtagtaatcatttcactgtgtttaattatttcactgtgttatatgtatatcaaaacatgatgttgtatgctttaaatacacagttgtccctcaatatatgcagggaatcggttccaggaatctcagatataccaaacttcgttcatattgcacaattcctgcagttggccttgcagaacccatgtatgtgaaaagtcgaccctctggggctttacatcttgagaataaaaatccagctataagtggaccctcacagttcaaacccatgt

SEQ ID NO: 106809 - DNA, 1010 bp, Homo sapiens
atttgtacaacaagtgatgccgtgttgagtgaagaacaagggccttgataacatctatgctgctaagtcacccatagggaatttttgacacggagaaagaactgcagtccaagagctcttttttcctatgtgattaataatctgattcaaaaaatataatttgacactactaactgcaatgtagtttagtgactcttagctaggattataatggttgctaatgacagaaagttatattagctttgtttttgttaaaaagttatattcctgtaacagggaagtctaaggtgtggactggcttaaggcctgaagagaatcagggatttgctggttctccagccctgcttgcctccaaattggcttctttctcagccaggctctcagaagctggcagcaaagatggctcccagtgctccataactctccctcagcagccccataaatcccttcaaatgattctcattgaccctgcttgggtcacatgtctatgcccatgccagccactgagcaagaatcatatggtataggagacatacagtttcttaatggaagaagggacactgagtcaaaacatgcctaccagaaagatgcaaccttattgaaacaaaaataaactgttacttagtcaatagaaattaatcgttattttccttgtttgtccaaatgcagtgccaattcattcattaattctgcagccaagcaagaagcaatgttttatcattatttatttatttatctacctgcgcattcatgtattcattcattcattttgctagccactgtgaaatttcatgtcatatttcttctcaccttcagccagctctatctgtacacagactcctttttctgatgtctttaaagcaagttgtactccatgggaagggtgggcattttgtcccccagggaacatttttagtcatcacaacttggaggctatgctactggcgtggataatgctaaactacaacgcacaggatggtccctgttcacagagaacgacctcacccaat

SEQ ID NO: 106810 - DNA, 1144 bp, Homo sapiens
ggtcttttttttttttttcaatcttttcaatcaaataagtggtagaaatgatgtctagctcatagagtgttgtgaaaataagatgaaatcatatatgagtatgcatgcagtgtcagatacaaaataggctagtccctaacattcataaaatgaaattcctcttctcaggtagtctcagagtagcccaggaatagtatagatttcagacgagaacaagcaaagattttatgtttaggaagccattgaagataatatatttcatgatttatacagatgaccatccgatagaaatctgtgcttgctcatttataaacaagctacctttattcataaatattttttttaaagttgctatggctatcaaattgtgtgtattttataaagctaagaaaggaaggggaagaagctgtttcttgagcttatatgccagacactgtgataagcttatacctatattctttcatattgtttaccacaaccctgaaaaattaggagttgttatccccattttatagaggattgagaaaccattgtgactgtcccaggggctagtcagaagttacaaaagctgggatttgaacccatgtccctctgagtccagcgtgcatattgattctgatactccagactcaactgcagctacctgccttttctactttctcccatttaaactacttatttgctttcacgtacatgacctagaagtagtctccagtttggcagggaataccagtcagaattcatgttgacaattaaatccaagaaatgaaggagaaggtttaacaaaagttcttaaaggtcatatattgctttttcaactagtatacacaagcagcctggttgctttgcatgaagaaaaatggaaatgtagctgtagctatggagtgggataaaaatggctgcaatacattttttattcaaccctttgggaagcagtcacgagctgtgttctcgcttcagggaacaggggtatgggaaccttttcttagactgtgtttataaaacgtcatgagtctgaagtttgatttttaattattaagagaatggaagagtcttgagatttttttttaagggaatcatcataaaacattatatacagttcattaaaacataagtcttatgtgatatttttaagagcaaaatt

SEQ ID NO: 106811 - DNA, 1100 bp, Homo sapiens
gctcacaagataccagcttgctgtgtcataggcagtggagaaatgttggttgaaaagaatgaatgaatgaatgagtgaatttcaagcagaggtgagaaaaatgaagtcagggcataacagggcaaccttggatattcttgccctttgtggttaatgcctttgggacaagctattttcagtttgaacttgtgctgttcagtaactacactattaagcactttcatcttcctgttttgcaacaattttcattagacactcagtaattgttgtttcacagattatgggttggattgatgaatataataactgttttatttcagcacaataaggaaaacctagtcattataaactctcaaaatcatgtttaccttttacttaaatggagcttgtttgtattaatgattgtaatttatattgcagcataactctgctaatagagacatgataatttacaaaaagattaacaacgttttaggccgtactgaaaatattttcttttcttgataatggtctcttctggtgtctagaggagagctgagcaattccttttaatgaatagcagtggaaattaaaataattatgcttttctgtttttcccttcagaaaacctaactgaaaataaagacataacttgctatttttaaggtttcattaatccagcaaaataaattttcttttactgctttggtgtaattctatttcacttgatcacatttaggctgcagatcaaattacgaagctgtataatctcttcctgaaaattgatgctactcaggtggaagtgaatccctttggtgaaactccagaaggacaaggtaaaaaaaaaaaagaattgagaaaacaaatgaatgtattataattatttatgcaaactataaattgcacaaaagactgtagcagcagctttgcataaatttctttcagtaatttaatttctgccatagtttgaaatgctcccatgatgcagttgaacatttcagcacttaggtttgtttgtagccaaatgccaagcctctaaggaagctactgcttgttttacttaaaaacattcaggcttggtgtggtggctcatgcctgtaatcccagcactttgggaggac

SEQ ID NO: 106812 - DNA, 1081 bp, Homo sapiens
gactagcaaagagatgccaggaaagtgatctgttgaaaggaagatcctggaagattcctgaatatgtgctacagtggttggtttcacctcctgagaatgaggataccagctacattagccattcatttgatgtttattaaggggcttctcctgtagcagtggtggtcaccaagagcccgttttccatacagccactgtggtctagctgcactgtctggcagtcagctccagagttgcacagtgaccctgtctgcctcctccatatcactttggacatctgtatatttctcttatttatttgcagtcacctttgctagatcctaatctttaccacggcagggactttgtccatcctactcactgctgtgttgccagcagctggcaaagtgcttggcatctatttttattgcccaagaaacatttgtcatgtgcatgactaggtgaaacaacacttctaggtgtccactttgaagaagttcctagaggctcagcaataggtggcttttcatggcagataaataaatctggagtgggcaaaatctgctgaccacatatttaaaagctcaggaggtgaacataatagagagttctagagaagttaataacagtataatgtacatcacaagatactgccccctcactacatattatacgagaaaattaagagttatttacagctcttaaatggcttattcttgttttcctggtacctgaaacactctaggttttaaatgagttacctatggaaggaagacgaatatgtgagaactgagggataagtaagtggccatattgtcagtatacctttgaattaatttatcgaggaaaggaaataaaatgttttaatttgtttttttcttttttcactgctaactccatgaaaggctttaaatcttcattttctcagcagcttggaatgagcactgatagggtgctgctcagtctgctgtgccttggggaaaagagacaatgaaaaataaccattgttcctcaggggctcacagaccggtagatatctgcctgctggctgagaggatacaggaagagggacggataaaggaatgtgaaggagagagtgggg

SEQ ID NO: 106813 - DNA, 1001 bp, Homo sapiens
gcatgccaccatgaagaattatatagtttttggaagggcttttttatagatggtctgctaattaaaacataccctacaggcatctgcggtagccctgctcagagatctctggatagatgccacactttaattactcatttgcaaataaatactaagcattttcttttgaggttgtaaatcttctcagttgactgtctgaattttgtttatttgatttatttttactaggagcaaattgacatttttgaaggaataaaggacagccaagctcagcggatggccgaaaatctaggcttcgttgggcctttgaaaagccaggtatataagccattgggggatggtgtgtctgacttgtttcagaaaacatttgggaacttgcttcattgcctctagtgtttgtgattaccaggaaacaggattatttattgttttataattttttcctccagctgtttatgatgaagaaaaatatttccctgatgttttaaaagaggatgtttatgatgtgtctttgaatgtgttttggtatgtgtgtgcatgtgtattgcatgtggacacatacacttcatgatagatggtaatctctattttttctgtagcattgctggtacttagccacctggcaggcatgtgatacagctcattcgaactttagtttcatcatctataaaatgggaatgatgacaactcccgagaggcttattgtggggattcagtagaataatgtgtaaaagtccttattgtactgctccataaaggtctgttcttaatggtattaatattaataatacatgttatttagctaattgctattctttcatagctaatgggcatttgaaatgaatattgatggcataaacttgatattttattgagaacagcttaaaatatgccaattttgtaataatatcccttggcttcaaagaccaaaacattggcctcagagctgttgagggacagaatctgtcttagtatcgtcccctgctctgcctttgttccag

SEQ ID NO: 106814 - DNA, 1039 bp, Homo sapiens
tgatctttaccctcttcctttccctctcattgttcaatatctccccagttttccactgtcggatcttcagtcaacccttatctgaatctggtgtgcatttcagcattctctctttactatgactgtaacttttttgggtgaagaggtcacaaagcatcttttgtttcatttattcattcatgaactcacttttattttgctctcagtgagcctctagtacagtgctaaacacgcagcacataagcagaaagactcatggattttgtgagggtgaaggtgaaccctttgcagtgtagacatgaggctctgtgtaaggactctcatttaaatgattttcaacaaacattcattttctgcttgttttctctttctcttagccctaatgttgtgggacagctggctaaacagatgattgggtacaatctagcgacaaaacaaactccaaaagaaggtgtgaaagttaacaaggtaatatggatactttgggtcattttctatatatgtgttaaaaaatagaaaagaaaaccatccttcagtttttgacagaatctaatgaagtactgctctttggcagtgtgccattttattttttaaagctcatctaatctgtttagtaagtagtatgtcttggaggagaaataaaaagggctctatgatagtaatattatttattatcattagcatttagcaaaaagtgggtgagggtgagtgaccgagcaatggctttccctctgagaacacagatgcattctatttagttgagaagcgcttgctgtgacagccttatactcagtgagggacattcgctgctcccacacagtggccctcaaccccaggcgtgtctgtcagaattacctattgtggttgtttttctaaatgccccattccttattttaggatgactgtaattttgagccatttttattgctgggggtatattgcattaggaaggtcagctgaagtacccaagtatgtatagcatgtggacacacacccctcatccacacatagaaaataaagcccagaggaaagtggcctg

SEQ ID NO: 106815 - DNA, 1893 bp, Homo sapiens
ctacatgaaaagagcaagattgtatcttttactgagaatagtaagatgttacaactgaattgggtttttctagagataatttttatttacctttaaaaattttatcaccaacaaaatgtgtattaacggttatgaaagcagtaagtaagattagtgacaagatcagaggagtagcctaatttatattacagattttaatgtggcccataatatagtaataaatatacaatatttttaagcatatggcaaatatgaaaaaactgtgatttaataaactttaatttaggaatttttatagggactaaaattaaaattattccgtcgaaagcataaatacattttttgttaagatattatcatttttaaataatcaaactcttcaaaatggctttatcatgcccccacagtatccaaagaaaggattttttttcataatagggaatcatattcaaagggaagttttagatttaaaacttacatgaaagccttatcagtcaagaatttcttgatttgaaataatatctccctggataacttcctatttgtatcataaaatccttgtcctggagatggttctatttctgtcttgtacttatacttgaaagtggctgttttagacatacacgattcaaatctctgatgggcagcagtctactggagagccatgtatctccagtctcattcagtcaaatgatgtgaccaatggtgaaatggtttattctaatgtgctgtgtgtttgaaactctctgtcccaaatttgaaaagtccatgtcagacatgttgaaagctgaaataattatttcagtctcaaagatgccttttgacatatggagaattattacagtatcatcttattcccattgacccagttacaacttgaggaaatatgtgtcattctataggtgatatcatagtaatgattgaagattggtaactctctatttttatgtttgggttctgaagtcgtaacgcaaacatagaagtgagctcatttcctttgagaaattggcaccaaggcctctaacttatctctatataattgtatattctttattaaagttcatctttacacaataccttttgactcttctcttgccttccactttgccttctccttgccttctggtaataggtaaatctgaaattctgaaatacaatttaactttctcaattaggaattctatcaactctcagggaaggtgattgccatgctacatattacacgatgcagttgtgctgagaactggatattccaattttgctccagtcagtgaaccacagaaatcagtttctgcaagtccaatattattgactccaaatagatgatcattgtagtagtcatctcattgcagtatcagtgatacatttagcatttaggaaagtattataatttagaaaagagcaatgctgaataaaaaccagctcagtaacacaaatagttgactcatcactgaactgtttttaaaaaatagttgaaaataacttacttttgtcaatatatttgattaacatttcagacatttactatgattcctattatggctctgaaatatgtcttgtgagcattactttgtgtaaatatgttttcagaaagccatctctaagaaaattaagtgaaccacattttacaaagcttgcttaattaaaaatgtgtattctatttagattatgcttttcttaatgatttgatttttttccctttagacctactgcttccaagaatgtttattatctagcatgtgactattggggatctataaaaattgctataaaactgcattataattagaataacacttgtggtaaagaatgaaaagaaaatatttgtaaaagcattgttataattcagctgatagactaaaaaaagaccacagagtaaggttttgcttagac

SEQ ID NO: 106816 - DNA, 1118 bp, Homo sapiens
agatggcaagattagggattgtcagccttcagtacctgatctcgatgccctgggcagcaagataacattcatatccacttcttggttgggatgggagatgtcatagaaaaagcatgggctgtcttactgtctgttgaattctggtgtttttaacaattaattgatgacaataatttctaaattatgtgattagtgggtggattagaagtaatacacatacaaagcattcagtatatttcttatcacctaacaggtgttcagacaacagttgcattttttaaagaaagatgatgagactgctgaaatagcttacaaatgatttggggccaaatcagataatttaaggtataaaacacacagtagtttacatttatcagtcacttgaaatgttgccagacattgtgcaaagtctttacatagattgcatccttgaattctcccaataaaccatgagatatttattgttatactctgttttgcagatgaagaaactgaggtttatggaggttaagtgacttatccagttttacacagctaagtagaaagagttgaactggaatggcaatccacaaaatctaatgctagactactgaactcaaatccacgttctcgtattcctatgttatagacatccatgtctgcagtaacagtgttgcagagaagttaagaccagccagtattgcctttactttgcagaattgctctctgacttttgtacctcatcaattcagactactgtctttttttacatgcataataaaagtactacatgaatacaccaatagagtgggccttgttttattataatttggtatattaagtcacaaaaatgtttggttaaatagacagtaaaaggaattgtccttgaagccattaatacatgtgagatacgtgatgggcacagcctttcatatagcttgaaaggaaaggtttttgttttgctattattgggtcattgtgttttccccattttttcttttttcttttttttttttttttttttgagatggagttttgctctgttgcccaggctggagtgcaagtgttttctccattttaattgacagtcagtttccccagaagccatcatcaggagttctggtcatatttgatactgg

SEQ ID NO: 106817 - DNA, 1151 bp, Homo sapiens
cctccctatgtacatttacatacataaacatgcatctgcaaccatttatttgtctacctgtgttaccaaaaatattgggtttatattgatacttccaatttcattcctaaatctcagggttctttctagcctcctacctttccatatttggaagttcctccaacagcaagaaacttgctctcatcctctatatattatttccttaatttactgttattaatcagtgtgatcagtttcccagctgttctgtctcttctgcccacaacccccgtgctctccaacatcttcagttttggggtgctgtcagatatgctactaccgtgtctttgtgaggaagctccccaacatccctcagtgcctgggtacttgatctccagtatgcatgctgccagtatcttcacaacacttcttctacccctcagcacttgtcctcacgtactaggggacctgtcactttttcactgaatatatggctacctggaataaattatttcccaacctcccttgtaactagttgtgggcgtgtgattttattatggctactggtagccagtatgaccatgaagtggaagccatatgttgacgaactgtgatcattatgaaattgcaactccagccctataactcaccttgggacttcatgtgagagaaacagaaacttctctctcttatgtaaagttttcaacgtattattttaattttttggtcccttaacagccaaaccgaattataactaatattgccccttctagacaagaaggaaatgaaaataattctgaattcagtcaggcagtaaagaaattcataaaggagtgtagcaccaaatttattgaggttacagtgaggggtttgaatttaaatctccctaaatcaagtgacacaatttatagaagtttgtaagaattacagctgagtgtaaagaattctattgcatgacatcaaggttctcaggcaattagaaagcaactgaaattcctaacaacaacaacaacactccaacaaaacaacattcacatggttaagtaaatgtaatagctttagccttacagagggtagctgacttctctctgccaaaatcagacagaatttggtaaaaacatgtagtagcacatcctgagggaaccccgggatgccatctttgagatcactct

SEQ ID NO: 106818 - DNA, 2057 bp, Homo sapiens
tggggattaggacttcaacaactgaattttcagaggtcctgagacacagttcaactcctaacatggacttagagtttttcttccttgtagccattatatagatatattttaaagatttaattttttagagaagttttaggttcataacaaaattgagaggaaggtacagagttcccatatacccctcccccgacaactgcacagcctcccccaataccaacatcccccaccagcatggtacattcattacgattgatgaacctacattgacacatcatcaggccaagttcataatttacattagggtttactcttggtgttgtacattctatgggtttggacaaatgtctaattatatatatttgtccttatagcattatacagagtagttttattgccctgaaaattctctgtgaaaaattctctgccattataatttttattggtaaaaattttgatgtcagtttcacaaagtttcacctctgataattttatttttttctttacagtaaacatatagatggtagtctggctctgtcctcaccaatatttcatcttgcattgaaatccgaattggagtcccctccctgtatggagggaggaatttggtgggaggtgattggatcatggcggtggtttcccctatgctgttctcatgatggtgagtgagttctcacaagatctgatggttttaaagtgtggcacttccttgtgctatctctctctcctgctaccttgtgaagaaggtatttgcttctccttcaccttctgccatgattgtaagtttcctgagacctccccagccatgcggaacagtgagtcagttaaacctctttcctttataaattacccagtctcaggtagtatatttatagcattgtgaaaacagactaatacaggtagttttcttactcgttcatactacaatcgaaaaagacctctgacctcttactctaccttctcatggttccttctgccacccttgtgcacgtatgttagctgtagaagggatttgtcataaaataaaaaataatgagatttagtcatgttttcagcaacgtagttaaggtattctttagagtaaatctattaatacattgtgatattatttgctcccacataaaaacttgatagttttaagagttgaaacctatatgaaagactaataaaatcaaggatttttattttttgtcacactgcttatcttgaatagggtcttgatatgtttcattttttattttttaacctcccagctgatgattttaataaaatagggcccttgggaattaacaaaattataccatatggtaagggtaaaaggatcattgatctggttaacaaaccagcctgagtttccaggggagcgaccctttctccagccctcctcagccttggacagttacattattgcttaacaatcatcatctgcttttagtggaactgcttatttttctccttggcttgggcagattgccccagtgtttcagatactgccttttggaaacggatcagtaggaaatttctattaccggaaatcatctgtttctgaaggagacaaactattcttttcaactcaactcactcttgtgaaacagaaagcccagcactttctcacagctgctctaagacagtccagcagggtaagaacagtgaggaatcaaatgtactacaagccaggtgggaccatagtccaccacggccaagcaagaaactggaatatccatgccacaaatgtggaaagtggggcatcttctttctagagagctaccgaggctgttcaaatttcaattttctctgtggcatgtaaaccgtatttttttttttttttttggtgtcaaagaatagaaaattagttttaattgtttcttatgaggcaccatatggctactctataattttggctttccatggagctgcatgtgcatatggaaaatgaaattaattggaaatcacaccctgaaatctattattaagttaatatagctaacagcttgtggggtgtcctcacactcagcatgatgtaattgcacataataataagtaactataaactcata

SEQ ID NO: 106819 - DNA, 1012 bp, Homo sapiens
ggttatacagttggggtaagactgaaataataaaataactacttttcacatagatatttccaaggcaccctgtagtgctacagtacattgatttaaaagaagactatattgtatttagtagagtttttattactaactctatataaatcaggaactatatagagtatatgtgactaaatcaaatagtttatgaaattatttgtgtggaatgacctttctcccctagacataatcctagtgaaatcaaggaacctgttttatttgcttccttatactcagcacctagtgcagtgaccagcacgtagcacatatttaatgtgtttccctgtcaaaatactatttaagttaagacttgattgagtctgttaggtaccagagtcactcactcattactttaatttcaaatgctacagtttgaaaacttaatgtatgcttggttgttaaaaaaaaaaaagcagtgggaagaatagaagttgtgttagaatacaaggtacattttattttcaccagaaaggaaaaatattgttctaagattataaatagcacgaaaggcttattttaattattttaaaaatatgatacctttccactgcagtacctggatttcaagctctgactcaggggtgtccagtcttttggcttccttgggccatagtggaagaagaattgtcttgggccacatataaaacacactaacaatagatagctcatgaactaaaaagaaaaaagtgcaaaaaaatctcataatgttttaagaaagttttcaaatttgtattgggccacatttaaagctgtcctgagctgcatgtggcctgtgggccacagattggacaagcttgctaactgttttgtatagaatctgaaacacagatgattaagacagggatgcatagtacctgcaggagaggattttatttagtaactcatgtccattttggtgaatgtagagtttatacctgtggcgttttgtttctaactagtttcactaatacagtttgccatgctgacatat

SEQ ID NO: 106820 - DNA, 1031 bp, Homo sapiens
catcctccaataagattccttatgccctttactgttaatcccattactcctgccagccccagcaaccattaatctgcattgtgtccctatagatttgtcttttctttaaatggaatgctacagcatgtggtctcttgtgtcgagcttccttcacttagtatcatatttttgaggttacttcatattgttgaatgtattaatagtttgttctttgtgttaccgaagagtattccattgtatagatacagcacattttgtccatttaccaattggtagatatttatgttgatttgaatttttggctatcacgattaatgctgctatgaacacttatgtccaagtctttatgtggaatgtatttttatttctcttgggtgctgtgatagacagaattctggccccaagacttttacccctagttttgtgcccttgaatatgtggtattacatggcaaaaaggactttgcagatgtagttgaggttactatgcagttgaccttaagatcaggagattatcctggattaactagatggacccagtatgatcacataagcccttaaaagcacaagaggaagtagaggaagtcagaagagaagtttagagaggtatagcagaaatcaaagacatttgaagcctgagaaggatttgatgtaccattgttggcttcaagatgagggccttgtgtcaaggaactggatacctcagtcttgtagctgcaaggaactgaattctgccactaactagtaaggtgggaagaagtctctaagctgcaaataagaatcatagttccagccagtagcttgattttagcttggtgagactctaaacagaaaatccagttacatcctgccagacttctgacctgcaaacactgtgagacaataaatgagcattgttttaagcctttacatttgtaataatctgccacgacagcaaaagtaaactaaaacaggtagatccccagcagtgaaattgctagatcttatggtaaattaagactttgagaaactgcagtggttttgagctcaagg

SEQ ID NO: 106821 - DNA, 1008 bp, Homo sapiens
agtgataatgccaggcaaacagagccgagtgtcaccagttctgtctcagcctctcagtcaccgagggaagctaggagacgtaatcatttttagctcagttccccattctgtaaaatgagttttatgacattttcttccctagttcactggaatagcattagaaaaatgaatggatgtggtgactgtttattggatgacatttgctgaatgtggctttttggtgttcaagactggatacattaataacagttttaattgttatctataacatggctgtctgatagtgatgatgatgatgaggaggagcaggaggaggatagtcgtggtggtgatgggtgaacagtaacagtaaatgggaggcagcttagggtactgactaagcccataggagtcagactatcttggttgagatccctttcatgtcaattactacttgtgtgaccttgaacaagttacttaaatctctgaacatagtaaatgtcacatttggaattggaacctccacctgtcccagtctgtgttcctaaccaccatactgtgctgctttaagccaaaagcaacgaactttggtctagagcatttcaaaaggtcatccaacagaacatataaaaatagaagaagccagcaacatccttaatcttctttatttagaatacttactttacttacttttaaaaaataccccataggatcatgaacatcagaccaattgggaagggtagattaattgactgcctaaggactgaaattggcacattagactctgctacaaaacttacctgtttctgatctctcgaaatcaatgaatctcattattattcatagctcttcctttaaaaaaaatgaaacacatcatttgcaaaaagaaaattttgtcccatgcagtctaggttgttccaggagcttactgagaaactacaacagccctctgaggttaactggtactattcactgaactctcaagtttctgccttgtgaatctggtggtgggaaatttggctgtagtaa

SEQ ID NO: 106822 - DNA, 1055 bp, Homo sapiens
ccatacaccatatgttcaaaatataaaatttcataaatgcatatataaatcaaggtaatgctgtatcaagtagactaaagtatatcccaaattgaataaaatgtcttgccctgacaaacataccttcagagtgacctgtaaggcctggcttccattttgcattcccggactttgtggagtttagtgcaggaacatgtagcacagggattagggattacctccccctagcctgtggttcctctttccgcccccagcttcactgtgcgttgtgaggtgcctcatgagtatgtgtgttcaggtccatccacctctcctgcacacagccaccccttgagcataggagtataattagaggacagcagatgcttcccttggaaggccccatcttgaaaagaggcccacaatgggccatttcggtagacttctggggaatgtgcatggcaggggatatataggctctggacaatcccttaggccttgaggacttatcacctcattccatggttaagtctaattatgaggccagtagtggggtatccaagatacaagttggattccattggattgtttggccacttcaatcacattattagtcagtttaatgaaaagcagtttgttccttcatttagcaggtattatgtacaggtacttggtgctggagatataactggagtaaggcatctcttgggagcggcttcgaattctagtgagagaagacagaaaaccatgtaaagacttacaatataatgttctcaagttagcaatgctatgaataatataaaagagggtagtgagatagtgatggaaaaataagggtgggaccaagggtcggagaagtcttccctgtggaaatgacattgtgatgcaagatgtgaatgctcaacagctgcaagaagatctaagggaagggcattccaagtgggtggatcacataggtgatggccaggtacttggtgacttcaagggacagaaagatgatcatggaggcatggcatcagggagtggaaggagatggggttagagggatgggcagggtcttagaggtcaccagagcc

SEQ ID NO: 106823 - DNA, 1126 bp, Homo sapiens
tgtaccacgtgcctctcatcctcctcggacttgtgggctaggtgtgggtatagttttcacaaggaagtggctggaatgcaagagagcaagcccaactgcaagtatgtttcaagctccttgttgcatcacatctgctaatatcccattgttggaatccaaagacaaggggtcagggcctctagtgggaagaactgcatagtcacttggaaaatggcatggatccagggagagatgaggaattggggctagtgatttctgcaatgacctgatcttatctatcttataaaaagttcaccatagtcgggggtgaccaactgctcttgattgctcaaaaatgaggagttccctgaacatgggactttcagtgctaaagctgagaaagcctaaggcaaaccaggatgagtcggtcaccctgtggactgtcctgtggtaaatagattaatggggctgcaggagaagtgagaaagagatcagctgtcattatggtcttccaagtgagagaagatggtggtgtgaatgagaggtttacacgggagatgtggtggagctgatgtctttgagatgtgttttggatggacagctcgggacttgttgatgtttgggatggggtagttgaagaaaggcattggggatgtgttagaccgattgaatatgctatttgctggatatacaattgaatgtgttatatgtgttagaccaattgaatatgcaaatattctatagggtaggataacaacttttagttgttaggcattggggatgtgttagaccaattaaatatgctatttgctggatacacaattgaatgtgctatatgtgttagaccaattgaatatgcaaatatcctatagggtagaataacaacttttagttattattgcgagaatataataacaagccactatttgcaaatacattatatattatagacatgtaatgtggtatctatctttaaaaccatgttaaagaaatcgatggaataaatgtggaggttgacgtatatccacctggacctatagtaatgtacacaaattgtatcagaagaatggttgtcactaacaaaggtcattttcctaatagccttcattggctacctaggctcaccatagtggtttgcttctatagt

SEQ ID NO: 106824 - DNA, 1068 bp, Homo sapiens
ggaagaggcaaaaactactttccctttctgactcattattaaatataatacatttaacaaacagagtttttttctgacccagaatagaaaccttgtccttaactttctttctttctcctggctctcatgaaaattatctttcaaaatgattggcaggaagttggcaattctagctttaaacagagaagtaataactgtgatcatcttactgtttgtatgtaaagctagttacttgtgttgaggggaagagagaggtgttttccgatggaagtgtagaaggctgctttctgagatagatcctatagacaacccgtcaagggatactactttaaataaaccaaaccactccttgccttttaggtcaggaaacttgtgggtacccacccagagttcatcaaactaaggaggttggatgttcatcaaccaagcctgtgagaatgatgtatacaccagaatgccaatggcacatttacaaaatggaatgattttctcatgactagaatgttcagatctgccatcctgatgtcttaggagacacattcatcttgttttacctttatgcaattcttttccttttcaagacaaagagcacatttcaacaaaaccttagactttcatttacttatgctctcatcaaatattgatctggtgtgtgtgctaggtggtagaaaatacaatggctgaaatgttttgaaaactcagtgtatctgtaataaacactgttaagtgtttatcctgctttatctcactgaatcctcatgtgcccttcctgagatatgccattgtcctaatccatagtttataaaataatcatctaagaggcccaggcacaatggagcttctcagagtgatagagaaacagtcagtggcctttgcttccaagcccaaagtccagggaccagggcctccagcgtccagagccatgttcatgaggttgcttaccttcgcttaggacgcagagccatctcttcacaccctctttctcccaaaggtcaattcaaaactccctatactgggcagactcccaccctggcactcctttcctgcttgaggcctggctgacgttct

SEQ ID NO: 106825 - DNA, 1046 bp, Homo sapiens
tatctcagctgtgtaattttttttctttcattcaacatcgaacaagctaagagatttgggagtctatttctctcaaattaaatgtgagccaagtattagagtttttttttttttttgtcttcaggcttttatttgagcaaatataccagtcacttcagcatggggcagaggaaacagatgggacgtggataacagggggaaaataacagtgctaaaggtatttgatgtgcaaaaatcaaattgttcccagaatcttcaggtgctagatgcagcactgaaaaacaactttacataaatatatattttctttataaatgatctgtccattagcatcataaacatgagaaaacctggatcccgttgagacactcttgctcagaatttcttactactgttccttgtttagtggattcagttttaactcactgtggcatacacagtcagctgtgcatgacgcagtcacaatttacctttcgctcattgtcctctctttatgcctgttacccagtgtgtggccacatcagtttccttcctgccttcgtccaaattctttctttcatagtgcaccttctaatatggtgaggatgactctggagttcgccttgaattcaaatcttgcatttgctccacgatagcttcacaaccctaggcaagttacttagcctctagaatcctcagtttcctcatctgtaaaatgggcttagtaataatgattcctaggagagccaggagagtgaaatgagatcatgctgtgtataaggtttagcagagttgtataccctaaagtttccaataatgggtagttaggatcattatcattgtcacgatctcccagtttttgtggctcatcttatcacctcttcagtgatgtctttgagaaggcactgtggtagtatttaagaaggtgggctctggaagagactgccttagtttgaagcatagtcccatcctttttagctgtgctgtaacttctcgaaggctccatttcctcatctgtaaaatgtgggatgtcagtagtgtctactcatgggtttggtgggaggaat

SEQ ID NO: 106826 - DNA, 1483 bp, Homo sapiens
cttttgctctgtcgccccggctggagttggggggtgcgatcttagctcactgcaatctctgcctcccaggttcaggcggttctcatgacttagcctcctgagtatctgggattacaggcgtgcaccaccatgcccagctaatttttatatttttaatagacacggggtttcgccatgttggccaggatggtctcgaactcctggcctcgagtgatcttcccactttgacctcccaaattgctggcctttgggaggccaagttgggaagattataggcctggccgacttgtttttttaaagctacctcattgagaatgggcaaagaagttatgttggcatgtggtctcattttccaggactttcccgtgaaatattttaccctgggggcctttgactcaccccattgtaaagtttggcagttttgaaagttcagagggtactttatgggctataaatgcagaaaaacagaaaaactttacctagggtaaatgacataggacctcactgctgtgatcgctctgtctgggtggattgccccttttaaagaaatcttaaacataattagacaaatcttttctgattatcaaaggaacatgctcattattttgatattggaaaatacagaaaattacaaaaaagtaaaaaataagtaaaaaatatcttctaatctcattacttagaggaagcctgtgctaatattaacatattttctttcatttttgttttgcacacatgcattcagcaatattaatttctgtgtacatatgtatatgacatcattgagagagaatgagcttgtttataaatttggtgaggtactaagtacagttttgtttataatttttgttttaaaattctatattataaaatgaacattgtctaaatattaaatttttttccaaaatattattttaaggttttatgataatctctagattgactgtgttatttcctcttgtggttatttttggattgtttttctctgtattggcatattaggtagtgctagcttctgaagcacatgagctgccccattctcagtagcctggtgcaagaagaagttatttcctattcacatacaaatctagcatgatgttcttggtctgccacaggaacccaggctccttttgtttttcactctgctgtcttccacacatggctcccaaagatgacctggaaagtatgcccattccagccactcaaaaggcaaaaaaaccatggaggattgcatgtagaaatttgcatggactgtgtcatttcagctaaaagtaattgcaagatctcaaccaacttcaagggtggctgggaaatacagtttcaatccatgcttaggaaaaagaagaaatgggtttggtgatcatgtagtggtctcttctgaaagtagtgtttagaatcttgaaaatctttgtctctttgcttcaaggcttagaagaaacacaggctatacagtcagaacagagctcccatcccagccctactttga

SEQ ID NO: 106827 - DNA, 1002 bp, Homo sapiens
attgactactgattgatatgtactattaatcccatagtcaattaaatacattgcaagcctccttgattgttgtggctttgtcctatgacatgtggttaggatcttgcaaaaagatcttaatatcctttttattgagatgacggtcatttttgtcttataatgacagacaaggataacattgatttttgtgaagtaagttttccttttaccaacatatcagctgcccattattttgactttggagtcaataatataaagctgctcctagggtaatggcatatgtggtccatgagaggttgaagcggtatctgctttctaggaataacagtggtgtcctcaccagacagatggttcctgtggtgtgatttgattgtgtgcctgcctgctgttggcctctttggttccttcccattttttaagtctgattgtcctgccttcttggtgattatgtgagcctcccaatttctttttcgtaatttagttcatgcttatttgagctagagttaatttctgttgcttgctgctaagaacctggtctcatgcagatagagtgcttctcataggtcctcagaggcagtaggtgctcacgaataaatattgttattcagaaaatgttcacttgctcatgctcgcttgcaaatgctccttaaaggagcacctgaatttaaattaatggttttccctaactgtatttataaagaggatatcccattcaacaagttgtagcttttaatgacattttctattgtatgtatttttgcaaagagatcccccttttataaaatgttcttttttcttcttcctaagtctgcaaatataaatggtcttctctggtcatctccttagaatttctctgtgctagaatatcttttccctaagtgtcttgtggtattcactgaataccactctgcaggagacctgcagagtgaagggcgagatcaaggcgggttgtgggcaggcaggctttatgggagtgtacatgtagcttcctttcagttttct

SEQ ID NO: 106828 - DNA, 1124 bp, Homo sapiens
gatattattggataaaatgtaaggaatttatttgttcatgttattgtgtcctttgactgtgtccttttaacacagataaacacgtagtgcatattggaaaaccacttctacttgaaacttaagcaaatttcctttaatacacaagttgcagtttaggaactagtttaattaatagtcagtctttcaggttattgcactcaaccttggtggatgaaagagataatctcgttaaacacacaatggccctacccagactctgttaaaaactgtggtaaagaaatgaattagtctgtggcccagtgacttcagagtgtttaaacaaatttcctgaaaaaccttacaatgattaacagtctatatacagttattaaaataatgctatgctctttatttatttggggtgagaaggggggagccatatccatgtaatagagtccttaacagtttttaaaataacttatgttgaaatacttgtagactcaaaggaagttgcaaaaatagtatagcagccccatgtactcttcatccagcttcccctaatgctgacacctcatgtagttgtggtacaatatcaaaagcaagacattgatatttgtgtattactgttaactagatcacagagctcactcagctttcagcatttttaaaaaacctgcattcatttgtgtgtgtgtagttgtccttaacagtttttgttaaaaaataattaggcatgaatttaagtgggttttttttttcttttgcttctctcaactctgggttgcagattgccagtcaacagtacctctaagactggccatgtaggttgacttttatttttcttgctattaatgaatgttcttacctctctccttcaatttctgtaggcagttcaattaacctccagaagatggctgaacctgcaggaataccagagcaagaaactgatgtctgacaacggagtgagagttcaaagattctttgtagcagacactgcaaatgaagctctcgaggctgctaagagactaagtaagctgattcataatgggtgaaatacacttgcccaaatcagtgaattcacaggtagtggcttcccactagttaattttttttgttgtggattaaactgacagggacagatacag

SEQ ID NO: 106829 - DNA, 1063 bp, Homo sapiens
gagtctcactctggcacccaagctggagtgcagtggcacaatcatagctcactgcagcctcagccttccaggctcaagttgtcctccagcctcagccacccaattagctggtactgtgggcatgcactaccacatccagctaatgttttcactttctgtagaggcagggtctcactatgttgcccaggctagtcttgaactactgggctcaagcaatcctcctgcctccgcctctcaagatgttgggattacaggtgtgaaccactgcgcctgcccacacccagctacaaattcttaataagtggagttgtcttgaagttttagagccagtcagggccctagttttccaagttttggattgacaaaaataggtgattattctgtaaaagaattcctttgtggagtgatagccgggtgtcatcagtggatttggaactgtgctcattgtcctggttttcaatttaagagcaacagacttcaagctggctttcatttgagtcagtgtggaaacagtcaatatatgttacatgtctgtgaagctggcctctggatcaattgcaattagtttccagcagattgcattaacatatctaaaattaatatggcgagtgttctgatgaaaaggaattgaccacaaccacattgtggctgtttttagtctccctcaaatgctcttttcaaactatattttttctttctttggttaatggctttaaattgttatgtcaacgtagacataatctattgattgttcctatttgccttttaagagtggtcctagataatagcacacagctaatgtttaatgttttctttcactaaggggctttttcgctaaatgccttaaactcgtatttttctttgtatgttatataacacgctattaagactataaagcctttgagtatgttcatttacagaattttgtgtttttcaaattactaatgtttcatcaagacttaaaaagtaagattaagaaataatgtgtagttaaaaaataatatacggtaaatgatgtgagcattgcttgtctgacaatttatttttatcccagtattattta

SEQ ID NO: 106830 - DNA, 1027 bp, Homo sapiens
gaaagaaagggtgctctctgcaatgttatatttttctttaaaagcatctaagatcaagttttccatagcagtagtattttattcatcaacaagaatgaaatgtctttctaaacacaaatagtggacttcagacctcacagacaccaattatcattctgcacagagaacattcaaaatgtcagatgatctcaggaatttccccagcgaaggtcgctcatttcctactctacaagtcatttctttggcaagccagtgtgacaggcaaacttgtgagattgagttagctaggtcactcaaaactgccgctataaagaagtgatgagaagtctcttgctatcaggtaaatcccattaaactcaaatgtatcctaaactattaagcactattagatccttagaaggagcaggagtgggttgattgaataaagtctgtcccttgcaagctttcatctggatttattggaaaggactgtggggagtaatttaaggagggctaacaaattgctaactgcagggtgtggagatggtagcagggccctgtgagacagtcaaatctgatgcattgagatgacatgtttgacccctggtaatggtgatggtgaatgtgcacgtaggttctttagggtttacaaagcaccttcacgtacattatcccagccaccctggaagctggtgttttgctaatatctctgctttacccgcttagtgtgcaagctcatttgaggtagagatcttgaaaaacactgctgttgttcctctcacactggtgatgtgtttgggccacatggttgaataaaaatatctagtactttcccttctctgagtattgtaaaggatctgctctgatggtgtagttgggcgggttttaatgaataatgaatagccccagaacaagattttttcccctttttgaaaatttaaagaatgatcccatggcctagtattgtactctttttaatgttttcttttctttcttattttttgtttcttaagatggagtctcactctgtcatccaggctggagtgca

SEQ ID NO: 106831 - DNA, 1075 bp, Homo sapiens
cagatctcatgagacttactatcatgaaaacagcatgggaaaaacccacccccatgattcagttacctcccattggtaattatggaggctacagttctaggtgagatttgagtggggacagagccaaaccatatcagttccatgtccactcaccaaaaagtcctgtggtcagctagacacccttctcttcgatggaagtttgctttctatctgtggttacttaaacataccctctgggtgtctcatccactcatcccaaatagtgtatcaaaatattccttacaattgcatataggggtaaatctacctttgaccatcttatacattcatactcgccttcattcaataaaaaactaaatcgaatgcctacaatgtctcatgcagtgttctgggcacggggcactcatcagtgaacaaaacaagtgattgccctgtggagctgctctagccatatacatatataaaattagtacacataagaaagtatgaaacagggaagtatttactaaatttctatgtatttatatatgtcttcctattcctgcttttatcatttggggtccagttagaaagatagagactatgcccattattttaacagataaaatttaacatagagaattgagtaaagaagtattggaggactagaagggcaaaaaactccaaaaaaaaccaccactaactaaaacagagattataacttgcaggaggcagtgtcccccacccccaacccaagataaaaggaagaggttgaagctctctaagaacttgggaacttggaacataggtcctgcagagctgggatctagagttttcggaaaggctgctgcttggctggtttcagtggctccaaggctggtcagggagtgctggtagcacctgtaaactggaaccagctagtcttgaaaccagctccttttgccaggatgaggagctgtggggccaggggctatggtgacaaaacattagaaaggagcagatatcatctctatctgccagccctttagtctccctatagtgtgccccatatgggcagaccctaataggaagccagatggcgaaagagaaagtaatt

SEQ ID NO: 106832 - DNA, 2180 bp, Homo sapiens
ttattgaacatagacattgacaggaagcattgttctttaactggcatttactacaactaggtattttcctggcatttcattatggaatttttatttaatttcatccaaacctggggagcaaatcactgtaattatgcctgttacattattttataggctatagaacatgaagaaatcaaatacagaatgaaggagtcagggtataataactctgacttttggtttagaacttggtgtttgaaaacatgcagaccttggtttgctttttctgtatttgaaaggtttgacctctgtgtaaatgactttactacagaaactgattgcagtgtactacattgtttatgaatattgatataataaatatttaatggatacattttgctagtaagtacttcatctagcataaaattagagaaattttacttgagacagtctgcaaaacagcccaaaaaaataatcatgtccttttgaataaccttaaaaacattttacttttcgttattaatttgttcttgattttgttttctggcttaagcacattaattaaaaaatgcactacctgtaccttcatcctcctacacttgtggattctagcgatgagaatggtgaaaagcaccgttggacaagctcagatttatatctcaatatgaaggattataaaatatctttgtacatgttagctaaatctgtgaaagatcaaatgagttctttgcttgacagtgtagatgattatggtgatgtgatagttataatgaaagcatttgttgagtgtgtactttgtgttaggtactgtaatgtatcctcaaaagcaggatctcattgattacacatgataacctggcagcaaagtgattaaggtcatagactctagaagttaggtttgtatccttgtgaccttggaaacatgtgttaatctttctgtgcctccgttttccatctgcaattggagatcaccctttacctaccttatgatttcaaaagcaatacgctgaaacagtgccccattccctggtcagcttgtattattaataagtggttgtggtcattatcatagtggggccagggctcaaacaagtccgtgatccagtgtccatgatcttaaccacatcactgtatgcttgagcatcactggtgctcaagcatgccacctgacacatagtagatgctcattaaaaaatgagctttgggccaggcactgtggctcacatctttaatctcagtactttgggagggcaaggcgggcagatcactcgaggtcacccattcaagaccagtctggccaacatgatgaaaccccgcttctactaaaaatacaaaaattagctgggtgtggtggtgcgtgcctgtagtcccagctacttgggagactgagacacgagaattgcttgaacccaagaaggggaggctacagtgagcagagatcgcaccagtgcactccagtctaggcgacagagtgaaactgtgtctaaaaaaaaatgaactctggattttccctgtagaatttgtgcttgaactggcttatttgtctatttatttgtacataatatatggctcaatgcagagagaaactttttagctttgaagtcttagagataaatgatgatgggcatatgggctgaaatctgtattattctggaaacacgattactgaactgttagccctgggaagtgcctgaccttgtctaataatttgttgtcacaggaaccattattatttgtctgctatgaaggcaagtcagtggccccagttttagatcgagggtcattgtgtccttgggctttgtatctaattaattaattatcattcaacaaatactaaagaagcaccaggtctgtcccaggcatgggaaatgcattggtgaatgcatgagacatggtttgtgcctttgagaccatcatagtctcatgggacgtggcagacactgacaaatcacccacatgtataattacacattgagaggtgttatgaggtaaaatgagaggtcagtaaactttttctgtagatgaccacgtagtaaatactttatttttttattttttttgaaacggagtctcactctgttgcctaggctggagtgtagtggtgtgatctcagctcactgcagcctctgcctcccaggttcaaacgattcctatgcctcagcctcccgagtagctgggattacaggcgtatccaccac

SEQ ID NO: 106833 - DNA, 1037 bp, Homo sapiens
cctcatctagggtaatacctcttcagggctttttgtgatgtttaagtatcaatatcattgacttcacatttttcttctaaatctattcactattaaaaatatttaaatccacatttgagcccctccataagtaatagtgtccatgaaagtatgggcttggtaaattactgatacatatacatttttttcgaatgtacattacaataaattacacagaagaaagccttgacagagctttctttaaaaacatgccaggaactattatccgttaactgaagccagctcttcttttctctggacacatggctgtactggatctcccagcttgccttgcagctggacaaggccacggaatagctctagatagttaatctagataatttttttttcttattttcttaaacttctatgagggaggaagttcttcctataaccttcccattagacttcctctaggttatcactgctggggattaggtcatatgctcattgctgagccagttattggcaaaaattggaaatctccattattggctaagctgctgaatagtttagaaaaagatactggcgagtcacttacaacatccgctacaattgggttactgcttagtgaccaagataggatttgaacacccacctgtcagactcccaagtctacgtgatttcttctgtgccttacagcctttctaaatctgtctgcttgctataaaggctttccattgaattgatttatttctggaattagactttgatgaccagtaattccaaattatgttcgattgtccacttgctggctttctttatccaccaaacttgcctgtctctcagctgtagggcatctcctgatccatggagctcctaggtaaggcaaaagaactgtgtttgcattcagctgtgtgctgccctatagcagtatgaacagcttcacactgtcaactaggaggtgaaatgccaagtgtagctacaatctggaaatgtgttgatgtatatcagcttggaaacaatgcagggggcaggttttgggcctttgcagtgga

SEQ ID NO: 106834 - DNA, 2914 bp, Homo sapiens
gaggtggatagcagaagttgagggacaatggcacttttgggtatacaaagaagtctaaatggggcttcagaaagcccagaattcagcagggaataaaattaacccccacaactgaaaaatcaaacaaatatcatttatgtagcaaatattttctgaatgcttattacagctcattctttatagaatgttgggcagataaatatgactgagtgaatgcagacaggaataagaaacacagctcctaccttcagagggcacagaggtacaactggcctataaacctgtagttatactaaaacatagtgggtactgcaattgagctgtgttcttagccttctaagatactgttggcctctgtcaaccacttaccctgtgtctgcagaactattccctctgatcattcattgcctgatctctgtcttcatcagctttctgattcaacgttgattcttcagataggctttttcctaattaccttacccagccctgcctttccagggattattctctgtacccttatctgctttgttctttataacacttgactgtacctggtagtgttatttgttcattggccgtcttccccgctctcctacaagtttaagaatgtaagctccacaaaggcaaagtgatacagcttaatgtaacagcgtgagtgattccccagctggccggagttggtattcagtaagcatttgtggtctcagtcaatgagtagggtgcacagagaagggagagggaggtaaggaacaggagaagttgagggatgatgtggctcatttcagcaaatgaggaagaaggaaggggctatagaaatcctagttgtgaaagggtcctcataatcatagaactgttccttgggcatgtagtatataacaaggctgcgtgaagtaatctccacacattatttctttaacccttacaacatcactgcaggggagatttcacagtctccatgttttatagaagcagtcagaggcatagagaggccctatagtcatttgcttaaaatcacagtgccagggagtcacccgcctcatgctgataaaggacttatgctgttaaattattaagctctgtcactgaaagatcctagttgggctgaactaggcagttaaactgattgcttacctttccccatctttttgcccttgagtgacactcgcctttggtcatttggacttgtgctgatgaaggtgtgctgatcaacttggcatggttgccctttctggactcttatccaccttcctctctctctggcttcagggtcttgtcaacagagtagtagggagattaaagacacgaagtctgggttcaaattcaacggagttcaaattcttatgggatctcccatgttctttctctgcaacctggagcaaattattgaacctgactgagcctcaatttactgttacttgaaaaggggatcatttgcacagatagttacaaagattaaataagatgatatttaagacatttggcatatgacccgatggtgggcccaggatgattatttctcttgcactgaatttgaagctaaattcgctggtctttttaaaaggctttattgagctagaataattttgctttcccagattcagtaagcatttatcatgtgctgccatctcaggattagtcactggcttggtgcttccatacattttatttcacttcatccttgcagtagccatgtgaaataggagttattgttcccagcttacttctggggaatctgaggctcagaggggtgaagatctgcctcccgggctctgattatcttcaggattccacagttgggatgaatgtctggtgaggcctgaggtggcagtggggaggagctcatggggagcttaattgtaccatcctggttattactcatttcacaaacatttacatgtctcagtgttgacttagtagtgacgactgctggacctcgtgcatcaaagatttgaggtgagggaacacttaaagaattggcagtagccacagcatgaaccaacggccaactggacatgactttcactgtgtgcttagcacaaactactgccctcagcgtttcaagaatgctggagaaattgtgaaatgtcattgcctttgcagagtgggctttgggggatggtgttggaggatggagtttcctggtattctgggttcagactttgaccagtgtactgagtatggtcagcttttaccctttctagaaatgattccaaaagaataggacttaggcagtagccataaatgcatagatttctaacatttacctttgaattttatttttattttaaaattcgagggatttgacataatatatgaattgttaatggagacatggcaaagcacaaggcatggtttgtgtaagtttgggtcctgtgggttggagtggggggactagcatcttttttctgctcccatccatttctccctgtgcttgctgtatttccatttgtgggctgtcttagtcccagagttgtgacttgagagccctaaggaggttcaggagggctgccttgtagagtttacggtgagaaatgaggccagagacaagagcaaggacaagatcgctgatcctggtaggcctggtaatgaagctaagcttgttcttgaggagggcaatagggagccattgaagggttttagacagtgaagtggcaagggcagtttaatgcgtagagtactctttctggatatagtgtggagagggttggagaaatgcaagaatggagatcatttgggcgactttggcatcgattcaatgctgtgagtcattatgccaggatactagacgtacaccgtgagtggaatcagactgcccgggtttaactcttgccttcagcactccatagctttgtgatcttgtgacaattacttatatttctttgtaagataccttttttttttctttttcacattt

SEQ ID NO: 106835 - DNA, 1141 bp, Homo sapiens
taaacacagacacaaataaactctaagtaaaaggatagaaaatgatacacactattcaaatagtaagcttaaaaagagggactggaaggaaggacatggtgagagaacaatttgaagagtgccgaagcgtggaagtgtcttctgcccaaaaggcatggtctgaaggtggaactaactatgcctggcagtctttaacctcgggatgctattggggtatccctgagtcctactgatacttcttctcttttcatgctttgagggtcaagaaaacaagaaaactcttacaccatcaacagcatcctcatgaagatccagccaaatttggtgcaaacagagcagaacctgaccctgtagtgcatcatagatgccagcaccaccttgtacatcaagcctcagcacctggtgcttttttagaaggatggcacaacatttttacttctccctaggcaacatagaagtatttttcatttctcaggcttgggtctatgactcagggaaatagaagtacattttggttcagaacaacaaggagaaaaccacgccagagtaccaggtgttagtgaaaggagtggtcagttccagagcaatgcaggacaagaaggaggtgatagaaggcaaagtcttgatggtgaattgttctattccagaggtaaagtcccaacatacttcacagctgaaaaacttgaactagaaacaaaaagagtcaagcaaaaaagagagaatacttctcagaaccagaattttgtgatgctggaattccccaaatgagaagcaagaccatgctttaatattccaatgttaagctatgatcgtttctgggatctgggtggtgaccttggaatccaccagaagtcacctggccaccacggggggtcagagtcctgctctccttttcaccatttttttttttttggtggtttccttgtttggtatgaggagaaagagcccaaaattggaaaggggctggggctttctggatggatttctgttctcaggacttaagacctgttattaatcactttaacaatttatatcggtatttttcaaattatttgactgtgaaatatatatatatatatatataaaatctatatgtcctaaacaaaagttttataaacaatacttgcctttaatgcacatg

SEQ ID NO: 106836 - DNA, 1130 bp, Homo sapiens
ggccaaggcaagatgggtcaaagtcagagtggtggtcatggtcctggaggtggcaagaaggatgacaaggacaagaaaaagaaatatgaacctcctgtaccaactagagtggggaaaaagaagaagaaaacaaagggaccagatgctgccagcaaactgccactggtgacacctcacactcagtgccggttaaaattactgaagttagagagaattaaagactatcttctcatggaggaagaattcattagaaatcaggaacaaatgaaaccattagaagaaaagcaagaggaggaaagatcaaaagtggatgatctgagggggaccccgatgtcagtaggaaccttggaagagatcattgatgacaatcatgccatcgtgtctacatctgtgggctcagaacactacgtcagcattctttcatttgtagacaaggatctgctggaacctggctgctcggtcctgctcaaccacaaggtgcatgccgtgataggggtgctgatggatgacacggatcccctggtcacagtgatgaaggtagaaaaggccccccaggagacctatgcagatattggggggttggacaaccaaattcaggaaattaaggaatctgtggagcttcctctcacccatcctgaatattatgaagagatgggtataaagcctcctaagggggtcattctctatggtccacctggcacaggtaaaaccttgttagccaaagcagtagcaaaccaaacctcagccactttcttgagagtggttggctctgaacttattcagaagtacctaggtgatgggcccaaactcgtacgggaattgttccgagttgctgaagaacatgcaccgtccatcgtgtttattgatgaaattgacgccattgggacaaaaagataagactccaattctggtggtgagagagaaattcagcgaacaatgttggaactgctgaaccagttggatggatttgattctaggggagatgtgaaagttatcatggccacaaaccgaatagaaactttggatccagcacttatcagaccaggccgcattgacaggaagattgagttccccctgcctgatgaaaagacgaagaagcgcatctttcagattcacacaagcaggatgac

SEQ ID NO: 106837 - DNA, 1049 bp, Homo sapiens
gagttctgttaaacaataaacagaactagcaaggtcattttctacctgaccaaaggaaaacttcgcagcaaggagacatgaattaagaaacaggttaagtgtctcagggggaggaagggattcaagtttttcagagctgctcaagcagatatttgcaatgaaatgtgaatattatcaatgatttattgtcagtgatacataatttttccacagaaaatttgttcaaggcctgggttgaagcaaagctctcaaagtggtggctgataggtaatgtaggcccacagatatgttttgtttggctcagattatgtttaataactgttttttgaattggttgcattgtgtgaaaatcacaagatttgacataataatcctaaattggcacaacactgaaataataacagattatttcttttttttttgtagcagtcctctgcagctggcttctggctgccccccagctccccaccccaactcttgcagatgggacatttttcattctctatgtcaccctcaggcctgtctctgtcatttacattgaccccttgaaactgcaagtgaatttgagaactttgactcagatattccagaatgaagaaaaaaataattagattatatttcaaatttcaagtttctttgtcaccttagaacacagtggttaagagtttgggctctagggtcaaaatagccagggatcaagtgctggttctgcacagactagctgtgtgacgttacacaggttacttaacctctctgaacactagtttcctcagttaaaaggggacaacagtgtacctacatttttatgtgtagaattccacttgcatctatgtgaatgcatacgccttaaagacacacacacacacacacacacacacacacacacgtcacttggaatagtacctagtacatgctaacctgtcaaatatttttatattcggttgaaaaaaaattttcaattggtcaaaaaggaaaattggtaagtaaagtgatgatttctcttccttttcccatcaattgggaaaagcaagtaacattttgctttacat

SEQ ID NO: 106838 - DNA, 1052 bp, Homo sapiens
agaggtgtgtcttcttccccaaagtcaaacagttacagattttggaaaagtctcctttgctctggaaagtcttatttgttgtttagaaagcatttgcaagaaatagtgggaggcttgtctttcaagtggcactttcaaaggctggttggatttgagctagagaaatgaacatgtgaacatgttgctgttttctgccctccctgcaagtgtcctgtggtcattttacaggcttttcaagtaagtgttgccccgtggaggacagtgatttctaactatgcatagtctatatgtttgagctgttgccggctaaacatatccaataggaaataatacccaaattgaaagggagagagcagctattaatatgaattacttgtctagttagttgctttcaggataccatctagaaattggaaacattcacagaatggctaggtcagcatttttctggcccagggtgtgtgtgtgtgtgtgtgtgtgtgtgtgtgtgtgtgtgtatgtctgcgtgtgtctgtctgttgtgtgtgtgtctgtgtctgtttctatttgtcttctcctggaaaacaagtatgacgttgtttgatctctccaggtgagagcaaggttgttagcctctcctaccttatgttgtactgatctggaatttgttttctaatgagcctgatgcatgcctcataggtgtgtgacacatcagaacctggattgtttctataagtcactgagacctaagtttgaaccctactaattttagaatttgtaatggaatgtgtgatgaaagatcagccttgagatgatacggctgatatttacccatgctgtctatgaaaagggatttgctaagcaaataaatggtgtaaatatatttaccaaggagctgttcacgttatcttaaaaaatcgtcaagtgctttggaagcatttatttaacatgaagtcaaaatgcttgtgccttctctctgcaaagtcctacctatgtgaccctgggcaaagttatttaatctctctgagcctcagtttcttcttcctggaagtgagtattacaacatcccctac

SEQ ID NO: 106839 - DNA, 1049 bp, Homo sapiens
gatttgcccagggcatacttttaactcagtggttggtttatggagacatgaccttccctctcataataattctgctgttggcactgtgctccattttaggtcttgagacactaatagcagttactgttacctgtttccccccattatgtctaaatatctgggttctatggtttcattttaaaagtgatttgactctgtatttaaataggaggctatttaggaaaaaagttgtcatgaacttccaatgccctgcaaaacatttcaaaaatatatatgatatatgtagagaaatagccagataatggattctatctctgtcatttctcttatagagagagaaggaaggatggaagaaaggagagagaagggagagaaatgtaactgagaaaactcaagccttatagtctaatggacctgggttctacttttgcatccttcactatttagttatatgaccttggaagtgttacctatcccccttgcctctttcatacatttaaagacagaggtattataaggtcatgccaagtccataggcagcaggccctattgaataaggtcaattctctccattccatgaccctattttgttttttaaaagttaagttcatttagttcagagaatatttttacattctcttcctcagtcttgtttactgtcttcctcagtcttgtttacaaccttttgcaaggacatatttgggagctgcattttattttcgcagagttgttgatttggaaaaaaccttggacaaaagcctcatgttgtgacacccttgtgtccttaggtacaactgtgaagatgaacgctgttacttagacttggccaggctgagaggcgttcactacatcacttggcgacggcagaacaaagtctttcctcaggataaggtaaagttcaatcacaaaacttaccttgcttcatttttaattggtttaaagtatccaattattgatatgaaaaatggttattgaacttcagtgctgcaaagataaactgttctctggaatactgaattgttttattttatatttgcaaataggagaaa

SEQ ID NO: 106840 - DNA, 1014 bp, Homo sapiens
cctcggcctcccaaagtgctgggattacagctgtgagccaccgcacccagccagtgttaaaactttgaacccattttcttgctctgaaatttttttccaaagatttttcattcaccctgatggtttttgcacactgagcataagagtgtgtgtaaacggtggcatagtgtgtgttgtgtgtatctataatttggataagatgttcacaggaaaaagccctgaactacaaagatgtgagaataaaagaagttaaggtagaaaaatgaaacactattaatggctaagagtataattgtgataattatttctgatgatatttcatcaaattaggcatttgctctggcccaagatgaagatccattttgcttgtatggattttatgaacttgcgtaggattgttagtttttaacacaggcaaattcaggtattttgttgcatctttgaaaagtcatgttatatccttttattgccctaaaaccttgttttgtttctactttcagagttcttacggatatggtgacctattctccgacacatggaatgcatttactgattatgacgttatacatttgaaaacttatgattccaaaagggtactggaaattttcctgaaatgtctgtgaatatttcttgagtgcagatgactcactcataaaataaacatttattatgagttcctattagccattaccactgatttctgaatttctgaatttcttttataattagaatcctcagtgttgttaatcatgcagcctttgaaaagttttttctataatctttccaaaaatatgaattctgttctctttgaatgaaatagtgtgctattcaagcaatgcaaaatggagattaattaaaatctatttctcaaaattatacgtgctatttttggtgtgaagggtgcaaattacatcttcttttaatgtatctttgttcttaggtatgttttaaagaagctgttttttcattactcccccgcatgaggtatgggctgttctataatactcctctggt

SEQ ID NO: 106841 - DNA, 1026 bp, Homo sapiens
gcatggtggcacatgccaccatagcaagaccccacccctgattaaaaaaataaataaagtcagaagaaataatggtttgtcttcatggccctgtagttctactcagttttgagttaaatagacctaccttgtttttttctgggaacttaatgatcacttgttacttgggatatatgggaaaatgcattcctgattttaaataaccaattttagagtgacttttgaaacccaggcagtccataaattgaggactacctatgtatctagatcatttcatgtttggaaaaacaaaacagttatttttttccccatttatttaaactaaaattctcttaaactgtaaatagatgggatagaataaaacttgcttgatcatgtgctctttggtgttaattaatgtagtttcattttccaacactaggtgttaacatgtatcaccacttctgtgatttcatcaatctttatattactcagcacgttaataactcattcagtactgacgtgtacatcgtgatgtgggacaccgtaagtaagaatgtgctctccgcttcagtactgtctttcccttgtatcagtgtgtgactctgatgttgtgaaacagaattttcaaagacacatatatttcaacatgtacagccgcacataatgcggatgggtgcgaatgtatctgtacatatatgtgttgacatgtgcatatacgtataggcagataggtatgtatgtgtgtaccttcattctttgaattttagaatgaggcagtggggaaggtttctttctctttctgggtgggtggagctccaaaggccagagattcagtgactttggcttagtgttcctctgggacacacatatgaaagactgccattcagcagggcgtggtggctcacgcctataatcacagcactttgggaggccgaggcaggtggatcatttgaggccaggagttcgagactagcctggccaacatggtgaaatcttgtttctactaaaaatacaaaaattagccagatacggtggcagacacat

SEQ ID NO: 106842 - DNA, 1189 bp, Homo sapiens
aagaggtggtttggggtagtaaatacaagagcaggctctcaactacaattcagatcctgagtcttagacaaggtacttaggctttccttgtttcaatttcctctgccttaaagccatgcccattatgtagcatatggtaaggaagaaatgaggttctgcagataaaaatgctcagtgcagcagggcctggttcccggccaagggctcagcattattttttaaaggttgatgaagttgtaagcacttacgattaaggtacactgttcaatgatcctgaaccctgagtctctgacatctcaggggtctccgatctccaaccacactggagaactaaaaaaattttttaatttactcacattcaaaaactgagtatatactttatagagctattggagggtgtcacgtaatagagctttgagcattctagcaaggtgaatgaggcctcaggatgtgaggcatgccattaaactgcacggccgcagggtgtctttaacagagttctgttctgtcttgcacatttggctcaagtctagctgttcacatggaaagggcaagataataatgacaacccctatcttgcactcctctttcaaggtggcttgtagaatgttcttttgattaagatttaccttgatttgctttgtgctagcagagtatgatccttgtcttagttgtttgggctgttataacaaaataccatagactgggtagcttctaaacaatatcatcacattgggggttagaatttcaacatatgaatttggcagagacacggacattcagtccattgcaatattttaccaactacagactccaaaacaccatgcaggtcaagattgagactttgtgttcattgggagttttgggaaaaacaattaaaatggcatttaaatctataaataaaacccagagcagataaaagtttttgaagttctgagcataacccagattggttgaaatagaatcaggctctggtagctgactcttcgactcctttcttcaattatttagaaaatattgccctcatgttgctgttgagacagaggctcccacaagctttacggtttgcagaaagcacctcttattaaaactggcaaacttccctccctgcttttaatgtctcttacatgtgcatttttccttgtttcttttggcttttggaagctgctttttcatatagctgtggggg

SEQ ID NO: 106843 - DNA, 2968 bp, Homo sapiens
ttgtatagctggtatgctatacagggacctaattaatttctttggtagtgatgaaagcctctgtcgatacaacctacacaggtggggctacgttaaagtatatttttatttctctgggttcttgtagtaatttagaataactgaaatatatgtcatttccttagattagaaaaatatatggttgaatgttttcaaacaaataattggatttatctctgttgcacagtaaaccttataaacggtatacctctcaggaaagttgggaccgtttttctgccactgtttcctttacttaagaaagagctagctcaaggttatatgttgacatgtctatttcaaaaaaaaaaaaaaaaccacacacacattaaatatttttatattactgggagtattaaaaaagatatgttttgatttaaactattttgtggtaatgcttctcagctagaaattggcaatctagaaaaaactcgatcaataatggctgaagaactagttaaattaacaaatcaaaatgatgaacttgaagagaaggtgaaggagatacccaaacttagaactcagctaagagtaagtattcttcacctaaggatgagtctaagatattttagttcatttactttaaatctcatgtttttaatttatagtatgtgttagtgatttatttgaaaattaaagagtactaatatttgagcaaagaagtttaaaaatgaatcttttatcttgcttgtatctttacatattcaaagtaattttcacaatcatgtttagtcccagtataggaaaagaactagatttcatttggctacacttcatttataacattgaactttgtatgatcttagtaatattttgttgattgttgttatatgtatcatcacaattgtctcatctggatgttagaagacactgttaagccataagtgagaatatgttttcttttgatctttcctgtggtgtgggctaaatgccgggtaatacttataccaccatggaacaaagagactaaattttatatcaagtgtgcttacattaatgggagagaagtcatatatggggagaattgtagatttagtggagagatagggtaaaattgatagccatctagcttggtttttttctttaattcctttttttgctatttagttcaacatagactgaagtgtgagtttaatttttaaaagagatgagtatatacttttatttaaattgtagtgttttcattgttgactcctatggcaatataaatattaaagatgttctgtgtagttattttaaaaattgtaaacaaatacatttttcaggatttggatcaaaggtacaacactattctgcagatgtatggagaaaaagcagaagaggcagaagaacttcgattagatctcgaagatgtaaaaaatatgtacaaaactcaaatagatgaacttttaagacaaagtctcagttaacttgtgaaaattgaattcccatcaaactgaatgtaagcatttaatatctaaacatttaatgtggacttccaataaattcttttatagaattagaaagtgggatttactgtagagtgtaaaaatttttttaaaattgttttacactatgtagtaatatttacagttaaattattttgtgcaatatttgaactttatttttgaaactattctttaaagatttattttttaaagcattcattttttttccttgaatagcacagagatttattactttatcctcatataaatatggctagagaagaagaatggtgttcatatatgtattgtagatatacaactagttgtatctataatttgtaagtgtttatatatatattaagaacatttgaagagtaatgttaacatactgaaactttgaaatctttcacatttaaaatttcaacatatcttaattactgctcatgaaaatgtacattaagtgttaaagtaaaaaattattaaatctgtggctattaaattttaaactaatttttttcctttaaaagtaagagtcacactgacactgtctgaaatttaaagagtgaatgatttaaacttaaaaaaaattttgatctgaaaatttatttcacccagctttcacaattaagtctgtataaaatgtggtaccttttggtacctatccagagaaacctgtacatattcaatgttatctagatgtgattggataatggagaaaatttatttataatgattttgcaatggcatcaataacatttaaatgattttgaagaagtattattttactaccctataaaatgaatcgaaaataataaagttcttaacataatttactctttaaaaattacctgttcatattttgtaaacccatatttttagcacattaaaaatgaatgtttgatattacagaatattcataacaaaatggaagaattataggaattaacttgaatttggcatttttaattttgtgatttatcattttattttttcttgaaatttcaaacacaaggaaagcatagaatagcttttaaaagtagctatgccttcttccaaatgttattttattcaaaaaggtaaccaggttgtgttttaaacctgtgaaatattgtgatgcattttattactgaaagttatttaactgcctttacttgcacataaaaactctcatttacggccaggtgctgtggctcatgcctgtaatcccagcactttgggaggccaaggcgggcatatcacctgatgtcaggagttcaagaccagcatggccagcagtttggtgaaaccccatctctactaaaaatacaaaaattagcctggcgtggtggtgtgcgcctgtaatcctagctactcgggaggctgaggcaggagcattgcttgaacctgggaggtggaggttacaatgagccaagattgtgccactgcactccagcatgggtgacagagaaagactccgtctcaaaaaaaaaaaaacaaactcttatttaatttttagttaaaattaa

SEQ ID NO: 106844 - DNA, 1022 bp, Homo sapiens
gtgaaactcagatgggatctggaacacactgttggaaaatcactgatgtcaagctggtaataaaaatgatttctcaatatgtagctggagttaataaagtactgagtttttaatagtctatactagcatctttttcattttctgtttttttaaattctgccttgtttaataggtaccaggttgaattggaaaacctaaaagatgaatatgtaagaacacttgaagagacgaggaaagaaaaggtatttctcttcgtgaccactcagctcttagggcatacattagagaatggttggggatggcagcaaattaatgagataacaagatgaaatgggtgatgccactgcttttggaacttggtctttagtaggaaaacaaatatgagtttatactttatgcttctaactttgagattgacttatcatggcatgaattactatcacagaaattgtctaactttatttctctctattagacattgttgaatagtcagttagaaatggaaagaatgaaagttgaacaagaaaggaagaaagccatttttactcaagaaacaataaaagaaaaggtattgaattttgtttttgtttgtttgtggtgtaaccatttagtagatgctgtgattaatcattgctttttaattttagctatgctttataacaagcttgtccaacctgtggccctggttggcatgtggcccaggatgattttgaatgaagcccaacacaaatttgcaaactttcttaaatcatcatgagatttttttcatgatttttttttttttttttagttcatcagctattgttagtatattttatgtgtggcccaagacaattcttgttcttcaaatgaggcccagggaaccaaaagattggacatccctgctttataagtatcatttttttaatgtctaaaatcaacatagtgatgaattctagtattataatcagtgtcctgctcagagtggacccaaagtaattttgagtttatccaaagagatctatgatttctaggacttgaaa

SEQ ID NO: 106845 - DNA, 1053 bp, Homo sapiens
ggtttttttgcatatagctgtccagttgctccaggaccatttggtgttggtgatccactactcttttaatgcatgactccattttgaaattaaaatacttttggaaaagagtgataaagcaggtataagttaagattggttcatttgtctcagtagacagtcctgccttaggcaataaatagttatcagttttaagtgtggctacttgcatcattaaatgtttgaaatcagaattgacttggtattttggtctctgggctgtatgtgtatgtgatttttttttctgtcctgtaatcaggtgaatcccagaccttgctggcagcagcagttgagagagaacgtgcagctacagaagaactccttgctaacaaaattcagatgtcttccatggagtcacagaattctcttttaagacaggaaaacagtagatttcaagcccagctagaatcagagaaaaataggctgtgtaaactggaggatgagaacaataggtgagcatggtttctgagtgatatttttggtagttccgtgacatcctaaagcactttttaaaagtatgttgttgggccgggcgccgtggctcacgcctgtaatcccagcacattgggaggccaaggcgggcggatcacttgaggtcaggaggtggagaccagcctggccaacatggcgaaacctactctctcctaaaaataaaattagccaggtgtgatggtgtgcgcctgtaatcccagcagctcggaggctgaggcatgagaatcgcttacacccgggaggcggaagttgcagtgagccaagatcccaccactgcactccagcctgggtgacagagtgagactcggtctcaaaaaaaaaaaaataaattaaataagtaaataaacaaagtatgtcgttggcttttagcttcagggtaccaagaactaaatgtaatcacttttagcatttaaagttagggttattagtaataggatattatggccgggtgctgtggctcatgcctgttatccagcactttgggaggctgaggcaggtggatcacctgaggttaggagttca

SEQ ID NO: 106846 - DNA, 1104 bp, Homo sapiens
atacaatctactgattttattcagatttccaaagttttattggtactcatttgtgtatgtgtgtgtgtgtgtgtgtattaagttctaaacaactataccacatatccattaccatagtcaagatattgaacagttccaacactattgagtccttcctgttagctttttttctttttttcttagctgaaaataatcactcttaatgttacccttttggaaacacacctaccactctctcaacccttcctcccttgtcccaaatctctggcaatcactaatctgtcctctgtttctaaaattctgtcatttcaaaaatgttacataaataaaattatacagtgtatgacattttgggtttggcttttttcactcagtgtaattcccaggaagaggttcacacagttgtttttgtatcggtagtttagtctttttattgctgagtgttattccatagtatgtaccacgtatatttaaccattcactgcacaagggacgtccaggctgattccaagctctggctattacagataaagctactgtgaatattcatgtacaggttttagtgtgaacctaagttttcatttctctagataaatgcccaagtgtgcaattgccaggtcatgtttagtgtttttaagaaaatgccaaactgtttacaaagtggctgtgtaagagtaatgtggtttcttcacacccttgccaacattttatgtcgtccctgttttttcttttagttactcagacagcatgtagtgatatctcattatgattttaatttgtattttttccctaatggctaatgttattgaacatcattttatgtccttattttccatttgtacattctctatggtgaaatttctgtctatgtcgtttacccattttctaactagattgttatatattcctgatactaatcctagatatatggtttgcatttatttgctctcactctgtagtttgccttttcatcctcttcacatagatttaaaagttgaaaattttgaagcagtttgtcagtttttctttctatggctcttgctttttgtgtcaaatctgccttgttctagatcctgaagactttctcctctgttttttcctaaa

SEQ ID NO: 106847 - DNA, 1043 bp, Homo sapiens
ccagttttgtttttgctagcctatttaatactgtagggaatatccctgtgtatttacgtatctgctttcttagagtgaattcccaagactaggatggcccggtgaaaggatgtgagaagtttgatgattctttaaacatattataacgttttccaaaaaggctatggtagtttataatgtatgctcctgcatatgagtggagcccccagcttttataatccgtatagcacctatcactttctgtgtgatgtggcaaatatttatagacgcactgtcttttctccaatattgtatggtaatggctatgccttatacatatttgtttgcgtttctttgccttaacagaatgcttttctaagtaaacattgaatatacatacagttttagaattgcttgatgaatgagagatgtgataatcatatgtaaaagttcattggagagtatgaaatagtatacatgaacaatgttgacacaacacaaaatatgtagttagtgggaagttatagataatactgtaccattgtttgtgaatgtattgtttctcctcctacaggtgggggaccttaggcttgcattgcagcgtacagaacaagcggctgccagaaaggaggattatttacgccatgagatcggtgaacttcagcaggtactgtcacaggtttccaaaacacaaatccaagaagtatgtgtttttctagaaataaaagaattcctcagtgggatagtgttcatggaattgagaggattactgtcacacctagcatttgctgaatttttgtggcttgtgtgaataaatcagagtgggcaccttaaaaattatacaaggaaattccttattttgttttatagaaaataatgttatgatagatttgttatatgtattcagtattgcttttccatttgtaatcgcttattaatgattgtcagtctttgattactgtgggacaggtaatagttcccggtttctatgcctctgttaattttcagtcatttataacatgcagaggaaaagggagagaaaatacaatttaggttgatttttc

SEQ ID NO: 106848 - DNA, 1974 bp, Homo sapiens
gatgtcccacccatgttcgggaatttgttactttcttcatgatgagatttaaattagatttagttcatatttctagtaggaaatatctgggtgatattgaacaactatatcacatcagcagacacatattgtcaggctgtactacaattggtgatgccaaaactgaatgcttagttaaggagttgactgccagatttttctctttaaaattagtaggtgatatatgagagtgattctttaagaccgtgtcaatatccagttcccaacaaccttttacccaataattttaacattcattgatgattgctgtccaaattagttgtaacattgtgggttacaaaattgtaatttaaaaaaattctgttcttttatgttactattagataaaacattctattgagatttttagggaatagttatcatttgagtttatacttctttaccatcaccaggagaaaaactttcaaaacagcagctgcacaattctaacatcatcaagaaattaagagctaaagacaaggagaatgaaaatatggttgcaaagctgaacaaaaaagttaaagagctagaagaggagttgcagcatttgaaacaggtgaatagcaatcataattctctacatatatattgttattacttcctgtatgaacagttggccatggttatggagcatttgaaaagatttaatggggtatatcatgtaagaaggatttttcaaacaatagataaatgataagattttttagccgagtggggtggctcacgcctgtaatcccaacactttcggaggctgcgacaggcagatcacttgaggccaggagtttgagatcagcccggtcaacaaggcgaaaccctgtctctgctaaaaatactgcaccaacctaatacaaaaattagccgggcgtggtggtgcacatctgtagtcccagctacttgggaggctaaggcacgaaaattgcctgaagctgggaggcagaggttgcagtgagccagaacattccaccctgggcaatagagcgagactttgtctcaaaaaaatatatatttttctccattattatagattcctggaatacagttatttaccatggtattatttcttgaaaaatacttttgtctgtttttataacatataggtccttgatggcaaagaagaggttgagaaacaacatagagaaaatattaaaaaactaaattccatggtagaacgccaagagaaagatcttggccgtcttcaggtagacatggatgaacttgaagaaaagaaccgaagtattcaggctgccctggatagtgcatacaagtaagaaaatgaacaaatatgcaacccatttagaatgaattatcagagtaggatgttgaagaaatactttttctattatctgatcactggcaacatttataaactcaatctaattttttaagagaacttactgatcttcacaaagccaatgctgcaaaggatagtgaggcacaggaagctgctctgagccgtgaaatgaaagctaaagaagaactttctgcagcattagagaaggcccaagaagaagcccgtcagcagcaagaaacattagccattcaagtaagcaatggatgatgaattagagtagttttaaaaatatttgtttatgcttctacaaattaaacaattagctggtttgaatcaaacaatgtagtgatacatgtgttagatttcagagtactggattctgctaaatttaaccagttgtgttttttaaaactgttaaagtaatgcttacgtgataccagtattgtttaatttttttgagttttagacccatttgagagtattataaaagctaggaaccctcttagaagagaagagcaaaaatgcacatacatattgcatataattttgagagaatccatttaactcctgagctcattcataacatctgtgggagtccaaggacctcagatgaagtaggaaaaacaaaatttgtgaggctttgt

SEQ ID NO: 106849 - DNA, 1096 bp, Homo sapiens
atgagataaagctgttttctttgttacagtgatacacctgcatgtaaaaatggtcttttttaaagctaagcgttctgacttttatgtattcgccttatccagacagttgaatttctgaatgaaaagctggaaaaaagggaggctcagttattatctcttagtaaggaaaaagcacttctagaagaagcttttgataacctgaaagagtaagtattctgcaaatgtgaataatgttacacattttctggaaacctgtatactttgtacatatttaagaatgtttttgaaattaaaatgttttgtaattttatcattattgaaagttgtatagctttcaattataaccctaaagattacttttctcttttgattgtctttaccctttgccattgaagagagtcattttgcaaaactggaaaactctttcctttcgtttttagtcttttagtattagagatttaaaacgtatttgaagaaaactgtgttaatcaataacacagttgtgctataaggagctgattgggaaaatgtgatacaagaagattcagaattgaaacattgtatttactcttctcttatttttacatgtcagatattggtgacattttctctttctaacagattttctttgaggtgttttaaaataaatttaacaagggaaatttcctttttttttcttaaaagttaataggcctaaaactgttctattttaataaggtatatgtcagagaaaagttatcttccttttgagaattgaactcatgtatacctttgggatatatagacaccatcctcattctcaaatattattttaaatttagtgaaatgttcagagtgaaagaagaaagcagtagcatttcttccttgaaagatgagtttactcaaagaattgcagaagcagaaaagaaagttcaactagcctgcaaagagagagatgctgctaaaaaggtaattgaaatttaaagtaatattaattaaactctatagagatatagatttttgaggagtgcattcatcgtattttgatattggaaaaaagagaagtaaggtgaaaaggatatcatctattaacatttaaattgtagatttttggcca

SEQ ID NO: 106850 - DNA, 3424 bp, Homo sapiens
attaagtggatgaaaatgaatttgttctctagaacttaccattcccatcagtttaatatgatcttcgggaaagaacatttgtcaccattatcttggtttgaggcttttgttgttttgtttgttttcgagacaggttctcgatctgtcacccaggctgaagtgcagtggtttgatcatggctcactgcagcttccacctcctgggctcagatgatcttcccacctcagcctcctgagtagctgggaccacatatgtgggccaccaggcccagctaattaaaaaaatttttttgtagggacaggggtctcactatgttgcccaggcttgtcttgaactcctggactcaaatgactcttctagtgttgggattataggtgtgaacctccatacccactgagttcagtttttgagtgttgccctttgtctagctcataactatattactgatattacaagtaaaaattaatatgaaactgactgaataggtagggtcatttttctgtgactgcacatggcccaacctattcagttagttccatattagtttatttcatattgataagtaaagcgtgttattatgagatgaatcataggtatcttggacttactgtgggttataaaacatatactgttacttccttaatttgttgtggggaggaataacatactcgcatctggtagtccaggccaggcccagtcttttgtctgtgctcctccttcctctcaggtggacccacaccagttttcttccgtaagtccctgtattaacttggaaactacttaatgatgtagtaagcaaggagtttagcaggtgcaaattacaggtatttcatagggtattttttctaaatttatatttatactgatttataatgatgattgaaatattaatgtaacatatatgtgttcttttttaatatttacttttttgttaaaggaataagttcccctgtcagtggaggatgggatacttcaacctgggggttgaaatcaaacactgaacctcagagtccaccaatagcctctcctaaagcaatcacaaagccagttcggaggactgtggtcgatgaatctgaaaatttcttcagtgcctttctctcgccaactgatgtccagaccattcagaagagtccagtggtatcaaaacctccagcaaaatcacaacgaccagaagaagaagtgaaaagcagcttacatgaatccttgcacattggccagtcaagaactcctgaaacaactgaatcacaagtaaaagactcttctttgtgtgtttcaggggaaactctggcagcaggtacttcatcacctaaaactgaaggcaagcacgaagaaactgttaataaagaatcggatatgaaggtgccaactgtaagtttgaaagtatctgaaagtgtaattgatgtgaaaacaactatggaaagtatatctaatacgtctacgcagtctctcacagcagaaacaaaggacatagctttggaacctaaggaacaaaaacatgaagacaggcagagcaatacaccttctcctcctgttagtaccttttcatcaggtacttctaccaccagtgatattgaagttttagatcatgaaagtgtaataagtgagagctcagcgagctcgagacaagagactacagattcaaaatcaagtcttcacttgatgcagacatcttttcagcttctctctgcatctgcttgtcctgaatataatcgtttagatgatttccaaaaactcactgagagttgctgttcatctgatgcttttgaaagaatagactcatttagtgtacagtcattagatagccggagtgtaagtgaaatcaattcagatgatgaattgtcaggcaagggatatgctttagtgcctattatagttaattcttcaactccaaagtctaaaacagttgaatctgctgaaggaaaatctgaagaagtaaatgaaacattagttatacccactgaggaagcagaaatggaagaaagtggacgaagtgcaactcctgttaactgtgaacagcctgatatcttggtttcttccacaccaataaatgaaggacagactgtgttagacaaggtggctgagcagtgtgaacctgctgaaagtcagccagaagcactttctgagaaggaagatgtttgcaaggtaactctagtaagtggaagggatttttagatgtgctttttggagattaaatcatttgttttaaaaaatactttcattgatgcataataatttatacagatttaaaaacatacgcattttgccatttctgtgtagcattaagtaccttgaagttgaacaattattaatataatttggaatttctccaaggcaattatggtagaataagttgatacttcaatacagttaagcatgaaagttttcatcttacatctttatttttgagtccttatcacttcaaaattctgttatgcttattagtatgtcaatttgaaaggaatattttcttacattaacatgtatcttcacctcctttgcagatagatgtgccaaaaaaactaaatgttatggtttttcttgtatcagaatttgtttttacatgtttacattatttgtagcaaatattaaatgataatttaagattttaattattggtgcttttctgttattagtattttcattcatatataaggagtatatatccttatattgcttcagtttgttttctgcttatgttatttttgagatctcctattgatagctatatttcacatgaacgagaaagagaaatgtctaaggaacaaaagcattgcttaggagggacagattgcttctacctaatacatgtgaaaggaaagtgatataaattctttgacattaagtcctagttttggtttttactgtgacttttagatatacaaatttagttggatctggtatctttaatagacttctgagatgtaggatgtcttgaagaaatgtcctgtaagtgccatgtattgaattacttaattttttaaaaaagtgccagattctgttaatcaggttaaatattcacaaacaaaatgctgtgcaataatatttcaattagtaatagctatatactgtaagatatataataggagtttgaattcttagaaaccagcactaattactatcagatatttttgaatttcagtgtatttaagaaggtaagtgatttctaagttcatctaaaccaaactcaggtaagactatttttttgagtccaaaaaggaacccttcctactccttttatactcaagtttatcaccatttgagtaggacctaaggaattagacattccaagcattactttttgtttagctttatactgatacattatggagatttaaaaattcttatgggttttctaaaattacttttagtgtggatggatgtatgtatgaatgagacagggtctctctctattgtccaggctagc

SEQ ID NO: 106851 - DNA, 1076 bp, Homo sapiens
atgaaatctggcttttagttaggattttgtctttaacttgggcccaaaccaaatatagctgcagactggattaggaaggccaccaatttaaggtattttcccatgtccaaatgttcgaagagaatgcacacagaaaaggttatgttttaagtaatatgcacagtgcacattgttaggataacagctttagtgcttcctaggtgtcttagtccatttggactgctgtaacaaattgccataaactgggtggcttataagcagtagcaatttgtttcttaacagttctagaggctgagaagtccaagataaggagccggcagatttggtgtctggtgagggctgctattctggcttagagttggtgccttcttgccgtgagctcccttgggcctctcttataagggcactaaccccatttatgagggctccatcatcatctaatcatctcctaaaggctccccttaatactgtcccattggagattaggtttcaacataggaatttgtgcaggggacaccgacagaccacagtattaggggtattttgactgcagcaatgagtttactactattttgagagagaggttgtgctttatgcaccatgtgttccacgagttggacacagtgttcatacgtgatcctgtcttttaggcaagcccaaacaagtgtttctccttacaataccaagttaatacagagcttattaaatatttgagacaaagggctaagagaagtgtgaggcccaatttccctttgcaattattgctggcaaggtgcaagcttttagcacgtgaactattttcctggaaagcacacacacgaaaacttgaatattccttccggggaaatcgacctctatcggtagccatagcttccccttcgctaagaactgctgtaagcacgaaatcgacatcaatagaaacccttccgcgttcctcggtaactaacggcaaccctgcgctcccggatgtgacgtcaacgttcttctgttcttccgtctgtcgaccgaactctgggctcgtagatttggttgctgtgtacgtggaagaagcaagcgcatgcgcacatgggccccct

SEQ ID NO: 106852 - DNA, 2636 bp, Homo sapiens
tggatgggttgtgtaactaagctgtcgaaaaagaaccagttattagactttgcatattttttgtcttacattatgtcttaagttacctgcagtaaagagacgttttagttccatatgaagcaggccatttattaatctgataaacaagaaaaacatgtagtgttactctattacatgaatcacacaaaacaatgtaaaatttgttactgtctcagtttttaaaaattggaatatgtattttttaatgaagagccaatgtaaatttatctgttctgatttataactgacttttaacatgcctaatttccattgagttaaagcacctgtattttctcctcccttcagctgtgtgtgccactgaggtttttaaaatagccacaaggtaataggtttcatttttaatatgcatgtaaatttatgttttgacttggtttaattatataaagatgaacattttttcattacagtgcatacattcccttgaataattacttggtgtttaatgatgtagatgggctgtatacatacacatttgaagcagaaagaaaggttagtagtattaagaacacatttttgatcatgcatattttgatttttaaatattattggttagaaatttgaacaaagtcacccatacattttctaacttccagaactctacttattatatatcttttgctttatagcctgaaataactctatagcgaagtaatttacaagaaatggtctattatgaaaagcaggctttaaagcataaaaatttttttataggaaatatgcatgattataaaacaacctgatttttattttattgttcataaaagagactaatattggtgcatgtgctgctgtaatttgttgtgtattatgtgtgtaggaaaactgcccagcttgtagccagcttcctcaaaatattcagttttctccatcagctaaactacaggaggttttggattatctaaccaatagtgcttctctgtaagtattgtagatttttgttatgttgtaaaaatcatttttgtgatttttgaaaccttaaaaaaattatcttttgataaaaattatgtttgatacttctctctcatcataatctttaggcaaatgaaatctccagccatcacagccaccctagagggaaaaaatagaacactttacttacaggttatcaatgtgtattttaaatttttttcagaaaattatatcaagttttattttactttaatgtgtcttacattaaagtaattttgttttctagtcggtaacctctattgaagaacgaacaaggccaaatctctccaaaacattgaaaggtattttacataagggtatttactaatcattttctttcttttctctctttttggtgaaagtaatcagtgcttgttctagatttcctcttaatgccttgtatatggtcaggtaataattacttacaactttagacatattaatagaattaattgctcttttagtagaatattttaaaatctctaagaaatcaaatattactttgattaaagaggattggattttgatgtttttctagaccgtaatactctgtagtttgtttacatgtgtattatcctttctgttgagttttttttgcttgtattaataatattttttctgttttagaattggggcttgttgatggacaagaactggcggttgctgatgtcaccaccccacagactgtactattcaaacttcattttacttcttaaggaaaatctccacataatagaaaactcatggaaataatatactttgtggatgctaagaagttgaatcgatgtcatttttagcaatagtgttgccacgatttgtctttttttatataatgaaccactcttttttaactttgtaaccttcccttgaagacagaattttggtgttggtgcttgtaagcattttcattaataatatgagaaatgatacctggagagagagattatgagcaaatgtattgcttcttttagaggaggaagcatacaacctcttttgtgtgaattttgttattatggtcaaagaatgcattcctaagttttcatttgagtacccaaatacacaaaaggtgtccctttaaggaaaataaagaattaagttttaaataacattacattttacaatctgacatctggagtatattgaacataggctatttcttgatataacactcatttaattgtggccatccaaatgaatattattgcagaatttatcttgttcataatgatttgtaaatggtgttatagctgaatacctgtgcatgaaaatgggcaatattttcatctgtttacttgtagtgccatagaggccaatatgcacaatattaactaatgccaagacatggctgtttaaaaaatttaatgttcaaacagttatcactgatgcttttgcactatttattaataaaatcatatattgtgtacttctttcactgaagtttttaaaagtacattaagggtaatcagtagttccatggtaatataggaataatttttaaatgtgtagcagagttatatcaaatttttattgcacttaatacttttgctacagcaatttctatagtaaaaatttactggtttaatttaactttctgtatcaatataattttttttttttttttttttgcg

SEQ ID NO: 106853 - DNA, 2797 bp, Homo sapiens
aaggctatttcttcacttgctttcctctctcactgttggcttttcagtaatgttgctgatagactgaaaagagaatgctagttttagctgacatgaccagctacaagtttctatgcttacctgaatgagagttcactcaaggaattggagctctgagaacgtatgtgggattacagtaaaaagtgcttgtggtttttttgttggtttcttagaacgtgcaaattgttttctgcaagtgctttttttttttaattagtaaactttattttttagggcagttttatgttcacaacaaaattgaacagaaaatttttgaaaacttgggttctcatagagcttcctgttcccacaaacacactaccttcctaatcaacatcttgcaccagagtggtacatttgttgcagttgatgaatctacattgaaagatcatcatgcaactacatatttaaaaactaaagttgcttttttttttttttgtagaatttcatattattgtatgtggactggactctatcatcgccagaagatggataaatggcatgctggtaaagactttagtattgttatagttctctgaagttcttgctgctgtgcttcacatccccaaaattagaattgatatatttttgaaaaatcagagtttaatttttaattaagtatatttacttcattgtttattgccagtcattggttttcaggtgaagacacaaattgttattataatcccttgatttgatacattggtattcaatagcacaaccgactcataggattacttgaaagcatacttcttcttttgaattcttatccccttctcctttaaagcccttcaaattgttttcctagatatctcttctaaattatgaagatggtgtcttagatccaagctccattgtccctttgatagatggggggacagaaggttttaaaggaaatgcccgggtgattctgcctggaatgactgcttgtatcgaatgcacgctggaactttatccaccacaggtaatcaaaaaagcacctgcatttcttttatagtatcttggcatggaattagggattaattattaagtctagttaatatttaggattgttaattagaagtggccgtattttaaaaattacactaagaagaaagataaaatatgaaattctgctctatttgaggaaagatatgaaccgagtacattgttttgatactattctgctttcataatttatttgtattttttatttggggagtaggtatcaagtagaattacaaagttgtatattgatgtcaagctgtaatctatgtggttttcacctgtatttatttcagggaaataaagataccagggataagaatgatctttccaaggatggggctttttggtttacatatccactttaaagaacacttgaaattttgaataataaatgtaaacaattttatgagtattcacttgggattcacttaactctgaacttgcttttgttttggtttgctttatacttaaatattaggtaaaaataacaaggtgttcatatttgagaaaatctgttcagtatttttcttctcatagtctaacaaagcttaaattttataccttgtaaatgtagggcaaacctgtctttacaggcagtgcagcctaagtgaagtgactcagttaatctgtattatagtttgagaggcatttttaatggtatacaatattttgagttgaaacaaattgtatgaaattgttaagaactagatcataactggaagttgcattttaaaataattcgtttaaaattcactgaaaaggacaaactgtggttttaggttaattttcccatgtgcaccattgcatctatgcccaggctaccagaacactgtattgagtatgtaaggatgttgcagtggcctaaggagcagccttttggaggtaataaacctaatttaataatctagaattacataaaatacatattttttctatattattcctttggataatttcattaaaaacattgttttgtgattacgtattcctgtcttctctctctctctctctccctttttttttttaaacagaaggggttccattagatggagatgatcctgaacatatacaatggattttccaaaaatccctagagagagcatcacaatataatattaggggtgttacgtataggctcactcaaggtaagtcagcaaattgtcatgaattatgatgttgggatgacttagggctgggatgctttcaggagaataatcgataagtgagtttagacagtaccatccacttgaagttcagtaaaggtaccatgtaattcatactacttattagctagggggaatttaataaaattattgaatcttacttacttaggctataagtcatccaagtcaaactgtccattttatcttccactgaattcatcatctcttagagacagtctatttcacatttggacaggactgttagacaaatattctatatattgaacagaaattgtcttcaggtcagctgcggtggcttatacctgcaatcctagcacttcgggaggccgaggcaggcggatcacctgaggtcaggagttcgagagcagtctgaccaacatggcaacaccctgtctctactaaaaatacaaaattagctgggtgtggtggcacatgcctgtaatcccagctactcaggaagctgaggcaggagaatcacttgaacccaggaggctgaggttgcagtgagcctgagattgcgccactgctttccagcctgggcaacaagagcaaaacttcgtctcaaaatagaaatcgtcttcagtttg

SEQ ID NO: 106854 - DNA, 1050 bp, Homo sapiens
ttacaaatacagcctacccatgtgtgtgtttttataatatatgtcttataatagttaccatttctgaattgtggcatgcttaatattaagtaaactaaaataaagcttgtagaattgcttttaacaatattttgaaaaaataatagcaagcatagtaaaattaaagtatccatcaatagcagcaaagcaacaaattttacaaatgtgtttatggaattatatatatatgtaaaatagtttcaatccgtagaaattttgagttgttctcttttggttatagattatttgaaactgagtgattgtacacttttgacctgttcaagaactctgaattttatataccttgcaagagtctttcagccattgaatacaaattacacagaatttattactgagaatttgtagacttaagactacattgaaaacaaatgttacgtttttaaatgtgaggaaacttctgcttaattggattgtttttattcccacaggccttgtctggttttagacagattcatgttatagatatggacactatagatgtttccaatctaaataggcagtttttatttaggtaagttttaatatcttagcggttttctttttttaagctctgataatcatttgaacttgtacattgcagtttaataatttttaaaaatgacttgagaggataatactaattttattttaaaaaacaaaaactaccattcccattgtaggtaaagttttgtaagaaaattttgggcatcttggtgatagtagttatgtaaacaaatacatgtttttgttttttcgaagaagtctccttccaaaggtttatgtgatttttgggaatatcctcaggttaactgtgctctgaagaaaggaaagaacggtagctcttcctccagttgatgtcagaagagaatactcgctggagtattaggccctagtgagagattggcagggatttgtgagccaaggtttgaatggtgactggagcaataaagttgggaaagagtttgagcttttcctacaaggggaaagaaaatggaaagtcgaggagagaaa

SEQ ID NO: 106855 - DNA, 3754 bp, Homo sapiens
gagactctgtcacaaaaaaagaaaaagaaaaagaaaaaataaccttatttctgagaaaagtgtgtgaaaattcctctcatcaaagtgatttttagattacacctttggaaaggacacataaatattaaatttgcatcagacatataagcatcagaattctgaaagtgtgactttttttctctgttgtatctcatatttcctaatgcaagtgtgatgaaacaacagattgaggaagcttgcagtgttttttttgtaaataccaaatgtagagaagtcaatttctcacataatagaccaatatcctaagttgaaccttggattgctttaggaaaccaaaaacatgtagactgatttatttcatccattgggtgaaataaaaatagaaacgtgcagttcttaactttaaatgaattgtataataggcaagaaaaaatttcaaagcataaacataatcacattgaatattttcctttttatttgagcaggtctggtgtggttaccttttcatttggggataccataatagttgtaggtgtggtttttttcatactgatctttgcagctgaatttactgtgttctgtgcagaatggctgttgatggtgggtgtggggacactggagactgggaaggtcgctggaaccatgtaaagaagttcctcgagcgatctggacccttcacacaccctgatttcgaaccgagcactgaagtgagaaacgtttatttttaaataactgctctaatagttttatgtttcaaaactaatagaatgcttcttttttaatttgctcttacaatgaaaatactaataaaattgttttgtgaaactaaatttttcttaaaatatgagattgaatattcacaactgattttgtttgaatatttgagtcttaacatttctcatgtaatataagttgaaaatttttgtgagaaaaatctaacttcatgacctcatgtaaaaatttaaaatgctttctgaaacatactccccttttgtagtgctactgtgagaaattaattttgataggagtataggtgtgcttacttaaattttgaaatttagttggaatgaacatcttagctttgagtataattaattgcatgttaagaattatgtaagtactaaataatagaggcgtagaattttggactgatagtgtctatcttaaggcaagtgttcacttatatgtcacttttttttattacagggtagggaaaagtatagcacatctttatgtgcttttgtatttataaaaagatagtattttgaaatagaaatattgtgttactcccataaattaacgtgcaaactcttggtttggcccagtgtctcatgtgaataactttctcctttaatgctgggcagaactgaaagcattaaaaataaaaaaaaaaaaaagaaaaagaattgaaagtattaattctgtctttctttagataacacaccatattttcttgtgcttctaaatttttttttttgcctgataatttaagattgttacttctgttaaatgattgtatttctgctgataaggaattttctaagagttttatatgttttcgtgttatctcatgttttgtgagtttcgctcactttattcaaaaggagatgttggccaggtaaggtggctcacgcctgtaatcccagcactttgggaggtcaaggcgggaggatcacttgagcccaagagttccagaccaccctgggcaacatagagagaacccatctctaaaaaaaaaaagaaagaaaaaaagaaaagaaaaaaaaattagctgtgcatgatgatacatgtctttggtttcagctactcaggaggttgaggtgggaggattgcttgactgcacctggaggtggaggctgcagggagctctgatcatgccactgcactccagcctgggtgacacagtgagaccctgtctcaaaaaggaaaaaaaaaagcagctgttactctttccccttccatctgccgcagatggagttttgcttttgttgcccaggctggaatgcaatggtgtgatcttggctcatggtaacctctgcctcccaggatcaagtgattctcctgcctcagcctcccaagtagctgggatgacaggcgcccaccaccacacctggctaattttttatatttttagtagagacagggtttcaccatgttggtcaggctggtctttcctgacctcaggtgatccacccacctcagcctcccaaagtgctgggattacaggtgtgagccacagtgcccagccctgttactctttttaccttattgttttactcctttaaacactttgggcagtgcttgatcctctgttttttaaatttttaaacttttatatttttaggaagtcagttaactgaatttgatgttctctatccctttgcaaaaattaaaaaacaaattagagatagttttccttgttaaaaataccctttaactttcatacaataaaaggcaatttaaaaacattaatggccggacgcggcacctcatgcctgtaatccaagaaactttgggaggctgaggcgggcggatcacttgaggtcaggagttcaaggccagtctggcccacatggtgaaaccctgtatctactaaaaataaaaaattagccaggtgtggtagtgcacacctataatcccagctactcgagaagctgaggcaggagaatcacctgaatctgggaggcggaggttgcagtgagccgagatcccatcagtcactccagcctgtgtgacaagagcgagactccgtctcaaaaaaaagaaaaaaaaaagaaaaattaacattgaaacttcctgaaatcattagagttttagaattcctggttcaatagaattcacaaatttcaaataattgagcaaatacaaagtctcctctttatcctagtggcattttttcctggaaacatcagaaactattttaaagtttgttgctttatttatagtctttgcggttatcacccagcttttaatatgcctttccattctttacagtctctccagttcttgttagatacatgtaaagttctagtcattggagctggcggcttaggatgtgagctcctgaaaaatctggtaatatatatacatatatatataaatatttttttcttctttgtgataagtaaaccttacttatctgtcatactagggaatttctcgtgattcttaaccttttctcttgagcctttgttagataagtttagcatgccaaattccaaacagtaattaaaatggtagaactttggaactttttaaattctaaagctctcagctataaagttattgataaaatttcatacttcagttttcttctctgatctttaacaaacaacttttggtgcttcctctggcaaaacgctcctaacttcaatgaagtaaataacaaaactggcaattcatattttaatgtatagtttcaaataatttattatttcttttgcttccccaaataacccagctaggtgggtaaggcattaccccattttatatagagggagacattgaggtttagagatgttgactgagttgctgaagtttttgtggattatagcgatttgcctggaattgaatccaggtcatcagttcttagttaagtgttctttttcagtgaaccattaggtcattttatgacctaataagacgattgtggacacctaaggtttgggaaagctaaacctttactgaacttatttgcatatatttagaaataaattaagtatataatttgatttaattaattggtttccttgac

SEQ ID NO: 106856 - DNA, 1718 bp, Homo sapiens
cccccgccccgtcccctcgcccccctcccctcgcggcgcccagtgtgtagcgcgatgctgacccttcttttattctctcttttagggagaagaaaagaaggagaatagaggagctgctggctgagaagttagtgctgccgggaggccggggccctctccggggacccccgcctccccccaccccaggcctaggggaccagccgcagcgggcccggggggctgggagggggacacccggagcgcaggccgcgctgcctcatcccctgatccccgccccgcagccccgggggcctggcgggccgctcccggtatctgcccggtgcgggcgtcggggccaggctgtactgccccagctcctgcaggggccctccggggtgcttgacgtaaaggtcttgaggaaggacccttgtgcactcctcttcctccatcccaaattgtcagagcagtgaccctgtgaaaaggcaatctaccttaaacacacaggaaaaggacacaagaccgttttgtggccttttgcaaacactgagacagtagtactaattgcaaacttttaatgataactctacatgtcaggtattgtactaagcactccagtcattttggcagaataattggctcttaaaagatctggaaagaggttgttgacttcaaacagcctatttatcccttttactacacaccctatttcttatcagatgcttaattctatgctggtgagacagatttaatcgaagtgttttctaacctggccagcgccacataatttactcccctccctgcctgggcagggaaaaaatactcttgcattggttatggtgagtttgtaaatttccgtgccgattcccagtagcagtgctttgatctttatgtgtgtccctcagttgaatttcagctgcaagaggaccgggatgacaaacttaatttcacattctttcctgccttttatttccctcccacttttacatgaaatcacaattaaacattgcttaccatatcccacgtactgtactgagtcttctgtgtgattatctatatcctcatggctgaaagaagtagctatgaacggcctgcagatgaggtttatgtctattaagtaatctgctcaaggtcacagtgctgttaattgtggaacccaacacaactctgacatcaaaacgtatggtttttattgctaggcaatacttcttggtcccttttgtaaaaattggatattactaatatatttgacggtagaaactgtggagttataggaaattagaaaattaaaaataatcacaaccaaacgtgaatcttaactaagtataaaatagatgaattttgtagaggagtcccaccttattctgttgtatgttctaaaaggtttgtagatgtctatctgtggcgtaattgtaatctgaaactttgtgtttagtggcaagaaaagccgtcccacagcattaagagattctttaaaaaattaagacctctgccaggttcggtggctcatgcctgtaatcccagcactttgggaggccgaggtggacggattacttgagctcaggagtttcagaccagcctgtgcaacatggcgaaacccgtctctactaaaaatacaaaaattggctgggtatggtggcatgtacctgtaggcacagctacttgggaggctgaggcaggagaatcacttgagcccaggagggcaaggctgcagtgagctgcagtcacaccactgcactcca

SEQ ID NO: 106857 - DNA, 1050 bp, Homo sapiens
tttcatttcacttagattggcatctgcacagctgccaaaatttttctctaagtcagagaacacactcctaggtaaaccttcaaaaaaggtatttcgaaggaggcagcttctctgctgctagagaaggcattgccacctcccttcagacaggggatttccgctagttgctttctgtcatttcgtctctattctgcactcagtcccttgttctgtctggaggttcctgttttcctgtacccaaccaagagccaatgaagaagtaaagaggagcaaacacgcccgcccactcccaatttcctttgctctgctgtctgccaaccgcaaagccgaccgagacggagccgctgtcaactctccaactcagctcagctgatcggttgccgccgccgccgccgccagattctggaggcgaagaacgcaaagctgagaacatggacgttaatatcgccccactccgcgcctgggacgatttcttcccgggttccgatcgctttgcccggccggacttcagggacatttccaaatggaacaaccgcgtagtgagcaacctgctctattaccagaccaactacctggtggtggctgccatgatgatttccattgtggggtaagtggggtccccctacccgggacaccgatccggggcgagcacggaggggcctcggggtgcaagatcccgggatgtagagacgctctctgaccacgctcagcgcctgccctggcaattctgcaagcggccaagccagtggaaacttgtttgcagggcgaggccgcagtaacctggggccccattttctgcaccaagggctgagacttgaggggggccctaggggaaagaggacggggaaaatttgccagccgcagggaagaaaaatgagagttcccccacccccctgcccccgcccgcgtgccaggatcgggctcttgctggaaagatatttgtagcgccctcgtcttttaaaaataagaagaaaaaggaaagtggtgtaaccctaccctggagctggctggggcggcagggtgtggacccgggctagtgtaaaaagggca

SEQ ID NO: 106858 - DNA, 1091 bp, Homo sapiens
tgtgtgctgcccagaccaggcacaagctcagacagccttgctgcttttgatagaatccatttttcactgtgaaggccaggggccagccctttgactaaatatagctccgtcagtattgtgccttaggccactaactcaggtagtttaggggtgttggccctcctcattttcctttcaaataagagttgttggttgtcaatgaaaattttgaagtgaaaaagtgaaaagtagccatgaagtttttaaaacttatccttatttttaaaaacttacaaaagatacaggctagtagtaaaggttgatttgaaaattatgtggataaaatgtgaaatttccttcatacttcagtaaaagtttggtatataacccctaactgttttctatgcaactataagcacagtcagtagttttttccaccagttgttctcttttctttctttatcatttaataatataaatatttattgagtgctctgtgtgtcaggtaccttgcaaagtattttacctgcattatgtcatagaacccaattttaaaaaactgttactttttttttatcattaaacctgaggctcagagaggttaaatgatttactcaaagtcacaaacttaggcttgtgctcttaactactgttctgtcttactatgagtcacaaggaagaaaccaaacatcttcagagttagggagcgtccttgattccagaacacttctcattctaaagagaactatcctctttcggtgatgctagtagatgggtaggtcagagcagtgctggcagctgttcatctggatcctccacagacttctctctagtttctcagaatatcttggtagagtatatgtgaaaatgtgacctggataaaagagtgttcaacaatggttccatcccctgctggtgaggagagcctcaagggcattgtaggagtgctctagcctcagctctccaatgttggaaactggcttagatgaggatagagagggcctcctcttcaagatttcaggaagggtgagggaagaacatagcaaatactatctagatccagaaacactggaaaaaactgcccataccaagacggagattaagagggatta

SEQ ID NO: 106859 - DNA, 1041 bp, Homo sapiens
gtgcaatcaggagatggtgtgacaaacctggcaggtaggccagctgctagccctgagagttccctcatgctaattactaaggcacttcttcctctcctagcagttacagccaaagccaaattttggccttggcttgtggagtgtgtgacctggattccaggccccacttaccccctcagccaggcaccaactccacacctatatacagtggccctggctgcagaggcaggcaggggccagaccctgcgaagccttgtagaatgtttaaagaattctgtttttagtttaagaacaatgaaaagaaaatggttgggtgggttcatatttgcagtgatccctctggctgattaaggaccacagagaaacatcgccaatttagagaagtccaccgtgagtatattgttccccactttttcggtgagtcagccttcctcagaaaccacacttcaaaaatagctttttcggctagaaaattggaactcagtgcaaagctgcctgtactcctcaggaaatattttgctgcctctttggtggttctttttggccttgcagcctgacaggagtcaccaaatgtggccttgagttgatccgaggatttctgttatggcaaacttttattgccaactttgcaattggtggccttggacaaatttattaacttgtatattctttagcttgcttacgtgtaaaatgaggtgggttagcaagatccttcctagctctaaaattttgtgagatttttttttcccctttcagtaacttgtggtaaaactatagacatagctactgaatcacgttgggaagtttaggacctgtatccacacccactaatagccaccttgtttcagagagaaatgagagtgcagagggattttccaggatgatccttggttatagtaggttacttagagtgtgggggaaatccttaaagccggttaacatgacagaatgggttctactgtgagttgctgccacaactggcacccttgttttcttgtttctctcctggatccctttggatatgtttcttctctgggcctc

SEQ ID NO: 106860 - DNA, 1519 bp, Homo sapiens
tttactcacgtgctcctgcagggaacaagatacagataatcccgaatcgagcaagagttcttttctggaaagcctcgggtaagttgatttttaagtaggatggaatcccgttgattcactctgaatttcaggacatttaagtagcatctgcaaggtgatgatatcagtgtgtgaaggaaagggtgtggcttccagataatggtccttcctgttgaatacagcattttcctttaatgcagaaaaaaaactatgtatgacttgatggagagctttacataaagtccaaggagccatttgaaagcttgcatcaattcgagaagcagactggactgtggctaactaaggcagtttactaatagtgtgaagagagggagtgtaatattgatatggcaaaagagaattgttgctttggtgttaaccaggtgtcccttctctgcagtgatgtttatccatgcatcgttgagacttcggaacctcaagaacaaactggagaataaaatggaaggaataggtttgaagaggacaccgatgggcattgtcctggatgccctagaacagcaggaagaaggcatcaacagactcactgactatatcagcaaagtgaaggaataaacataacttacctgagctagggttgcagcagaaattgagttgcagcttgcccttgtccagacctatgttctgcttgcgtttttgaaacaggaggtgcacgtaccacccaattatctatggcagcatgcatgtataggccgaactattatcagctctgatgtttcagagagaagacctcagaaaccgaaagaaaaccaccaccctcctattgtgtctgaagtttcacgtgtgtttatgaaatctaatgggaaatggatcacacgatttctttaagggaattaaaaaaaataaaagaattacggcttttacagcaacaatacgattatcttataggaaaaaaaaaatcattgtaaagtatcaagacaatacgagtaaatgaaaaggctgttaaagtagatgacatcatgtgttagcctgttcctaatcccctagaattgtaatgtgtgggatataaattagtttttattattctcttaaaaatcaaagatgatctctatcactttgccacctgtttgatgtgcagtggaaactggttaagccagttgttcatacttcctttacaaatataaagatagctgtttaggatattttgttacatttttgtaaatttttgaaatgctagtaatgtgttttcaccagcaagtatttgttgcaaacttaatgtcattttccttaagatggttacagctatgtaacctgtattattctggacggacttattaaaatacaaacagacaaaaaataaaacaaaacttgagttctatttaccttgcacattttttgttgttacagtgaaaaaaatggtccaagaaaatgtttgccatttttgcattgtttcgtttttaactggaacatttagaaagaaggaaatgaatgtgcattttattaattccttaggggcacaagg

SEQ ID NO: 106861 - DNA, 1024 bp, Homo sapiens
aggatttcagtttcaagaagaacctttgggcaaagtggcttgtttgtgcaaacatggtatgctaactcttctctcatcaagtccatttgggtaatggcaattagtcagcatcagttttacttggaccggaagcaaagcaaagtaagtaactggcatcatttctatagggacagattccccttttgcattctgttcagaagataagccttctcacaaaagatgcaagcacatatatttttgctctctgagatttttttgcgtttaacttccaactatttcaggttttttatatgtttacatgatgggcaatatataagctgctttaaaagttgtaagactggccaactttttggcatgcacgtttgtatatactggtgacactgctggcggtgatgttgccggtgacacttcaaagttagtaactgaaccacaccatgagaaaatcacgtatagttattaaaacattttaactacttgtggggtttttgttttgttttgttttttggtctgaagaatgccacttgaatatgtgaaaattctaaattatcctctgtgttgctatttttattgtatgttaacttaattgtttcattaatttgaagtatgtttgagttaattctgtttcattgttgtatgcctcttaggcaaaaattccttcagccaggagtttagatgagattgcaatggatttgacagagacaggaacacaaagggcctccaagctggtgacactggagacgaaaagtcagttcatcatggcaagtaatggcagtttaatctcctcaggtaacatcttgggattagagaacgtgcaagccatctttatttcgtttgttttttcggtcataaaccacttcgaaattcatcttttaatccattattttgggaataaataagtatgtcaataagtatgtatgcgacagctttgaataaaattttaaggctaattttttaaagaatatgtagaaagtcaaattataaataggttgtgcatgtcatatgagatgcaaggatggtgagtacc

SEQ ID NO: 106862 - DNA, 1110 bp, Homo sapiens
tctgtttccatgctggtttaaaaagtaaagggaaaacaaatagtatgtgttggtttacctgtattgtggtttaaaaggtcttcctccagtctaaaaagtgtgccacttgaatgaaaagcatttatcatgtgatcttaaaaacgtacagtgagaaataattatctgtgctttttcacatacatatgtttcttttgttaagaataaggaatattcctaacaggacagtcagggttttcttatcaatgcctaattcttcttatgcctatagggagagcattcctgagaaacactcttcaaaacaaaactcaggaactttaagaggggaaagtaatcaagataaaactcatttagcttaacaaagatacatattgatcaactctgtttttgtttgttgtttttaggaagccaagggagattataccaggtaatgcttttcttttctgatattactatgcaaaataaccctaaagaatcattttatgtggttattttaaataacaatggatacaaaatcaaaggaaagtagatctgtaaggcaggagactgagatctcttcgctcttcaaatagagacctattctttttgtgaatgaatcagggaatgatgctttcttacagtttttgaagccagaatgacagcgatggaaccagaagctctccaaagttctgttttctgtcatctgttaattagtgagatgaagaaatctataaaaagctttgatagcttatgctgataaaaaaaaaccttacaataatcttgtgttcgaagagttataatgtatgcacaaaaagattaaatccatcagctgcttagttaagggattaataggggctttctttcacagctgccccgaaggggcctcacccttcatacacttgacctaacagttgtattgttgctgcggagacacttaatggttctaactgcctcactggccacatccacagagggtgtttatatttgaattcaccctctacctgctccattctgtccttttaatgcaatcgttggagttgtagagaaacagttaaagggtggaggcaatgcttccctttgtaggccaatgacccctttgaaagcctggcctctacgatgttaatgttcgactcc

SEQ ID NO: 106863 - DNA, 1106 bp, Homo sapiens
actacattgagggaattcagttaatcctgaaacctcattctagccaagtctgccagtataggctcccatcccaaccattcaaccaaagtgccctgaatgtaattgactttccttctttctttttcctagagctaaaattaccatgtaggcagcaccaaagaaagaatggaagaaaaattggaaaaatgaatccccaaaagtcaataatgagcttctgaataatcaaaatgtgactgtttctgagaagggttctcctaaaacttagaaagatattttcatacttttgtagagttctagctgcctgtttatggcaaagagacttttttaaagtacacattcatggaaagacccattactatccatatttataatgccttgagataagaggattagtctcagtgcaatttaactgaacagaacatgaagcatatctttctgtaactggtccattactgttagcatcacatttatggttcttgtcctggaattattccatgtagttcagcaaccaacaattttagtcgtaccaagaactaaaatacattcagaatatctgctaacctggctgagttttagcatttgggatttcagagtgtttgcatatgtgaatgtgtgtgtgtgtgtacacacatacgagtgtatgtgttttaatcctcaactcatttcaagatttagaaataatttaaaggattagtaacagaaatcgaatgttgtaagctgtaaattctgtattaagacttgtgaatgggctgggcgcagtggcttatgcctgtaatcccagcactttgggaggccgaggcaggcggatcacctgaggccaggagttcaagaccagcctggccaacatgctaaaacctagaaatacaaaatttaaccatctctactaaaaacaataaattaactgagcatggtggtgcacacctgtagttccaatactcaggaggctgagagacaggagaatcacttgaacccaggtggtagaggttgcagttagccaagatcataccactgcactccagcctgggcaacagagcgaaattctgtctcaaaataaataaataaataaaagacttgtgaatgtaccttcttgtgataactaatcatca

SEQ ID NO: 106864 - DNA, 1027 bp, Homo sapiens
ctctttttttgctgttatttttgggtttttgtgtgttttctttgctattttttacatttctggtgattagagatagcaaataaaaagagaagagacctatcaaaacattatcatgtgaaggagattctctactgtcttggtctgaggaccaagttaccatagataccgtagagctgttttctttgaagatgaaggatagagttgccttcctttattcctcaaagcctcttagaaatcaatttaaagctgaaaaacatgggtaatatattttaatacataagactgtttctcactcatcagattcttaagattctcattctttgaaatgtgacaaacatttgctattacattttacgtggcaataatgttttctacagacttaaaaataattgaattctgtacaatttgatgccttaatttgaatagaggataaaatgcaaacaaatgctcatggaaagaattaacagtacagggatctgagttgcattcacatgcagacagactgctgaaaataatgcagagtccttgacttgttctctgaggtttgcttgggcaagtcacttaactgtatcctgaaatggatgcattcagctaaatcagtaatttctcaaatccatctcatgatagaactattttttttagttcacattctaagataaataaaatgttataagatgtaataccggccaggcacagtggctcatgactgtaattccagcaccttgggaggctgaggcaggtggatcacttgaggttaggagtttgagaacagcctggccaacatggcaaaacctcatctctactaaaaatacacaaaaaaaattagctgaacttggtggtgtgtgcctgtaatgccagctactcatgaggctgaggcataaggatcgcttgaacccagaggcagaggttgcagtgagccaagatcgtaccactgcactccagcctggacaatagtgagactccatctcataaacaaaacaaaacaaaaaaaacaagaagtaatacctatatttctctacctagcttg

SEQ ID NO: 106865 - DNA, 1034 bp, Homo sapiens
gcccaccaggcagatggcaaaatggcaggtcccagcgcatgcttcctgccgtggccaccaaggggccagcttgtcctctgtctgtcccctggttcagcttggctaaacttgcatgttcctgtcttctgagtttgagctaaaaggacaggatgtttggaagtcagaatcatcaaggcagtaactgaggtgagtgggacaggcaagatagtcgcgtgacataacttgttactttgctccctgtgggttctcttgttttgtgttcattttctaagcctgatttaaacatccattctttgcttctttcatcctgagaggcctgatttggttcagggatcaatatcacccccttgcccatataacttgggtaaatactgattgattggtctctaacccagtgcttccctactttctctgatgtcatagaatacacagaaaatgatagtgtttgtgtggcacctggagtaaatggaagaagctgctcaggctggaggtgatcaccaaattgtctctggctgcctccagtcctgaaaagaccaatagctcagtacacctgttgcctcagtacactggttttgaagctgtggttgaagctagtcatgatgaccttattcctctgccagggattggttaagggtaaacataggacccagctctggtcaatggggagccatttcttaaaaagctgtctgttcttgaaaataggcatggctgggccaggtgcagtggctcacgcctgtaatcctagcactttgggaggccaaggcaggcggatcacgaggtcaggagattgagaccatcctggctaacatggtgaaattccgtctctactaaaaatacaaaaaattagccaggcgtggtggcaggcgcctgtagtcccagctactcgggaggctgaggcaggagaatggcgtgaacccaggaggcggagcttgcagtgagctgagattgtgccactgcaccccagcctgggcaacagagcaagactccgtctcaaaaaaaaaaaaaaaggcatggaggccaggtgcagaggctca

SEQ ID NO: 106866 - DNA, 1022 bp, Homo sapiens
gcaccttgggaggccgaggggggaggatcacgagttcaggagttcgagaccagctggccaacatgctgaaaccccatctctagtaaaaatacaaaaattagcctggcgtggtgttgtgcacttgtaattccagctactcgggaggctgaagcaggagaatcacttgaacccgggaggcggaggttgcagtgaactgagatggtgccactgcactccagcctgggcgacagagggagactacgtttcaaaaaaaaaaaaaaaaaaagtagactaagagacaatggagactggggagggtcagagggtgggaggggatgaaggatgagaaataacttaataggtacaatgtacactattcttgtgatggctacactcaaagcccagacttcgccacaatgcaatatatccatataacaacactgcacttatactcactaaatctatcattttaaaaacccacattttacttatactgttttatctgactacaaaaaactgaagcaattcttgattcggggggttatggtgattagttttctttggatgcttacccttcaccagacaccgtgctaaagaccttatacagaatattttacttaattttccccaaactttttgtagtgaatactgataatacattgtacacatgaggacattgagactttgttgacttaaggagcttatatggggtctcacgggtcctgaggagaggagatctgaagttgggtgggtctcttttagaagatttagctcctaatcaccatactatcactattgtagttctctaattttagcatgagtcggaatcctccagaggccaactgaaagctctgatcgctgatctcaccccccaacaatttctgattccagggctgcctgagagcttgcatctctagcaaattcccaggtgatgctaaagctgctggcccagtgaccacactttgagagcccctattatactacatcctatcttctaaaaaattgccctgactttggaaaccttgaatgaaaatgatggaatt

SEQ ID NO: 106867 - DNA, 1049 bp, Homo sapiens
ctgcaagccaaggagagaggccccagaggataccagctctgttgacaccttgatcttggactttaagccttcagaaatgtgagaacatacattttgttctgtaagccatgcagtctttggtattttgttacggcagccctagcaaactaatatagtgcgtgattgtaactcatctaccccaactcattgagatcttaacatttctttgctcattcccagatacccaatatcacaagtatcttgtaccaaattttataggtggagtcaagtgctttaattatatttgcatatttggtgtgttcgtagatcttaaaacatatccctcctgcatgttaatagttgtagaatagattcccatgatgctctaatctcagttttcctttgtttctctctttagtttccttccaaatactgtccactttgtttctattcctgggttctggggttttcaagtagatgcatatttctttggtttatagtgctgcttgttgccggcaggaatggaatctgagaactaaccagttgtgtgtaacctcagacaaggtatctatttccctgacttggtttccttgtattcctagtataatagcatccatattatctttggagtttctagaagcattagcagaatacaagtgatgtgcctggcatagcatatggcttatgttggacacttaacaaatagtagctattgaaggcaaccagaagatatctgtttatttctcttttttctgcctttgtgatccaagttgacagcagctgtgtagtctttgttaacacccactaaagaagcaagggatttaactagttctttgcacgtgacattagacactgcttggtatatcattgtttacagggcttaatccctcaaggagcttttgtcgccgggcagacacaagaaagatgtggagagatgacgtgataaggcagaaaatgtactgagtcattccagtgccagctctgccctgtgtaacattttacaagttgctttctctctctctttctgtacctcatttatcttatttgtaaagtgggggcttagactaaaa

SEQ ID NO: 106868 - DNA, 1036 bp, Homo sapiens
gctagggtgtctgcactctttgtctgctgttagagcagagaccgaattgctccgaagactggaatagcagtatttgtaaatatcctgtgacgtgaactctggttataaagactgcatcgtcccccttctgtgattctccagacatgctaataagtgggtgctggaaatgtcatgatcttctaatcacaaccttctttttatgagccttttcagcagacacccgttcagggcaagctccaaaccctttctggctgctgtcgtttctggcgggtatgtcacttgtatgcatcactctgaccgcagcgggagtgctcggaggagtttacttttgctttgcgagactttttggaaggttgtctatttttattaattgtggcataggaattactttgtcagaaattttggagcccaggagtctaaaaaattacagggtattattaaatatttaagaattgcttaatttctccacgtggtatgagattttggctgaaattggatccttgggctatttacatctagtttagcattacagagccagttttgcctattaaaacaagtttgaaaattgtttaaaacaatctggtggataagtgtgtgtagagattttgttgtttctttatgttcgtggagatgagtagtgaacatagcactgaaacagaagcaatcatcttagcttgtgaaaatcctgtttgagtaataatgggaaatgttatcttttaaaatgttttggttattttcttttccattacaaacatgatataagttcctcctagaaaatttggaaggtatggggtgagagtcaggcgtaacctaatcacacagaaatccatgagatgttgaagtctcataaaatgatagagctggaatgcacttttataactatgtggttgaaagaaaaaaacaactttatgtcaataatcacaacacttctgataccaaatgtgtggattttccacactaagcagtcagttctccaactcctcatacaccaactggatgtcctcaattcaattcagttcaattttgatttcacaaa

SEQ ID NO: 106869 - DNA, 1024 bp, Homo sapiens
tttgcttttggctggactgttgggtaacagcactatttgttgagggacttaatttggaaacactgggtatttcctccttttcgggacctccactcactcaccaagaagcagcaggtgcttggcaggtttgcgctccaccccggaagggctctgggtgttctcttcaaaggggaaccaggaaaggactcctcacctttgtctaagagtaaaacgttcaaatgtacatttatttgtccctgagttccctgtaatcctttttttcctgcattttcatctatttttagtgatgttgtattttacccagagatgaacttgtgaaaatctttacccccaaattaaaagtgtgtgtcacagctgaatgggggagagagagagacccatgccccaggacggaggacacaaatagcaaagggtgtgaatggcaccagaatgtgggaatctctgaggatcagaagccagatgtggtatctgcagagcacagtaggaaagaaagacctgggaatttgaagtttaaaatggtttcatgtatcaagtcaggaaatttaggccctgaagtggatatgggaggcgcagtggaaaagttttaagtagatttggaaccaggaagatatttgtgtttgaatccaagatctgtcacttaaccacctttttaaccttgtgcaagtcaggaaaccttcctgagtttcagtttccttatttgtaaaatggagacaggagggaagaaagctaactcctgttgagtgcctgttatgttctcgggacagtgttagggaaatcagaggaattgttttatttaaagctgtccagtcctgcaaggtaggtataattggcctcatttaatagaccagaaaatggaggcaccggagcctaacaattttctcggccccacacagctggtaagtgatgaagccggaattcaaatctgggtcattctgactgcagagccaatgcgatttttatggtgccagcctgttgcctccgtgtggggctcataacttactccacagcggtgtcttattcaagt

SEQ ID NO: 106870 - DNA, 1019 bp, Homo sapiens
ctgccaccggtgcctcataccctttattctaacagcactcaggtcctgggatgcctgaagccggtgaggcagaatcaagttccgcccagagcttggaggagtcggagggagcgatggagaggcgcgggctggtgaccccctctttcccctcctcctggcaggcaccgctccgcgcctcctggcaccggcgccctttctctgccggggaaggctagcccagcccgcagccccgtgcggcgggggccgagggcgccccctcccttcctccctctccccctccccttccttccctcccgatacaatgactgggccggaacagcgcatcagccgagcctcattggcagcggccgccccagcccccggagaggcggcgggcgggggctgctggggagagagggagccgaaagccccggctgacagcgagaggaggcaggcaggacggaaggacgcgagaaaggcggcccggggcacagctgtaagtgtggagcaaagcgaggacgcacggcgagcggcggtggcgggggcgacctgcagacccgggccgggggatgcggcaggcgctggctgcccagagagcccgggagtcgggctgcgtagctcacgtgctgagctggagcttggacagagaggaagaggaagaagaggaaggcagccgccgccggggaaggcacagcgcagagtggacttgcaggactggcgcagagccgggtccccaggtcccgcgcggtgcgcagccgagacaataaagtagccgtctacagccccggagcgccgcagggaggaggtggcggagcaggtaggtgggcgaccgccccgggctccccaagcgtgctgccagggcgaggccgcaagacgcggccacgggcgcgcccggtgcgccccgggcgcagcgcgcacgtttggagacccccagcggaggtgcgggtcccaggagtttgggagagcggaaaaccccgccctggggctcgaggtctagtgcagcctccgctggagtccctggggcacttggcacggcgctt

SEQ ID NO: 106871 - DNA, 1033 bp, Homo sapiens
atgtccacatgaccaaactgtttttcacaaaacttctgctgaataaaatttgaaatactactgtcagcctgttttcctgtcttaatgaattccagacagtttgtagagtgtgggagcttccaaaacagagaggtggaatggatgtgaccagccagcatctgttttgtcacaaatgaggatgtcctgacataatggaatcgttccccttgttctgaatctcaccaagctgttcacttctctgatcatgaagtacagactgtgagaaggaagggcaaggccaatgtcatgtaacacaagccaaaagaaaatttctggattccttatttaccaggaaattcagcctacccctgtgtttcatccacttagacccaagcattttgatttttttttttttttttttggcatgttgacattctttagagaaaaagcgctgatctgttcttgttgtaaactggttaagacttctaaccagtctaataagtctaaatttcagagtaagacagatttgaacttaaattccaatttggccacttactggctatatatgtgtctttgggcaagttattcttgtggcctctgtttcaacagaggctgatatggtttggatctgtgtctctaccatatctcatgtcaaattgtaatccccagtgttccaggtggggcctggtgggaggtgattgggtcatggaggcagtttctcatgaatggtttagcactatccccttggtcctgttctcataatagtgagtgagtcctcatgagatctggtcatttaaaagtgtgtagcacctcccctgtcattctctcgctgctgctcccaccacgtgagatgcctcactccccttttgccttctgccatgattgcaggtttcctgaggcctcccctgaagctgagcagatgccagcatcatgctttctgtggaaccgtgaagcaccgtgatttaatcagcccatggaaccatgagtgaattaaacctcttttctttataagttacccagcctccggtatttctttatagcaatgtggactaat

SEQ ID NO: 106872 - DNA, 1007 bp, Homo sapiens
agtttttgaggtaaccaggctcagcttactcagggcctagaggataaaggtgatgattttgacttttgcaagcattggaaattagcatattatagttatcagaatggtcattattgtaaacattaactgagtacttgttgggattgcttggaattcttttagaaagaaggagaaaaagaattggtttcagtaggttctgtactttcaagttacatagcagatagatcacacaatttagtgacaacagagcacaaagaacaataataataacagtagcatctagcatttttaaagccctctttacagatatgccttgtgttagtgctttagcctatcttttatatatttctatagtattcttacagattatactggagttaaggaaggtacctatgtaattaaaaaaaattctttctgtgttagaaaagtgaagaaacagaaacatcaggaattaataatttacatctaggtgaattataaacatagtaaggcacttactatctaccaggtacagtatttaagtgttttatataatataattctaatatgaggtagataggatcccattttataaatgaagaaacttgtgcttgtctgttttctgtcacttgtctatcttaagttactcaaataaggttgaaccgcgattcaaactgaggactgtctgacttcaaagctcactctcttattcaccatgctggcagtggtttccatgtattttggtgttcggaggtttggagggagaggcaggagtgatcaggagtgacaacttatgttgatttttgaatggaaaggagactaggtttcttatgaagtaaaggcagaagactcagggtgtggttgcacattcaaatccaaaacaaatagttatatctattaaaggtgctcacagcatgcctgtctgcatagtcctttgtttctaaagctgcttctgaaggaggaaaggaggtaggctgtgaatcctccaagaaaggtaggaaaagatgggatggtggatacttaatcat

SEQ ID NO: 106873 - DNA, 1054 bp, Homo sapiens
accaagaaaagtgtaaacatccaagttcccagtgattctaaccctgattcattaccttgcatgtgtctttaactaccacaagaaatgtttaagatttccattgagatattatcgacagggactcctgggctgcatcataagcctgattgaaagcctttagccttgtaatgatctctttttggaggacaatcagggaattctttgcacctttatcagagagtcagggctttcctgagcaaacaaactaggtctttacctatggagctgattttatgaagagttttggtcagcattagtcattgtgaaaccatgggcctcctgccctggtttatctcgacagtcatctccctacagcagaagattgaatcctcatctctccatgagtctgagcatctaaagatgttagaggtacattggtttgattcttgctggggaatgtgtagtgggtactggtcttctgggaatagtgtctagatgaatgtttaataatcagtttaataggttgatgggctgtcttatttcctggggttggaggtttaaaccaggacaccctgtgctaactctgctctttaccttgccagcaatcctcagtcgtcctggtaaacaacctctgagttaaataccttttcttttctggagaggttaccaacaaaggaaaaggctttgatgtcagaacagggggcataaacagtgtttatggctgctgttaaaaatttctcatctgggtattttcaaaagaattccaagtcaaaatatatcacttatgggaagtatcttcttttccaatatgatatcttatgaagttgataattattttcatggtttaagtagtaattgatgacattttgggggttggaagatttgtgggaaggaggacatagattttcatcagatgtccttgcgtcctttccttgcgaggattattgatctctagtcttcatatgtaaggtgttgaatttatttaatgttattaactgaatctatagataaagaggtagttttggagccaagtaacctgttgatgtaaagtctattttaccttttatgattacca

SEQ ID NO: 106874 - DNA, 1025 bp, Homo sapiens
gtgtttttgttttgcacatgcctcagagaacataaaaattaacacatttccttaacagagatgagaatagagtcctaaacatcaccagataatttcctactagtgataagaaaaattattctcatctaatttttactgctttcagtataatgtactgtaggatgagaggaacagaccagttcccttgataaacaccttttgaccttattccatcctttccaggaggtggaaattctgattttcccttggagtgatattccagttcatttaatgcatgtgaacagacaggttcttttccaggtgtgagaacaatactggtttggaagtagagacctaggtatcctctgacagattgtggggaagttgagatacctgaaattaccttttgcttggatgctccttgtctctcttgcccatctgtacagtattagatttctaacaatgtgatagactcttctaatattcctagttattcttgactgatagtttttgttgaacaaatagaaaagaaaggtaaggggctttatctgaatacagaatacttagtcaagtgtttgtatgtgtgtgtgtgcacgtattcaaaggagatatttatatatgatatgtaggatatatatatatatataatttatatatttaataaaggagattatttctcttttattaaatgccaagttgggttatgttgctttctgcaccacagataatgactaaggacctacttactctaatcgaatgatctgcccaaagactaatggtatactttattatacttatttgcaaggttctgatagaggatgttttaaattatccagaatatgtttttttttgttcgtgtatgtgtatttctaaaagtggtgtttcacaaagtgtagtttaagagttacctgtgtcagggtcacctggggatgtgttaaaaataggaattcctgggtctttggactccagctgtctctactgatttgaggttttcaggaatctgcatgtcgctcagcttctttgtgatttttgtcccactatagttt

SEQ ID NO: 106875 - DNA, 1063 bp, Homo sapiens
aataacaggattctgataaagattgagctgtttcacttgagactctgtgggcctatggacttgtaatgaaaaccacagttattgttagtttatttccatgtgtaattaaagacaggaaaaaaatacaagccagtaaaatgagtaatgcaaggaaattctgatgcacagcttccttttgaagatggttttacacattcattcctgtctagttccctgttgaagattcttatcttggctgcgtagattgttcagaattttcaccccataggaaaacaactaaactggtttgcctcttcttggctgggggagccctccaagcaggtattctggctgagctaggccatattctctcttaagttacatgatttcacctatcatgttggttggtggtcttattgcctgacttctcttttatttacaattcctgtggtacattatagctttctggagccaggttaagaatgagatagtctgcccccaaccccaggaatgcttggatgttattttctggtcttggcaacctaaggatctcttaacttctttaatctgattaatggggaattcagaactatagttacaaaatagtttgcctaagctattactgctttgatggaattaatgatcaaatattggctaatgcccaaagcagattcgtgaactgtgcttaattttacatttcccttctcaaaggcaattgtggaacaaagaccttttatgttggttgaacccaattaatgaatggaaatgtaatttcatttcttctacaactatggttgaatttgatgagtcttgcttgtctacaacaacatgcatacgaatatcactttgtttttactaagtgaagttattaaggcaaaacactttttgttgaacttctatggtggataagccactttgatacctttatttgggtcaaaatgttctttaaacagcctttgaggcattgacctcatcaaagcagttaattttccaatgacccattttggagtaacatggacacaatggcagcttctctagacttgatctaaagtgtagcatagttggtaactaagcttcgtgattg

SEQ ID NO: 106876 - DNA, 1038 bp, Homo sapiens
tttgtatttctattagacggtgctgcttttgagagaaactttaccagggatgttcatggaactctgtccaagttacactttgatgtgactctttactctggagtagatcagatatggaatccaaaccttggaatttctaagttagcttcttagtaacttacagtttaaatgtagcaatgaaaacaagagtaggatttttttttttcagttgtaaaagaaatttctagaaactaagagctttacagagcttaaaatttattctcattgttttatttttaaactctaagtttctgccaggacaaaaatgttcagttctttttggattctgatggcctggtaaaacttctttgtaaacctaggggatgtgatagaattggcacaggagaaaattaatttggttgggatccatgaatggaatggaggtgatgtgcaggccttgcagtctgttgtaatcaatcattatagaagttttgctgcgatgctggcctgcccaacactctgcactttgggcaacatcgtgaaaagatatcttcctgtagatccctgctctggtgcaatacaagtgtcaacatagaaatagaatgtgtgttattataggccacatatatacacattcaataaaatgtctcagcatttactcgtgtgtgtgtgtgtgtgtatgtgtctgtgtgtgtgttctggaaaaaagttaaatgagattttccacaactttttaaaaaaatttcagcctcgttgtaggatattttccaaacccacattttccagcaatttgagccccaaacttatagcaatgaggcactttcttgacaaaggtgagtcaaaaacaggaaccctttgattctgtttgtcacatgatgctggatgttataaaataataatagcaaggagttcatttctttccctttgatcgtcagacttttagctgcttcacttccattgctaaagccaggaattcagaagtgtaggtcagatgctgtgcgtagaaaatgcatttgggagcatacacattaaatgggttataaatagtatctgccctga

SEQ ID NO: 106877 - DNA, 1051 bp, Homo sapiens
taaagtcttcatttagaaaaggaaaaaaaaaaactaaaaaaaaaaaaaaaagcaaaagttcaaacgggattttctttttaattttaaaattttattttattatgctttttgagactgagtctcacttactctgttgcccagactggagtgcagcgacgtgatctcggctcactgcaacctctgtctcaggggttcttgtgcctcagcctcccgagtagctgggattacaggcacatgccactatgcctggctaatttctgtatttttagtagagatggggtttcgccatgttggccaggctggtctagaacgcctgggctcaagtgttccacccgccttggcctctcaaagtggtgggattacaggcatgagccaccatgcccagcccaaactggattttcttgatagtctctctctctcagaaatattttgctcttatcttctgagtttatagatgatattttacaacaaaggtctacaaactataaaccacacctggcctgtcagcatcttcatggatgcccctacaattaagaatgattttcacattgaatgtttttccccccagccgtttaatgttgaaaaaacaaacagagaaagaacatgtggtagacatcatacctggcccaccaaccctgcaatatttgctatctggccctttacctacaaagcttgctggcccctggtttagaatgtgcttgctgtgtcacccttgctattagatatgtaatcagataaaaagtttctttcttggattttgttaattcacccattgaatatttctggagtatttattccattcctggcactgtcataggcactggggaaatgaagtgtaaaaagtcacaccaaaacacagactaaagggcatatttcaaaagtgacagagcttgcattcctgtcgagagaaaaagaccaaacctaaccaacccgaacagaaacaagaaatgaaaaacttaattaccaggaaaataaaccagctgagtatgagatagataataacagcaatttctgtgcttccccccttgaactgcactatggaatggtgact

SEQ ID NO: 106878 - DNA, 1100 bp, Homo sapiens
tgattactggcatgggtgccagctaataagtaaatcagtcagtattgacaccatgtttagcctcaagcatgcttttctctggaatgcacatttggatgaactttgaggaaaattattaactcaccccaacttaaggagctttgaccgaccagagatttcaggattatgtgtacatagtttcaaacgttgtattttaagatgaagaataatttaagaagattagtgagcatccttcattaatctggagctattttagtaataataaaaaagggcaacttgttttcatcttagaagagtaataggtcagttttatttataggtgatatctaatcaattttttatttagcttgtataggatgattctcaagtagataatgttaactcacctagaataaaggaaaccacttgttacctaagtatacgacattttaatagcttttaaaaaattcaccatactagtttacacaataaaatgtttctataagtctgtgtatatgtatatataaatatagaaggtaaatatacagattatattatataaatagataaatataaaatcaccatggtattttgatatataaaatgagtctcattataatgattccactaaatgtacaacctgttataaaatgagtgataatctgaccctcatttctgtgttttaatcttgggatgatttgaagtaaggcataatcatgtatgaacatattcctggagtctgacatgagcatcatgaacttgctaattttattccttgatggtttatataagtgtctgacaaatttaataggaagcagagctttattttttttcattatcagctagagaacaaaaacattggcatctgaattgaatactggaatatcgtgtgagtgtgtgtgtgtgtgtgtgtgtgttttactaagattcatgccactcaaagtgtgacccatggactggactgcttcatgaactgtgtggtgctgtcctacaatatgctaagaatagaaatagagtgttctgaaattttagagcaatcggaaagagtagctttaggtctgttggacctaataatacaaatttgggcttgcatatttgtgtttgttttgtttttcatctca

SEQ ID NO: 106879 - DNA, 1024 bp, Homo sapiens
tcactgggcacagatactgcagcctgcaccattgacgtccccaatgtggaccactagaccacacagccaagcccctgacccttagggcttccagatgtagctgcatctttccttgccagtgtacatacagcttcacactatttgtcccagatatatctgattgagaacctgaaggcatatgtctccatgctagctacaagagagtctgggaaagtgaacctttggcttctaaagtcaaagctatctctgtctccctctacattcattagaaggggaatttttcaagcacaggaagtatcttaaaaggtgctgggcagcctaaaagataatacgtgtccacttgacactgcctttgagcttcagtagcgcaataccttttgattttttaaggcaggtattactttctaccttgtttgaaaacaggagttgtgtttgctttaattttttaatgtgcccacagagtactgagcctgtactctcaagaggcactcaatatatgaccgaataaaagctgaattatctgtctagtgggattttataggtgacttaaattctgttcgtgtgtatttaaaaaatttccaatcataaacatttgtaataaaaatagttaaagtttccaaaacttgatctaactgggagaaaaacaataggtctgaagtatcttatcttcaaatctgaaatccaaaattctctgaatgtcgaaggattttttttgtctgatacctcattggcagaattacctgacctgaagtgacacaaggctatttatagtcttcattgttccacttaattgaatattcatatgtttcccggcagaaatattaatgtacttgattacaaactgttgccctgatctcactggagtactatactgtatatgatctctattatctctataaaatctggaaaactctgatgttcaagactcatcagtccccaagggttttttgaagtgtgtatgcatgtgtgtatttgtgtatacacacttgcataatatgtacatagaacgttctggaagggtgca

SEQ ID NO: 106880 - DNA, 1015 bp, Homo sapiens
ttaaagggacttgggagaatgttagacattagaataagtggctgggttctaactccagagaactttggttcttgaaaaaaaaagtgaagattctccaagccgttacaaatgagctttgtagtgatctctgatgaaatgataaaaacactgcttttcccactggaagataaatgccccttttcattaactatagtatgaggaacaaaatcatgtgattttcttttttttttttttaagtttaaccttaattactttttaaaggcagttttcattttgtgattacttttttttttcttccggtgcctagcatagttgaggattttatcttcttgtctattttaggatactctaatgaataacggaattttgacgtgctctttcaaaggaagagtctagttgcatcctcccagccatcggctggttgagctgtcctacccacttcgtttcagctcatggaggccaccgtgaggggctggggcatgtcagtggcccacagctattctgaatggtagttatatctatgtgggggctcagaagggaaccgactttccattcattaatgttcagtacccacgaaagaaaccgatatttaaaaaaaaaaaagtaagggaatttcagttgattttttgaaaaacgaaaacgttcacattaggacctttaaaaatgaaagcatttatgttctcagtgctgtggatctcacatataaataattgcaccccatccccctccccccacacccctcctccccaagtctgaaaccctgttgcaagggctgtgtgaagtgggaggttaatgtggcctctctttctgggacatcagtaattcttgaatattttgggtaagggtagaaaagtatcccatttcagctgatcagtaatttaggagcttttaaatgctgatgtaagcaagggtatattatggaatagaatctgagatgatactataaagagacatctctgttgctaagggtcagtccagaccacactcctagaccttacttctggtcctccttgca

SEQ ID NO: 106881 - DNA, 1005 bp, Homo sapiens
aaaaatcatcaggctactccaaaatcatgcagtagacaacacacgatgtataggaaaaatggggctaggagcacaatgctaaaaaatttcatcagtgacatctgaaaaaagaaaagataggaagctaataaacacagtagacagatttataccctttaatttaagcgatacattaatacaacaacaaacttgttactttgctttgaataacacctggattttgcttgtagaagtggcttcagaagagttgcagctggtgagttattatgcagtggtagaaggaagcttatctgaaactggatcaaaaattatagcatcagaagtgaatgagtgtgatgcataacactcttagtaaacggaggtagccggtagatgtttgaagtgtgtgcttggtgcagctgggtgcagttttcagggtgttcacctactgtttcttgaagacagaatcacgcacaagcaaaccaaaattcttgggggatatgctcaagttgtttactgtgtaacaaatttgcatttccaaaatcaacgtgatggcagaactgactgagatggatgaaaaaaagctgcactagctctaggtatgtcaggagcccagtgtggaacccaacctccccatcaccaccccaggggttccacagagcactgctgtgtggtgtaaactttattttgtttgtttgtttgtttgtgacctggaacagacacagaaagttatttttcttgtggagagtttcggtcctacctacatatccttccctggctggagtctggaggtgtgccaagggctttggcattgacaactttcagttccactgccagatgggctgtccagtaaagcaaatggccttgaactgaaaaccctatagaatacctcgctccaggtccttgccagggactataaccttgagtactcaatgagtactccgtaagtactcaatacttatgaaatgctgctatgaaaaaccaatatctatggattacagtgtgaagaacagatgttcatttgtt

SEQ ID NO: 106882 - DNA, 1036 bp, Homo sapiens
ccaagactttgccatgtttcatttcttgagactttatatcagattttctaaaagccattggggaagcccttcataacaggaattcttattttgattcagataacacatgggtatttcctaactaccatgttcccaatcccacatgcttcatagcctaagagctctttccacatttaatgatgtgctggccacattatttcccatcagcttcaactccttcttttctatttcatgaaaaaattcttgttcatgaacgattaggttttcttctgcttattttccgtgtagatagaatgaactcagttgttacgatgctcttgcagaagaacaaatttaaagctggaagaaagctttgcgaatttataacagcagtctgttgggttcagagagaattgttggaatcctatgctttcctttcatttgtgtgcttttcaagtgaggggaacattgtgatttttgtagatggtgtcagcatagatggcagagataagcagatatcctggccagcgttctggggaagatgaaaatgcttgtgttttctcatgactttatttttccagagctgactctatggcaatatcactctgacaaatattggctggccatggaatattttaaagagcaagggttttgtgaatgttctgtctattaccatggctgaggaatcaaaacacaatattctccacacatttcctcgagcactcatggatggattccagtatgatactttcatgttagctcttagaccacaggaagaatttaaaataaatgattactgaaaacacaatgaagaagaatcgagtagaatgttttgtaccatttttctctttctgcacggtaatatcatgctcagagtggtgacaaagactaactgagtgcaaaagggctttgcaaaaatttatgttttcagatgcttgttgtgaacatgatggcaatgacaatcatgtcacatctgcttcgctcgtgatctctatccttatgtaaggaaagagcagacactgatgatgttcaaaaacaaacccaccacagacatccc

SEQ ID NO: 106883 - DNA, 1064 bp, Homo sapiens
gtctgtagttttcatatgaatctcagaaaagtatttgaccaaaaagatcaaggtgtttattgtttataggatcccccaccctcccataagtaataagctcccagaggaaaggagcatatcatatttatgtttatttccctagatggatataataggataatatttttggagtgttcagatgaatgaatgtagttactagttagacaatgaggtgatatagcctgtggcttaagaacataggatctagattccaactgtgccttgggttgaattccttctttgcaaaccgtttggcaagtgatacagtctcttaaagtctcattctccttattggtaaaagggatactaaaataatattaaaggtagaaggttgttattgaagattaaaataaggtaatgcatataaaatgcttagcttgggaatacatagcataccttccataattagctgctattattattacttaagaaccttttgaaaggggccaaacaatgaggttctcatgattttcctagtgactattgcagagaaacaaaaacctgcaaaggaaagattgtttgcatgctgcttttgagtcttaaagacttagaaccgatgtgctgtcattaactatggtgccaggtgcaaggcagctacctccttaaaatgtttttcttgggcatttccattccctgtggccttgaccctggatagacagtggctcaggctccccagacaggcacccagaatgccagctaatggaaattttgtgatagtctgcccctgaggatttggacatatgttgttttgtgtctaaatcaacagaaataagtgcagctgtagttaccccctctgcataatcatctaagtagcctgtttctttgcatgctcatggagcccccaagtgctgggcccatcacttgccacccactctgtgcattgcaaatgagtacagtaggtcagataaaaggcagaggctggttgggcatcattgctgacttacacagcaatgatgaatagttacacatagatcaagacataaaagttatttataatagtctggtcaccagggtcacattggcaa

SEQ ID NO: 106884 - DNA, 1026 bp, Homo sapiens
taatattcccacagaaaagtatacacatcttacatgcactgcctgaggaattttcaccagatagctagcacccaatctctaagatagagcatcactagcacccttgtgcctcctcctagtcaacccctcttctaagtataatcactatcctgacttctaacaccatggattaatcatgtctgggttttatttaacttcatacaaatgaaatcatacagcatgtactctcatatctggattctttcgcttaacattatgtatgtgagatttatcccttgtttgtatgtagcagtagttcattctcataggatattccattgtatgattacatcaccatttatccattccactgttgatgggaatttggtttgcctagagttctgcactattatgagcagtgttgcaatgaacattattgctatatgctttttggtgaacacacatataaatttatctggtttgggttaagaaatggaattactaggttatgaggcatgcacatgttcagcttttggtagatactgcaaaccattttccaaaagtctttctgtgaatttacaccttcaggagcagcatctgagtgtgccatttgctctgttcttcaccaacatttggtaatacatctccctttcattttactgaagaatacgtagtgtttttttgatagggatggtgagtgcatgaagagtagtactccaggcaagagaacaccccaagcaagagtgtacagctagagttagagaataagttgtttatattggtttgaatcattacaatagataagtccagaaggataagttggtgcttgattgctagtctaaataaaacattaaaaaaaaattcattcattgtatagtgatgaaccattaattttgtgaccatagttgcctgaaaacagcaaaatcgtgctttaggaagtgttatctagtagtaggtgtataatattttgggggaagttgtcagaacaacctagtagtccaggccagagtttcaccatgtcagaatatctgtgagaacagagatggt

SEQ ID NO: 106885 - DNA, 1050 bp, Homo sapiens
gagtctcacaggcttaacagaaagatacatgagcttaagcatttgaattagtaaggggcttccctattgaatagttaaaatatcctcatgagtctccacaatatgccagatgaaagaactggatgtgtttttattatataaaaaagacttcctggccacattgacccccgtggtaatttatgctttattgatagtcatcattatgggttaaaaagcactacagtgaaagtttctataacaacatccaaaaatcataactcaagtcacttatattctaaagatcttgatggtccatgctattacaattcatatgctttatagttctgagtatttactaatatatttgcattgttttagatgatttttgaaataattcagtagactcacacacttttgatatcaattttcttctgaaattatgtttgcatttttggtttttcctttcccatgcaccttgcaatattagagctcttgccatattttagcacttaacaactggaacttcatttctggtggtttttctatttgcttttaagtaaatgtcagtggtaataaatcttctattactatattgaaaaagtcatgagtctccttcacaaatattacctatttaatcccaacaattaaagaaaggacttagctttgaaagaccacttaatttgaaagactcttcagttagcacgcttttgaacagagattgtgaacatgtgtaagcaaaatctaattttaactttgctctactaaaatcggtgggtgtgatctgtgttaaaaatatgtaaatcagtacagtggcttcactcaaggttataactgcaatcagtactagaatattggctcttgccctgaatgtgtctccttttattgacttctttgaggatcagcttgaacttaaaaaaacatttagctccagataatataccagttattcagatcttatttataaatttagatgttttttgtttagtaatttataactttatgaaaaggaaatgaatccgaattggagcatatgaatcaggtaaagcagggggctgttaaaggagagaatgg

SEQ ID NO: 106886 - DNA, 1048 bp, Homo sapiens
tgaagcagccagtaggacagagggggagaacttatgaagcaatgtaaaaacacaggaacaaagcttggagaaccaggatggtaaaggttttgaaatggaaggttatggcatgcatgtctaggattgaaaagtgtctattgggttggtcttttgtgtgatcactgtgaccttggaaagaacaggtttgggagagtggaggggaatggctggagctggtaatttgttgaatgaatgggaagaggaaatggaaacaagcatttattcattcatttacccaacaagtagttattgaacatctttgtattagggatctaatggtgagtgaaaacacataagatccttgttctcctggggcttactgttaagtagagaggtgggtacttagtcaaacaatctccctaccaccacccaaaaagatgtatgaacactaaaggctacagtaattgctgtaaaggaaagaaagaaagttttgtaggaatatgtagcagagaacgggggaagtgtttgggccgggaagagttctccaactaagtgatcttggagctgaaggaagcataggtgtgagctttgtgaaagctgtggtgagagaaaatttcagcaggtggagaaaagcagatgctgagaccctgcagtgtcagagagctagaagctccaggaaataagaagtgaggtccagagtggttatgtgtgaagagcagtgatgagaattgtgcactacaaggctaaaaggtgggcaggggccaggggcctagggtttaagctcccaggacttaatccttaagaccatctaaaggattattgtctttattttaagagcaatgggaagccatggaaaggcatgggaagccatggaaaggtataggctaggggagccacacctgggttttaaggagtgtagtctgctctttgcagagacagcgtaaacctgttagacctttctgaaccaacatgggtacatggcacggagaaggattctcatctcagggggttatcattccctcttctgagtgtggagtcatctaagctcttcagaaaacctccagctcag

SEQ ID NO: 106887 - DNA, 1041 bp, Homo sapiens
tgtgatttttcaaaaaaaaaaaaaaaaaagataaattttaagtcaactttgctactatcagtgttaaaattagttgtatttagcttcatttagagcccttttcctaaatatagtgtgttgttaataatgcaagtgttttggctttaaaaattaccttttataacaatttttactatttccattttgccaagatttagataattttcatgggtttaagcataatcctttaaacttaacccaagtttttagccctgtcaccctgactctatccttctgttcatctcctatccctcccccaatccccacacttcaattttctttaagattttgttagagtgcacttagagtgactagagtctgagcccatggaagtttcctattgcttatttttctcccagtggcacatggtctaatcacctattagagcgagaatagttggtcctcccctccgagtctctccacagttctgcatagattgcaaccagatgatgacattaattaatatggcgaattctgaaagcaagcatttaaaataaccctccctgtctaattcagagatcacagaaagacttgggcagtactttgagccttgacgacatagcgtgtgctgagcatggcctcccttccctatgtcatcaagagtccatgtagtgtaggcaattaagggacccatttctcccagcatgtgtcacccttgcaattggaaagtgtccactattctgggcctacatggggatagtagagggagctggcttagtcaggcaaagttggggcaatgggtagtagtaatgtgatttgctttataactgtttgctttgcattggcaactgagctgtggccacactccaactggcagtggagatggaaccttaattttagattgtgtccctaatgtttggtgaaaataaaaatggagaggtgaccatgagttgacttgagactttttatatgtgagtcatagtatctattaggaagaattgcattcatattatgtaattatcctttgtttagtttttctttttttttccagtaatgaataat

SEQ ID NO: 106888 - DNA, 1116 bp, Homo sapiens
agatggtaagcacagcctagtttagaacattagatcaatgagctcaagtcatgggtatgatttttcagttggcctattggttgtcctctgttctgtgacctgagaccttcttctgagcctgactaactatcttgcagatggatgttcttgctgtggtgtaggtaagagagtgtggacaggggaggcattgagcctagatccagtttaattaccatacaaatatcttaggtcatgaggtagctagggtcatcttctctaagggcagctaatttctttgcttatgccaagcaacagccttgtcactgggggcttttttcttaatttggcctttttaaaaaaaaatatcagcaagaggagtgttgttaaattgccaaccaattcagactcactagtcttttccagtatctactggagctaaaattcacaaacccaactcacttctagaaatcatagcttctgactctgcgtcagcatggtgggtgtttgggcagcaagtgagcagaaggtgctgggatcagattgcctgggttctgactctgctgctcccatgcactggatgtgcgacttggaagcaaaattacttaacctctgagagcctttgtttttcccgttggcaaaaaggcaataacattaatactaatatagggttgtcggaggattatatgagataatgctcatgcatcaaaaatggtaagcactcaacacatgtcagtggctggtattattactataatttttaccacaaattctgaataaacacgtctagaaacaaggtattgccatgattagcttgaaccagtatcacccataatttttttattaattattgcctccctttgcactctctgggatttccattcatttatttcacaaatacttatttagtacttactatccaagcagggtactaggcactggggatacactagtgaacaaaagagacaaaacataaatgatagtttaaaaattgatgcttcactacattttaacagccttaccatttaaccgtactgaagactgagagaactgaaatgtttgatcatatttagattttgtgaatttgcccataccaggtactgactagcatgaaaaatagtgacagaaatgctacataat

SEQ ID NO: 106889 - DNA, 1833 bp, Homo sapiens
ctatgtaccaggcattgttataggtgccagggatattgcagcagaacaagcaaatgaacaaacaactctttcttcatgaaagttatattctactggaggagagactcatgatggacaactttgagatcatgtagatgaaatcacttcataagcaggaggtagtattctcctcagatcctggtctaatggcctgtattatggtgccaaaatttgtatttgaaatcacccttgatttcaggcaggaggcctgacctgtctatccctggtaattttgagcactgttaagtctgggtagaccatctgctttacctaagcttagatcattggctctctttttcagtagtctgaggctttcctcagaccagtcacctcttcacggacattttaagtgtatgagggctaagctccaaaacacagtaattgctcttgagaataagcagttttctctgtgaacacaagaaaatcatattctgctgggctcaaagagagtttcttaaagttgactcagaagaggcttaaaaacagtaagtgttacaaatggttttttgaaaggaagaggaaattatttatttattattttaagagtttcatttcaagaatgagggaagtaaaccaaaatatccagctttttttgttgttgtttgttttgttttatttttccctaaaactcttttgcaggaaaccttatggggcttttgccttttgatcttgctatagaatctagatggatacatgagacagaaggatacagaaatgttctcaaagtggttgggccacccaattaactctaggggtgtgattcagttttgtaccactttacatagtgagaaaacattccagaaggagctgtgctccccttgggtgtaggaatgtctctcctggtctgcaatgcagttgaaaagtgaagaataatttccattttctgctttgtctattgaaataaaaagacaaagcaaaaacaataaaaaaaaaactcttctacatcatttatcgctcctttatttggcaggagttttcaaactaatattttctttttgtacaccagccccattttttaaaaagtactgagtagaagttttttaaatttggcaattcaaaaaatagttttacttcaacaaacttaatgaaatcattattctttaaatatcatatggaaataatagtaagtttttttttgtttctttaccacattgatatttgtggtttgtttaccacactgccattcaacctttgatgaacatgtgggatgaatgagcactactggtaataatgaaattaggtacaactttcccataagaaaatttggcaaaatgcatcagaagcttcagtggtttttatatccttttatctggtaattcttccacttaggatttttgttcttgttagaagaaaggaataagtgacaatctgagaatatttgtccctacgtgagctaacacagtcttttaagatttgtattaaggttagttcctttgcacctatcagttttgcttttaagttgagattatttatgtttgttttatttatgtgaaataagtccttagaaaatatctttgatgcttatagttataggatatagtgatttcctttaccagctgctaagttctattaggtttttttgtttgtttgttttttaaagacatggtgatacggcttggctgtgtccccaaccaaatctcaacttgaattgtgtctcccagaattcccacatgttgtgggaaggacccggggggttggtaattgaatcatgagggctggtctttcccatgtggttctcatgatagtgaatggataagtctcacgagatctgatgggtttatcaggggtttctgt

SEQ ID NO: 106890 - DNA, 1982 bp, Homo sapiens
aatcatgctattagaatggaacttttttgtttgtttgttttttgagttggagtctcactttgtcacccaggctggagtacaatggtgtgatcttggctcactgcaacctctgcctcccgggttcaagagattctcctgcctcagccttttgagtagctggaattacaggcacatgccaccacaactggctaatttttgtatttttagtagagacagggtttcaccatgttggccaggctggtcttgaactcttgacctcaggtgatccgcctccctcggcctcccaaagtgctgggattacaggcatgagccaccacacccagcctgaacaactctgtttttgaggaacggttttatatttcagaagaggatatttcaattgggtcatgctgggaaaactccccaggagatgaacctgccacttcatcgtgcagttattgtctgtacttgcacaaattattgcttcttctggcttgggatacttcatctacttgtgagttggcagtagtgacacctacctgtccccccctggagcactgggctgatgtcatcattgtgcggtgttggatgagtaagtactcgagaaagggtgattgccaagggctgggtagttcttcagggggatgggctgtgttagttgcctggttgttaaaataggagattaagaagaggaatcctgagcctgacttcttcctttgcaacccatgacctcattttgtctgacttttttcctttagcagttaaggccattatactctacagatatattccagaggaagtggagggctccacctttaaaaataataagcaattcaggacagttcatataaagtcaggatttgaatagatatttattaaatgtctgccatgagtaatgtattccactaagcacaagggggagatataaaacgtagtttagtaggttcttcataggttctaatgaaatgtaaacaccttacgagaagtgtattcctttatgtcacaaggaacccttgtgttctgtaggtcaatcactgtgcaatactacgtagattcagagatagttattaagcataataaatcaatcacacttttctctaaagctcagtagagatactacctgtctccacatattacatttgattgtaagatacagcctagagaaaaatgttagaatctcattgcagtgatttccaatgggaagaaatctaagagaatccattcatttgagattttctgtattataaaattattttctaaaccagagtctataatagatttcctttaaacacaagaatatatatcataagcataataaaaatgaatcataccacacaattcttgtttgtataaagaaatcctaatacatgaaaattaatgaatgatattgccacttcatatatatatttgtatgtacaaatatttatatatatttaaatatgtacctatttaaaatatatatatttataacctaatgcctgtatttacaggattaataaaaccataaccctatgtcagagtttttaatagctagcaacaataagcaacttttgttaattttgaaagaaaatgaatttattgacagggtattgggttacctgctgagttgctaggcagtaagaagaccaggcttggaaccgggagcagtacctctaacacactgcagaattggtctggagagcaatggaagcctgcttctctgtttctattgcaccaataattcagtcttcccacagccttgcccactccctgtggtccctgttccttttccttatcctttatctctaacacctgagtccagtgcagaacacctgattggtggatcctcagtcacatgttcattccctagctgcaagggaggctggcaaaggaacacctgcattttctcatttctagagtaggaggatgattctgcagccaaagcaattgccaaattgttattacaataattatgctagaaagtttgaaaggcagaaaacatgaaaacatcatcatattccatt

SEQ ID NO: 106891 - DNA, 1051 bp, Homo sapiens
agttagggtttcaccatgttggccaggatggtctcgatctcttgacgttgtgatccacctgccttggcctcccaaagtgctgggattacaggagtgagccaccacacccggccgccattgctttttagtttttgtttttatccaagccacataatatagtgggtttttaacaaaagggcagtcttgacatttctcttcttcccgtttttgttactgcttcacaactgagtacgtaacaactggtacttcagtgatacagtggcctattttctttcttataaaagacattactatatcatacagtattttaacctttcctttacaaatctcatgatactgagatgcctttggttaacaaaaattgccattgagtctggaagattgtttgtttgctgactgaccagccccctcatctcatccttctcacaaagaaagaaagaaagaaacaaaccctcaacccttaaattagtcaaagtcctaaggcagttttcccagaacaaatgtccatattgactttctccgttgttaggtcctgtccttgttgacccgttgctggcttgaggggctgattctgttcactttggaattgggtagcgttttggtttaacaacagtgtccacccagcgggggaccaaattctcaggagaagccttatttataataaagcacaaaaacaaatactcagaagaaatagtgattacataggccctctgaacagtttcaaaagcagaaataattccgttgaaaatatgaatcctgtaaataactcatagtttggtagtgtttcataaagtgattaggagtaagcctcaatttcctcatgctgaaaatggggataataacatctgctacttcgtaggattgtaatgaggattaaataagtgaatccattgaaaactttcagaaaaactacctgtaacatagcactcagtaattgctttattttctttcttttggagatggagtcttgctctgtcacctaggctggaatgcattgatgcgatcttggctcattgcaacctctgcctcccgggttcaatcaattctcctg

SEQ ID NO: 106892 - DNA, 1054 bp, Homo sapiens
ggagttgccaactgtgaaaatgcagaagaccgtgggaggagccaatttggaagagtggatgaacatgctgagcttgagagtctgcagtcctccaaacggtgccgtctcgtaggccagtggagatgagtctggttctcagagacctctgttctggggtgcttaaatccatgtgactgggttcgatcaccagggctgggagtgtagatagatgaaatcaagctcggatccttgaggcactctgacatttagaggggagaagaggagaaaactagctaaggagagtgagaagaaatgaagaacgtgagagaaaaaccaggcaagtgtggtaaatcgaaagccaagtaaataacatgtattaagagcctccttgctgttctttgagcaaccaaggcttgttcacacctgagggctgtatgcttggctggaatgccgttcctgccaatctgcctggctcatctcaccaacttcaggtctgggcgtcaatgtcatactctgtgaggcccttacctaaacacactgtgtaagatttgcacagttgcctggcatctagttggtgctcaagcaatatttgttgattgaatggtgaacatataacttttgatgaaggcagcagtccaggtgagaacatatgaaagccttgctgctcgggatgtagtgtgttccctggaccggctgggtcagcatcccctggcaacttgttagaaatgcagaaatcttgggctctagcccagacttgtggcatcacactctgcatttaacaagatcctccagtgatttgtgtacacattaacatttgctcccagtcctgtatttaattttctatgaatgtcaagaggacaattgagtatactctctcagatgggaacaactcaaagtaagaagttaaaacaatcaaaatcaaatatcttcagtggttgtttctgtattcaatcagaaagctatgatacagtttaaaagcaaaagaaaactgtgtcgagactttcaagaatattttatgtgattatccccctatcttttttacttttattttatgtggttattccacatatctttc

SEQ ID NO: 106893 - DNA, 1023 bp, Homo sapiens
gcacctggaatatgcacctggaatacacccctggatttacacagttttatcttcccttcttattcagttaaagtcctagatcagaactgacccacagaagagggagcttctctagttcgcctctgcggacagaataatggagacatggctatggtttctaaccctggcaagttgtttaggtttcctcttagtttctgttttctttagctttaaaaagggtggggggtaattaagcatatcctgtattcttacaaagatgcttgtccagttaagacagtagttggaaaaacaactgtaaaattacgtatacatatactatttctctttattaaaatcaccccattctttccttcaaatcctgctaaaacttctgttgagtaggaaagttcaattctagtttggtgaaactttcctagagagcaggggtcagcattttctataaaaagccacaatgtagataattttaggccttgggggccctgcagactctgttgctactcttcaaatctgctattgcagcaagggagccgccctggacaacatgtcaactaatgggtgtggctgtgttctgataaaactttatttatccacattgaaatctgaattttatataattttcatgtgtcatgaaatattcttcttttcattttttttcaactatttaaaaatgtaaaatccattcttactttatagaccatacaggcagcagaccgagttgggctgatgggtggacagactcctgttgtagagaaaaagcactgggtttgtcaaccatagccatttcgaacctttctttatttaagactctttggtttgctttgtatttgcatctgattttgattcttctcccttaggccaggattcatacccttgttgtttttactttttgttaaggacagctttgtacagattgtacagtaaacaagattatatgtccaaggatatatgttctgggcttttgttttcttttgtggtaatgtaattgtgggactgaaaagaacctcgacacttaatcagatgtga

SEQ ID NO: 106894 - DNA, 1014 bp, Homo sapiens
ctgccagatctggactatttcagaataacactaagatattgttttcctttttcactctcatttcaccagtaaacaatagagttttccgaaggctacatgtcgtgttgagatgtcattgttctgacatcctgtgagatatctactaatgtataatcgtgtgttttcaaaaattctcaattttaatttctaatatgctaaatattgatagatataatccatgtaaacacaataaatttaaagagtgtaaaaggatcctaagacaaaaatgtttgagaattgctgttttagatattgtgctaaggccgttagaaacatgatctcatttaatgcagaaaacacacatatgaggcaagctctactgtcattcccattcaatatgctaggagatgagggcctggagaagttaatgaattgcagaaggtacacgggttgttaagttgcaaagatagaatctgaacccaggtttcaagttaagaactccactgtctgtgttgtcaggcacattgtctttcaaagaagcaccaggaaatgcctggatttggactaatttctcagaagagaaacttcttcccataacctaggctatctccaagggaatgtaaatatgaagattatccttatagacagtgtaaaatagagattattttctagtagtttgtgggccgaggcttgtactctgtgaaacacaaaacagttgagcatcggatctttaaacctggaggattttacttaaaaaagaagtttggattgccagctacccttgaaaaatttggagattttgagctaggctggactcatattcccacatggccacaatcagctgcagtttttatctgctgttcctgctagatagatgtgtgtcctctggtttgccacagacctcactactccttattaccttcctcgtagctcatgttcctcatttatgttgcctgtttgaggtatttgggttagaaacagctggagatgttctgtctactgcatagtgtttataggccatctgctttcaactta
